United States Patent Application Publication US 2008/0050393 A1 - sequence listing, part 35

SEQ ID NO: 123599 - DNA, 1859 bp, Homo sapiens
  misc_feature (1)...(1859): n = a,t,c or g
catcaccgctggggccacaccagaggagagagtcatttgcttcgttgagtattatctcacagcctttcacgagggccgcaagggcgctttagccaagaagccctacaaccccatcataggcgagacatttcactgctcctgggaagttcccaaggacagggtcaagcctaagaggactgcttcccggctctcctgccagctgtcatgaacacccaatggccgatgacccttcccaaaagctacaaactaaggtttgtggctgagcaagtgtcccatcacccacccatctcctgcttctactgtgagtgcgaggagaagagactgtgcgtcaacactcatgtatggaccaaaagcaagttcatgggcatgtccgtgggggtctctatgataggggaaggtgtgttgaggctcctggaacacggggaggagtacgtattcaccctgcctagtgcctacgcccggtccattctcaccatcccgtgggtggagctcggaggaaaagtcagcatcaactgtgccaagactgggtactcagcgacagtgatattccacacgaagcctttctatggagggaaagtccacagggttaccgcagaagtgaagcacaacccaaccaacaccattgtttgtaaagcccatggggaatggaatggtactttagagttcacctacaacaatggagaaaccaaagtcatcgacacaaccacactgccagtgtatcccaagaagatcagacctcttgagaagcagggacccatggagtccaggaacctctggcgggaggtgacccgatacatgcggctgggggacattgacgcagccaccgagcagaagcggcacctggaggagaagcaacgggtggaggaacggaagcgcgagaacctccgcacaccatggaagcccaaatattttatccaggagggcgatggctggggtatacttcaatcccctctggaaagcacactgatggggttggaggtgcagagctttccagtatagccctgtttttgtaggaatattaaagtagtagagtatcaagggttttgttggcattcactgagaccttgtattagcatccaagaaatgatgagagagagagaaattatatactatgaaaagtggaacccccacactctgctagaggaatgaatttattcaagagccattcggggcacgtgtgtgtacacacccgtatacgttcacacacatgcactatgtaaacatctgagtatgattacacatttaaatacttgcacttcaccaaggttaaaagtggggtaatcctaagctcccttttttattcaatggaagttttgaagtttttctatttttcactttgcccaaaaatgttttacactcacaaagatattctcacttagtcaactcccggtcaaaatgaaggtgaactggcatggcccgatcacttgtccataagggagaaagtggctcattcctgggtagaagtatgggtgggtatccatttcaaaaattattgtgattctcacctccctccccacctcagtgttttgtctgtccgcgcccaagaaagataagcaagtatttcctgctggatgggggttggcaggaagctgttaaagatttatgccagagccttgcaggatggagcacctctgggacaactaagagccaaggcccaccaaggagttttccacccgtctctcatggtcacagcgctagtcattcatttttgagaagttgcttcttttacatcagaaaactagtcaatccatatggagacttcttttgtgatgaaaaagggctttagaagtttaaatacatgcatgcacatgaaaaacatgcacaaccacagccttcatcttgtatttagtttggngaag

SEQ ID NO: 123600 - DNA, 1005 bp, Homo sapiens
cttttcagtgacatttctttttgtataaaaagcttataccttttgttttaaaaaattgtatgtttcatttcagcccagttcggggcacagtagtcaccaatgatcgttggggagctggtagcatctgtaagcatggtggcttctatacctgcagtgatcgttataacccaggacatcttttgccacataaatgggaaaactgcatgacaatagacaaactgtcctggggctataggagggaagctggaatctctgactatcttacaattgaagaattggtgcagccacttgtagagacagttttcagtgcaggaaatcctttgatggataattggcccacacttagatggcaccattttctgtagtttttgaggagcgactgaggcaaatggggtcctggctaaaagtcaatggagaagctatttatgaaacctataccctggcgatcccagaaatgacactgtcaccccagatgtgtggtacacatccaagcctaaagaaaaattagtctatgccatttttcttaaatggcccacatcaggacagctgttccttggccatccccaaagctattctgggggcaacacgaggtgaaacctactgggccatggacagccacttaactggattttctttggagacaaaatgggcattatgggtagaactgcccacagctaacccattcatcagatgccgtgtaaatgggggctgggctctagcccctaactaatgtgatctaaagtgcagcatgagtggctgatgctgcaagttatgtctaaggctaggaacttatcaggtgtctataattgtagcaccatgggagaaagcaaatgtaaaaactgggataagaaaaattattttggccaggttcagcccctttccctttttcccacctaaaattttttccttaaaattaccccatgttaccattttaaactctccagtgcactttgccatttaaagtctcttcacattgatttgtttccaaaaaaaaaaaaaaaaaaa

SEQ ID NO: 123601 - DNA, 627 bp, Homo sapiens
atgcagacagtgcttaacttgcgggcctggcacggcctggacgctgcgcccctgacccgcgaccagggcggcccaggctgccggttcgccgaccacagtttgagcagcaagggcttccctttcactgccatctgcggtgaagctgccaccaaactgcagattttcgtgaaaaccctaagggggaagaccatcacccttgaggttgaaccctcagatgcgatagaaaatgtaaaggccaagatccaggataaggaaggaattcctcctgatcagcaaagactgatctttgctggcaagcaactggaagatggacgtactttgtctgactgcaacattcaaaaggagcctactcttcatcttttgctgagactttgtggtgttgctaagaaaaggaagaagtcttaccccactcccaagaagaataagcacaagagaaagaaggtgaagctggatgtcctgaaatgttataaggtggatgagaatgacaaaattagtgcccttctgacgaatgtggagctggagtgtttctgccatacagaatgtgcctccttcctcttcgccttctgccatgattgttccaacctactgggcttgatcaaggacaggaccaattcctattcagattaa

SEQ ID NO: 123602 - DNA, 701 bp, Homo sapiens
gcgtcgactttttttttttttttttttgttagttcatgtcttttattaactcatacaggtaacttggtctttctggtttgttgaaaacagtaaagtcaggacaaccatttgccacaataaatgtctgtcaaaagtgacttggccataaaaacccccagcacccacatttcatcagaaggggcactctcggacggaaggcggacttaattttgcccattcttcaatccaccttaataatatttccagggcaagcccagctttaaccttcttttctctttgtgctttattcttccttgggagggggtgtaaagacttcttcttcctttttcttagcaccacccacgaagtctcaacacgaagatggaagagtaggactcctttttgaataattgtagtcagaccaaagtacgtcccatcttccagctggcttggccagcaaaaggatcagtctctggctgattcagggagggaattcccttccttaatcctgggatcttgggcctttaacattttgctatcgtatccgaggggttcaacctcgaggggtgatgggtcttcccccgtaaggtgtttttcacgaaaaatcggcattttggtggcggctccacctgaggttgaggaaaaggaagagacaggttaggtcagggatcacaagagaagcgaccatagggtgctaacccgagagcagccgaaggtcgagc

SEQ ID NO: 123603 - DNA, 718 bp, Homo sapiens
ggtcgacctcgtgagagaatttatagagcggcaactgcaaagaacaggtattactactaccaccggcagtaccgccgcgtgccagacatcactgagtgcaaggaggaggacatcatgtgcatgtatgaagccgaaatgcagtggaagagggactacaaagtcgaccaagaaattatcaacattatgcaggatcggctcaaagcctttcagcaacagtcatacagagccacacagcaggggcacccacaagctgcctcaggaggtggcagctggcggcctcttttgcagattttctctcttgcagcatcctctgcctctgttaggccaggcacttcctggcagaactgcaggcccccaggtcctgatctggggaagcaatgaaaacaagctgggaaccgaggcctctgctacatgcaaagggggcaaagtcaagtgagcacaagggagggggagggaagatttgcaatgggttctgggcccccggcctcaggaggatggtggggggttgggggtgggtggggcacgcacagcggtcctggtaggccttggcaccctgggtgaactgctccacgtccgtgagaaggttagggcgggtagttttgtccttccctctgctggaagagctttgagccgatccttcataaatgttgataatttcttggtcgacttgttagtccgtcttcacgtggatttcggcttcgaacaggcacatgatgtc

SEQ ID NO: 123604 - DNA, 931 bp, Homo sapiens
  misc_feature (1)...(931): n = a,t,c or g
cccccccccaaaaaagggttttctccaaaaaaccccccgggggtttttttaaccccccccnnnnnnnnnnnnnnnttattttcccaccccccgtaaatttgggcccccccggggatttttttaaagggcccccccccgggacgtaaaatttgatccttttaaaaggnnnnnnnnnnnnnnnnnnnnnnnnnnnnnnnnnncaggttgcttgggctttatatttccagcaacagtcatacagagccacacagcaggggcacccacagctgcctcaggaggtggcagcggacggcctcttttgcagcttttctctcttgcagcatcctctgcctctgtttgggccaggcacttcctggcagaaccgtagggcccccaggtcctcgaagcgggtcctggtaggccttggsccacctggggtgaaactgctccaacttcccttgaataacagttctgactgggtagttcctgtcccttcccctcctgcctgaaaagactttgaagccgaatcctgcaataaatgttgaataatttcttggtcgaactttgtaagtccctctttccaactgcatttcgggctttcatacatgcacaatgatgtcctcctccttggcactcagtggatgtctggcacgcggcggtactgccggtggtagtagtaatacctgttctttgcggtctgccgctctataaattcctctcacgagggttaaggggtcggtccacgatgaggtcgaaacgctttcatcatgtagacgatgggattgggctgcaccggcgtgcggcgcgggggctcagggtacacatccttgtcccagctgtccggcatggcggcggcgggcgcggactccggctcccggacgcgctgccctggcctctacctccgtccgggtcccgcggcctaggtcgcccgctacagaggaccgaggcggct

SEQ ID NO: 123605 - DNA, 1163 bp, Homo sapiens
atggagagattacctccaagcccatggtactgttcctgggaccgtggagtgttggtaaatctaccatgataaactacctccttgggctggaaaatactcgctatcagctctatacaggcgctgaacccaccacctctgagttcacggtcctcatgcatgggcctaagctgaaaaccatcgagggcatcgtcatggctgctgacagcgcccgttccttctcaccccttgagaagtttggccagaatttcctagagaagctgattggcattgaggttccccacaaacttctggagagggtcacttttgtggatacaccaggcatcatcgagaaccgcaagcagcaagaaagaggctaccccttcaacgacgtgtgccagtggttcatcgacagagctgacctcatctttgtcgtctttgacccaacaaagctggatgtgggtctagagctggagatgctcttccgccagttgaaggggcgtgaatcccagataaggatcatcctgaacaaggctgacaatctggccacccaaatgctcatgcgggtttacggggccctcttctggagcttggcccctctcatcaatgtcacagagcccccaagggtttacgtcagctccttctggccacaagagtataagccggacacccatcaggaactgttcctccaagaagagatctccctcctagaagacctgaatcaggtgatcgagaacagactggagaacaagattgccttcatccgccagcacgccatccgggtccgcatccacgccctcctggttgaccgctacctgcagacttacaaggacaaaatgaccttcttcagtgatggagaactggtctttaaggacattgtggaagatcccgataaattctacatcttcaagaccatcctggcaaagaccaatgtcagcaaatttgaccttcccaaccgcgaggcctataaggacttcttcggcatcaatcccatttccagtttcaaactgctctcccagcagtgctcctacatgggaggttgctttctggagaagattgagcgggccatcactcaggagcttccgggcctcctgggtagcctcgggctcgggaagaatccaggtgctctcaactgtgacaaaacagggtgtagcgaaacaccaaaaaatcgctacaggaagcactag

SEQ ID NO: 123606 - DNA, 581 bp, Homo sapiens
  misc_feature (1)...(581): n = a,t,c or g
tgactacacagaaaaacagatctgccaaagcagctcacagcatggaggagcaggcaggggaaagtgggagggcccatcccccaagagggcagacagtacagagatgaggcgaggggttctggggtttgcggagggtggttaatgagaagaaaagtccaggacagattccatctcatcagcccctatcacaggctccgtggatgccccttgcagaactcactgttctttcctggtcgactcgttccttggaaacattgtcctgagtgccctggaacctcgggtgttcttgtggaagggtccaggccctccacaaagccaaacgcaacggcccctgtgacagcatgcaccagagtgataacaattctgagaaccgggaattcctaactcgaggttnnnnnnnnnnnnnnnnnnnnnnngccaactggcttaccctgcctgacctcagagtgcctctccctttgcntgcctttccactgtcctgggtccaggaccacttcctggtgntgagctggtgcgtcctggtaactgcaaagtgggaaaggaacacaggacagctagttcccgcacgggtgggtggtccc

SEQ ID NO: 123607 - DNA, 955 bp, Homo sapiens
ggttgcttccccataagcctttagcaggcttcttcaaagcctacttgccctcagagcccccaagggtttacgtcagctccttctggccacaagatataagccggacacccatcaggaactgttcctccaagaagagatctccccctagaagacctgaatcaggtgatcgagaacagactggagaacaagattccttcatccgccagcacgccatccgggtccgcatccacgccctcctgctggctcgagggctcgatcccttcatcggacccaggagggactggttggtgtatccagctgtcacaggggccgttgcgtttggctttgtggagggcctggacccttcacaagaacacccgaggttccagggcactcaggacaatgtttccaaggacgagtcgaccaggaaagaacagtcggtccgcctcgtgggctgtggggcagacgaccggaagccccgagatctccagatcctcgatcgggaccgaaaaggccctgaacttgtgcagtgacttgccattgagtccgggaggttctggagacctgggtgacggaagaacgcccaaggccgactgctgccctcagttatcggggtgatgataataaaggtggtttcatggaaaatatgggatcttgtaaagacaagaccccgatctgcgagtgtggcttgctaagttggggccttcccggagagcagggacggcggcctccgggcatggagctcgcgctgacgaaaggttctggaagcgccgtaaaaagtaatcaagaaacgggtgacaggacttttcgtaagacattaatttttacccagagtatccgaaacattgccgtgtcaatctcagtgcgatgggagactgccggccccaaggagctgctcgtccttctgccgagttccggcccggacccgcggaggaggagaccgccgcgccggagctcggacctgacgtttttgtga

SEQ ID NO: 123608 - DNA, 1368 bp, Homo sapiens; identical to SEQ ID NO: 122630

SEQ ID NO: 123609 - DNA, 1539 bp, Homo sapiens
atgaaacgcttgtcacattcggctttgtggctctccctcctgagccacctgtgcaggacgctatggctggaattaacctgtgccaatgggagcctgatccagtgtttggggatggtggagtttaagctggcctcgctgtatctttctgctcagccctgcagcctgagggggcctctctctggtagtgacagacaagacaggccaactcagagagctataacactcatcgcatggtgcaagattccattctttggaatccgtgaggccaaggcttgccaccatcttggaagtggcctgctgccatcttgggagctctgggagcaaggaacccccggtgacattttggtaaccacgaagagatctccaaagcagtatacagctctcgacatgggcagttatgtgggacccattccctaccacccttgccagggccccaagcttgtaatggcggaggagagagagcgcgagacagaggagagagcggagactcttgtggaagcagagttagaaaaattgcctaataattggtctcctcaaacgtgcaagctgtttgcactcagccaagccttaaagtacttacagaatcaaaagactatctcagtcctgactcaaaaccttacttacaccttctctgaaacgaatttgcataaaaactgttgtttatgggaatgcatcttgatggggcaggaacctagcctggctctaggactcacccctgagtgcaaaggcgatgttggacatgctggtaaaggaacactagaatccagtagcccagacccctttctttgtggtcaagagaggcaggaaaaggtgtgcaggactgctacatcgacaactcgcaattatgtagaaagtgtgatttatgccctacaggaagccctcagagtctacctccctacgccagcatccccccaactccttctccaactattaaggacccccttcaacccaaatggtccaaaagagacagacaaaggggtaaacaatgaaccaaagagtggcaatattccccaattatgccgcctccaagcagtgggaggaggagaattcggcccagccagagtgcgtgtacctttttctctctcagacttaaagcaaattaaaatagacctcggtaaattctcagataaccctgatggctatattgatgttttacaagggttaggacaatgctttgatctgacttggagagatataatgttactgctaaatcagacactaaccccaaatgaaaaaagtgccgtcataactgcagcccgagagtttggcaatctcttgtatctcagtcagctaaggcactggcctgtgacactccagccatcagctgtccccacaccagactctggcacttatgacacaaaagaatgcaaaatagtacaatctgttgaaatgagcatggaagttatgattgctgtcatgagtgtgcagagacagcaggggaagcagacacagcaacagccactgctggtagtggttaggtcagcagagccagcagaagagtctgtgccccataaaagcagcactaggggggcttcctga

SEQ ID NO: 123610 - DNA, 249 bp, Homo sapiens
ggccttagaactgatgacccagtactttaacaactggaactgggtctacaacaacataacagatcaggatgaaagtgaattgaatgggaaacgttctccacaaggcaaaaacacccctaagatgtattctggagaattcagcccagtcagagtgcatgtacctttttccctctcagacttgaagcaaattaaaatagacctaggtaaattctcagatgaccctgatggctatattgatgttttacaagg

SEQ ID NO: 123611 - DNA, 385 bp, Homo sapiens
agctataacacttaccgcatggcccaagattccattcctcggaatccgtgaggccaagagccccaggtcagagaacacaaggcttgccaccatcttggaagcgggtcaccgccatcttgggacctctgtgagcaaggaccacccggtaacattttggcgaccacgaagggacctccaaagtgacttaaagcaaattaaaatagacctaggtaaattctcagataaccctgatggctatattgatgttttacaagagttagggcaatcctttgatctgacatggagagatataatgttactgctaaatcagacactaaccccaaatgagagaagtgccaccataactgcagcccgagagtttggtgatctctggtatatcagtcag

SEQ ID NO: 123612 - DNA, 852 bp, Homo sapiens
gaacctagcctggctctaggactcacccctgagtgcaaaggcgatgttggacatgctggtaaaggaacactagaatccagtagcccagacccctttctttgtggtcaagagaggcaggaaaaggtgtgcaggactgctacatcgacaactcgcaattatgtagaaagtgtgatttatgccctacaggaagccctcagagtctacctccctacgccagcatccccccaactccttctccaactattaaggacccccttcaacccaaatggtccaaaagagacagacaaaggggtaaacaatgaaccaaagagtggcaatattccccaattatgccgcctccaagcagtgggaggaggagaattcggcccagccagagtgcgtgtacctttttctctctcagacttaaagcaaattaaaatagacctcggtaaattctcagataaccctgatggctatattgatgttttacaagggttaggacaatgctttgatctgacttggagagatataatgttactgctaaatcagacactaaccccaaatgaaaaaagtgccgtcataactgcagcccgagagtttggcaatctcttgtatctcagtcagctaaggcactggcctgtgacactccagccatcagctgtccccacaccagactctggcacttatgacacaaaagaatgcaaaatagtacaatctgttgaaatgagcatggaagttatgattgctgtcatgagtgtgcagagacagcaggggaagcagacacagcaacagccactgctggtagtggttaggtcagcagagccagcagaagagtctgtgccccataaaagcagcactaggggggcttcctga

SEQ ID NO: 123613 - DNA, 1521 bp, Homo sapiens
ctagtttggcagttgtttatcttctctgcttggcactgggaaaaaccaatagacccacttgctgaagacagtggaagggctgaaaatttgtttttcagaaaatgtaagatcttggaaaatatctgcaaaggcagctgttctgtctctcctctctagttcagcctccatggcctgttcccactgagatctatccataagaccttccggatggcttttaggactgtcctttacatctggcaatagcctgacatcccgcctacgtttagaaaaattttctagcttcccatccgtgtaggagcaaattcctgatatgcaatactcactttgcccagacaggggattgccacatgagagtcctcttcctggtctctggtggtcagccgacctgatgtctgacacagcataccaattatattgcagttgagatctcactgagttcaaaatgtctagcacaacaggagaattagtcttaaggaagttaaacacaatagtgatccaaaaccaagagtttctcagattgtagctgtatttggagataaagcctttaaagaagcgattaaggtaaaatgaagtcgtatgggtgggccctaattcaatacaatgggtgtctgtataagaagaaacaataaagacacagacgtgagcatgcagagagggaagtccatgtgagaacacagcaagaagatagctattagcagttactggtttaggttttgccagtgagaaactcgtgtgtgagacttggaaggtgaacaagaagaagaagccattgatcttcagtgggagctgcaggcagcactgctgtttgccgccatcgtagacccgcctctgacttccatccctccagatctggcagggtgtctgctgcgctcctattccagccaggggcccattgcccctcccgatggggctaaaggcttgccattgttcctgcaaggctaagtgctcaggttcgtcctcatcaagctgaatcctagtcactgggttccacggttctcttccgtgacccacggcttctaacagggctataacactcaccacatggcccaagattccattccttggaatccgtgaggccaagaaccccaggtcagagaacacaaggcttgccaccgtattggaagcagcccgctgccattttggaagtggcctgccaccatcttgggagctcttcctggtgtgtgggcttccatagccgcttcttcttgaaatgtcagtaagatgttttgggatttttacattactgatattaattttggttgagatggcaatgacaaatttctggtgtgttctttgtagaggaattcctcttgtgcatggcccttctgcaatatgtagcagattgggaacatctgccagttcctcagacaaggacaggatttcagctgcaatgaagcttccctttcgtgggctttttagctttgaggtcatgtaaccctttttcaccctgtcaccatcagccctcttggctttgagtttcttctctttagtatccagtttatcagctttttcatctgccat

SEQ ID NO: 123614 - DNA, 2343 bp, Homo sapiens; identical to SEQ ID NO: 116181

SEQ ID NO: 123615 - DNA, 1776 bp, Homo sapiens
atgggatactttaacaccccactgtcaacattagacagatcaacgagacagaaagttaacaaggatactcaggaattgaactcagctctgcaccaagcagacctaatagacatctacagaactctccaccccaaatcaacagaatatacattcttctcagcaccacaccacacctattccaaaattgaccacatagttggaagtaaagctctcctcagcaaatgtaaaagaacacaaattataacaaactgtctctcagaccacagggcaatcaaactagaactgaggattaagaaactcactcaaaactgctcaactacatggaaactgaacaacctgctcctgaatgactactgggtacataacaaaatgaaggcagaaataaagatgttctttgaaaccaacgagaacaaagacacaacataccagaatctctgggacacattcaaagcagtgtgtagagggaaatttatagcactaaatgcccacaagagaaagcaggaaagatccaaaattgacaccctaacatcacatttaaaagaactagaaaagcaagagcaaacacattcaaaagctagcagaaggcaagaaataacaaaaatcagagcagaactgaaggaaatagagacacaaaaaacccttcaaaaaattaatgaatccaggagctggttttttgaaaagatcaacaaaattgatagaccactagcaagactaataaagaagaaaagagagaagaatcaaatagacgcactaaaaaatgataaaggggatatcaccaccaatcccacagaaatacaaacgaccatcagagaatactacaaacacctctacgcaaataaactagaaaatctagaagaaatggataaattcctcgacacatacaccctcccaagactaaaccaggaagaagttgactctctgaatagaccaataacaggatctgaaattgtggcaataatcaatagcttaccaaccaaaaagagtccaggaccagatggattcacagccgaattctacgagaggtacaagaaggaactgatccagcagggtgtccgctgtgcccctgatccagtgaggcatccattgccactcccaatcaggctaaagtctcgccattgttcctgcgcagctaagtgcccaggcatgcagctctcgacatgggcagttatgtgggacccgttccccaccacccttgccagggccttagaactgataacccagtactttaacaactggaactgggtctacaacataatatatcaagatgaaaatgaattgagtaaattaaagggaggcacatattcctatagcggcaaatgggggcaacaagtgaacgaccctccactgtgtttccaaaatccacctacagagacagagaggagagagacagagagagacagagaggtgggggtggtggatgggaaatgttccccccaaggcaaaaaagctcctaagatatattctggagaatttggcccagtcagagtgcacgtaactctttccctctcagacttgaaacaaattaaaatagacctaggtaaattctcagataaccctgatggctacattgatgttttacaaggaatcgaagctgtaaaactgcaaacagttcttcaaatggacccccagatgcagtccatgactaagacctaccacggacccctggaccggcttgctagcccatgctctgatgttaatgacatcgaagccaccctttccaaggaaatctcaactgcacaacccctactatgccccaattcagcaggaagcagttaa

SEQ ID NO: 123616 - DNA, 1349 bp, Homo sapiens
atgaggcagattcagatgaggaagaggaagacgagtgtaaaaatcgaacttcagattctgaatgaacccagcccagctctaggactcacccctgagcacaaaggcaatgttgggcacactggtaaaggaccactagaatccagcagcccggacccttttctttgtggtcaagaaaggggaaaacaggtgcaggactgctacatcgatgggaaatgttccccccaaggcaaaaacgcccttaagatgtattctggagaattcgacccagtcagagtgtgtgtacctttttccctctcagatttgaagcaacttaaaatagacctaggtagattctcagataaccctgatggctatattgatgttttacaagggttaggacaatcctttgatctgacatggagagatataatgttactgctagatcagacactaaccccaaatgagagaaatgccaccataactgcagcccgagagtttggtgatctctggtgtctcagtcaggtcaatgataggatgacaacagagcaaagagaacgattccccacaggccagcaggcagttcccagtgtagaccctcgctgggacacagagtcagaacatggagatgggtgccacagacatttgctaacttgcatgttagaaggactaaggaaaactaagaagaagccgatgaattactcaatgatgtccactataacacagggaaaggaaaaaaatcctaatgcctttctggagagactaaggcaggcattgaggaagcatacctctctgtcacctgactctattgaaggccaactaatcttaaaggataagtgtatcactctgtcagctgcagacattagaaaaaacttcaaaaacttagaaaccctattgaacttggcaaccttggtttttcataatagagataaggagaagcaggcagaacaagacaaacgggatttaaaaaaggctaccgctttagttatggccctcaggcaagcagactttggaggctctggaacacggaaaggctgggcaaatccaatgcctaatagggcttgcttccagtgtggtctacaaggacactttaaaaagattgtccaaatacaaataagccaccccctcatccatgccccttatgtcaaaggaatcaatggaaggcccactgccccaggggacaaaggtttccaaaccaaagctcaactctgctcagaacaggctaaatacttagggctaaaattatccaaaggcaccagggccctcagtgaggaacgtatccagcccatactggcttatcctcatcccaaaaccctaaagcaactaagagggttctttggcataccaggcttctgccgaatatggattcccag

SEQ ID NO: 123617 - DNA, 1264 bp, Homo sapiens
agcgacccagtgtggagagaaagatagaaggggtatcccccttctctttcctcccatctcctctgggtcccagcgaacatcacaggtgccacccatggatgcaagcatgaccttcaccaatggatctggagaagctagtcagcaggaagagtcatgtttatctgaagctataacactcaccacatggcccaagattccattccttggaatccgtgaggcgaaaaccccaggtcagagaacacaaggcttgccaccatcttggaagtggcctgctgccattttggaagcagcccaccaccatcttgggagctctgggagaaaggacccaccactaacatttggtgaccacgaagggacctccaaagcagaacccagcccagctctaggactcacccctgagcacaaaggcaatgttgggcatgctgctagaatccagcagcctggacccctttctttgtggtcaagaaaggcgggaaaaggggtgcaggactgctacattgacttaaagcaaattaaaatagacctagataaattctcagataaccctgatggctatattgatgttttacaagggttaggacaatcctttgatctgacatggagaaatataatgttactgctaaatcagacactaaccccaaatgagagaagtgccaccataactgcagcccgagagtttggcgatctctggtatctcagtcaggtcaatgataggattgcagcagagaaaagagaaaaattcctcacaggccagcaggcagttcccagtgtaggctctcattgggacacagaatcagaacatggagattggtgctgcagacatttgctaacttgcatgctagaaggactaaggaaaactagaaagaagcctatgaattattcaatgatgtccactataacacagggaaaggaagaaaatcctactgcctttctggagagactaagggaggcattgaggaagcatacctccctgtcacttgactctattgaaggccaactaattttaaaggatacgtttatcactcagtcagctgcagatattagaaaaaaacttcaaaagtccaccttaggcccagagcaaaacttagaaaccctattgaacttggcaacctcggttttttataatagagatcaggaggagcagacggaatgggacaaatgggataaaaaaaaaagaaaaggccacagctttagtcatggctctcaggcaagtggactttggaacctctgcaaaagggaaaagctgggcaaatcgaatgcctaa

SEQ ID NO: 123618 - DNA, 2044 bp, Homo sapiens
aaggtagatgctataaaagtaccatggttcaaccatattgctgttatcagtccagcatttctgctttataatgtgagtcaaaataatcctcttttctttataaattacccagtctcaggtattcctttatagcaacgcaaaagagaacacgaggcttgccaccatcttggaagtggcctgccaccattgtggaagtggcccacaacctcaggtgttacgctatctgcggaagggctttctaacaacccccaacccttctgggttggggacgttggtctgcttggagccagcttccactttcaattttcttggggaatccgagggctgactagaggcagaaagcgttgtgtccttaggcacctgggctgtaacccagggagtcttatccctggtgtccctcctgattcaggtatgcagctctcgacatgggcagttatgtgggacccgttccccactacccttgccagggccccaagtacaattccccacaggccagcaggcagttcccagtgtagaccctcattgggacacagaatcagaacatggaaattggtgccgcagacatttgctaacttgtgtgctaggactaaggaaaactaggaagaagcctatgaattatgcaatgatgtccactataacacagggaaaggaagaaaatcctactgcctttctggtgagactaagggaggcattgaggaagcatacctctctgtcacctgactctattgaaggccaactaatcaggcaagcggactttggagtctctggaaaagggaaaagctgggcaaatcgaatgcctaatatggcttgcttccagtgtggtctacaaggacactttaaaaaagattgtccaagtagaagtaagctgccccctcgtccatgccccttatgtcaagggaatcactggaaggcccattgccccaggggactagtaaaaccatgcaatagcccctgcaatactccagttttaggagtacagaaacctaatggacagtggaggttagtgcaagatctcaggattatcaatgaggctgttcttcctctataccctgctatacctaacccttgtactctgctttcccaaaaaccacagaaagcagagtggtttacagtcctggaccttaaggatgcctttttctgcatccctgtacaccctgactctcaattcttgtttgcctttgaagatcctttgaacccaatgtctcaactcacctggactgttttaccccaagggttcaagcatagcgcccatctatttggccaggcattagcccaagacttgagccaattctcatacctggacactcttgtccttcagtacggggatgatttaattttagccacccgatcagaaacctggtgccatcaagccacccaagcactcttaaatttccttgctacctgtggctacaaggtttccaaacaaaatgctcagctctgctcacagcaggttaaaaacttagggctaaaattatccaaaggcacaagggccctcagtgaggaacgtatccagcctatactggcttatcctcatcccaaaaccctaaagcaactaagagggttccttggcataacaagcttctgccgaatatggattcccaggtacagtgaaatagccaggtcattatatacactaattaggaaaactcagaaagccaatgcccatttagtaagatggacacctgaagcagaagtggctttccaggccctaaagaaggccctaaaccaagccccagttaagtttgccaatggggcaagacttttctttatatgtcacagaaaaaacaggaatagctctaggaggccttacaccggtctgaaggatgagcttgcaacctgtggcatacctgaaatcgaagctgtaaacctaaaaattgttcttcaaatggagccccagatgcaatccatggctaagatctaccgcagacctctggactggcctgctagcccatgcttcgatgttaatgacattgaaggcacccctcttgaagaaatctcaactgcacaacccctagtatgccccaattcagcaggaagcagttag

SEQ ID NO: 123619 - DNA, 1715 bp, Homo sapiens
ctatttcactctattaaatcttgcaactgcattcttctggtccgtgtttgttacagctcgagctgagctttcacttgctgcccaccactggtgtttgccgctgtcacagacccgccgctgtcgcagacccgctgctgactgccatccgtctggatccggcagggtgtccactgtgctcctgatccaatgaggcacccattgccgctcccgatccggctaaaggcttgccattgttcctgcacagctaggtgcccgggtttgtcctaatcaagctgaacactacttgctgggttccacggttctcttccgtgacccacggcttctaatagagctaacagagctataacactcaccgcacggcccaagattccattccttcgaatccgtgaggccaagaatccccaggtcagagaatacgaagcttgccaccatcttggaagcggcctgctaccatcttggaagtggttcaccaccatcttgggagctctgtgagcaaggaccccccggtaacattttggcaaccacgaacggacatccaaagtgatgggaaacgttccccgcaagacaaaaacgcccctaagacgtattctggaaaattgggaacaatttgaccctcagacactaagaaagaaacgacttatattcttctgcagtgccgcctggcactcctgagggaagtataaattataacaccatcttacagctagacctcttttgtagaaaaggcaaatggagtgaagtgccataagtacaaactttcttttcattaagagacaactcacaattatgtaaaaagtgtgatttatgccctacaggaagccttcagagtctacctccctatcccagcatccccgactccttccccacttaataaggaccccccttcaacccaaatggtccaaaaggagatagacaaaagggtaaacagtgaaccaaagagtgccaatattccccaattatgacccctccaagcagtgggaggaagagaattcggcccagccagagtgcatgtgcctttttctctcccagacttaaagcaaataaaaacagacttaggtaaattctcagataaccctgatggctatattggtgttttacaagggttaggacaattctttgatctgacatggagagatatatatgtcactgctaaatcagacactaaccccaaatgagagaagtgccaccataactgcagcccgagagcttggcgatctctggtatctcagtcaggtcaatgataggatgacaacagaggaaagagaacgattccctacaggccagcaggcagttcccagtgcagaccctcattgagacacagaatcagaacatggagattggtgctgcagacatttactaacttgcgtgctggaaggactaaggaaaaccaggaagaaggctgtgaatttttcagtgatgtccactgtaacacagggaaaggaagaaaatcctactgcctttctggagagactaagggaggcactgaggaagcatacctccctgtcacctgactctattgaaggccaactaatcttaaagattaagtttatcactcggtcagctgcagacattagaaaacaaacttcaaaagtccaccttaggcctggagcaaaacttaagacaccctattgaacttggcaacctcggttttttataatagagatcaggaggagcagtcggaatgggacaaacgagattaaaaaaaaaaaaaaaaa

SEQ ID NO: 123620 - DNA, 299 bp, Homo sapiens
caaatactaaataaatagagtttaatgccataatgagaaacttttattcttctgggaacaggaccttaaacagttccacaggctcgcctcttcagaatggcaaaactcttctcagtgtcctcagaagcaccctcgcttggaacggccttcagatcctttgggcttggcctgtgggctaatgccatagctggtgaaggcatattgccactggggcaggcccaggtgggtgatgagcaggcggtaataggcagtaaaggtgtctgtgagaaaatgccagtataacgctctgtccaggaacc

SEQ ID NO: 123621 - DNA, 1055 bp, Homo sapiens
tacgccagcttggcacgaggaactttctaaatggaactaaagccaaagcgtttgagttaagttacctcgagaaggttccagaagggaaagacacagtgcacaagcagtcgcttctccaccatgtgggcaccatggggggagaaaacttcccagacagctccgatctgtactcggagatcggggccatcaccaggtcagccaaggatgactttgatcaacttcaggataatttatgccagatggagagaagatgcatagcttcatgggatcacctcaaggcaattgcaaaacatgaaatgaaaccacttttaaaacaacggatgtcagagctcctgaaagactgtgcagagcgaattataattttaaagattgtccatacaaggataatcaacagattccactcctttttactctttatgggccatccaccttatgcaattcgggaagtgaacataaacaaattctgcaggattattagtgaatttgcactagagtatcgcacaaccagggaaagggttttgcagcagaaacagaaacgggccaaccacagagagagaaataagaccagagggaagatgatcaccgattctggcaagttctccggcagttctccggcgcccccaagccagccgcagggtctgagctatgcggaggacgcggctgagcacggggaacatgaaggctgtgctgaaaacctcgtccccctccaggagtcccctgcacataccttctccatcgtgtcagctgtgtttctcttgattccgtgacacccggtttattagttcaaaagtgtgacaccttttctgggcaaggaacagcccctttaaggagcaaatcacttctgtcacagttattatggtaatatgaggcaatctgattagcttcacagactgagtctccacaacgaccaaaatatccagatgtaaaccccaaacttgtacacaaaagaaagcacagattgtttacctgttgtggattttagatgtaacaaatgtttatacaaatacatacatgtacaccatgtttcaaatactaaataaatagagtttaatgcc

SEQ ID NO: 123622 - DNA, 1090 bp, Homo sapiens
  misc_feature (1)...(1090): n = a,t,c or g
gaggaggcatcgtccccggggctgggctgcagcaagccgcacctggagaagctgaccctgggcatcacgcgcatcctagaatcttccccaggtgtgactgaagtgaccatcatagaaaagcctcctgctgaacgtcatatgatttcttcctgggaacaaaagaataactgtgtgatgcctgaagatgtgaagaacttttacctgatgaccaatggcttccacatgacatggagtgtgaagctggatgagcacatcattccactgggaagcatggcaattaacagcatctcaaaactgactcagctcacccagtcttccatgtattcacttcctaatgcacccactctggcagacctggaggacgatacacatgaagccagtgatgatcagccagagaagcctcactttgactctcgcagtgtgatatttgagctggattcatgcaatggcagtgggaaagtttgccttgtctacaaaagtgggaaaccagcattagcagaagacactgagatctggttcctgggacagagctgttatactggcattttctcacagacacctttactgcctattaccggtctgctcatcaccccacctgggcnctgccccagtgggcaatattgcctttcaccagctatggcattagcccacaggccaaggattcccaggtgataagggtgaagagcagtagtgaagaccagccagagggtgacatggtgaaaacatataccaccaccacaagaactgaaatgctgctttttaaagcattattgtaaggtggatttagctgttaaacagataacttataatatcaaaatggataagaagaaaatgtgttcactgggaaactggctgttgagcccctccaatgggagctgaggagctgtgtctctgcaggcatgggggactggccacaagcaaagagtcagcagcatggaagccccgggagctgttagcgtgttgcagcaggcgcccaatccaacagcctggggaacaacagtgtcgcaatcattcctcagttatggcaagaatgtgctatttttcactgttaggtgttgcttctgagaactacaaataaaactctccaacc

SEQ ID NO: 123623 - DNA, 3398 bp, Homo sapiens
  misc_feature (1)...(3398): n = a,t,c or g
atgcccaagccttccctggaagcaggttcctgccccaggctggagttcccagtagaagatgcacaacctgtaatcaaaggagaggaatttactcctccacccccaaattcctacctggcacttggggacatttccacggaggagtgggatttggaagttgcccaggaatatcaggaaaggatgcctccacagagagctgccctgatctgcgtgttctcatggaatctgggcaggtcccttccagcccctgccatgcgtagaccctgccagaatttctgtgttgctttgagcacttttgccggggatcctgaacccgaatcagaggcagaaccggaagcagaggcaggggcggggcaggttgctgatgaagctggccaggacatagcctctgcccacgagggtgcagagactgaagtggagcaggcactagagcaagagccggaagaaagagcctccctcagtgaaaaagagaggcagaacgagggggtgaacgagagggacaactgctctgcctccagcgtctcgtcctccagcagcacgttggagagggaggagaaggaggacaagctctccagggacaggacaactggtttgtggcccgcaggtgtccaggatgcaggtgtaaatggacagtgtggcgacatcctcaccaacaaacggttcatgcttgacatgctgtatgcccataacaggaagtctccggatgatgaggagaagggggatggggaggctgggaggacccagcaggaggcagaggcggtagcgagccttgctaccaggatatccaccctgcaggccaactctcagacccaggatgagagtgtcaggagggtggatgtcggctgtttggacaatcggggcagtgtgaaagcatttgctgagaaattcaacagtggggacctggggagagtgttcaacgctcctcagggcttagggtggtcccaggtacccaggggtcagcccacattcactaagaaaaagaagaccatccgcttgttctggaatagaaattcggccttttgactggccatgtaaaaacaaccgacgctgcagagaattcctgtggtcaaaactggaacccattaaggtggacacttccagactggagcacctgtttgagtctaaatccaaggaactgtctgtctcaaaggcctctaagctggttcgtcccctattcatcctcaccagtgcatgccctttcctttcttttccttggaaggctcctcttcattcatctaccaggcagctgcacagaggcctaagtgcacaggaaaggtggaggtgctctggtataaggggcatggaatgtttgaatggcaagggcccactcgaatccaggaatccagcctatcgaaagagtgagggcacacggcagaccggagcaggggacatgaaggatggtgtctggcagggagtacccgcaacccctgacaccccacagggcatgtgtacagtgtgcactgttagctttgccatcatggatggcttaaatgttaactcagttggccctctgccttttcatgaagtcgcagaaccactcctggacctgaaggaaggaatagaccagttggattacactcttgggtttttctttctggtgtctatgctttccggcggtgggctcttaggaggtagcgctagtgccaaagcgtttgagttaagctacctcgagaaggttccagaagtcaaagacacagtgcacaagcagtcgcttctccaccatgtgtgcaccatggtggtagaaaacttcccagacagctccgatctgtactcggagatcggggccatcaccagattccactcctttttactctttatgggccatccaccttatgcaattcgggaagtgaacataaacaaattctgcaggattattagtgaatttgcactagagtatcgcacaaccagggaaagggttttgcagcagaaacagaaacgggccaaccacagagagagaaataagaccagagggaagatgatcaccgantgtgttcggcattgtgtacgtatgttctccggcagttctccggcgcccccaagccagccgcagggtctgagctatgcggaggacgcggctgagcacgagaacatgaaggctgtgctgataacctacgcgcccctccgaggaggacgccacccccgcgctgggcgtccgcacacgcagccgagcaagccgaggatccactagttcctgggactatgggaactgatgactcgcccaatgtcacagatgatgcagctgatgagatcatgggaccgcatcgtcaagttcagccacccaagtgcccagttcagcgagtggtgccgagggagaggaagcgagcccgggccaaccggaaatctttgcgaagaaccctgaagagcggcctgaccccagaagaagccagagccctgggcttggttggcacctcggagttgcagctgtgacactcataggttactcccaggagtgtgctgagcagaaggcaagctcttgctggatgaaacccctccaggtggggttggggagacttgatattccacatcccaaccagtttgaaaaaaggggagagctcaattccccaggcgtcaccccccatggcttggtggttggccccgacgcattgacttgggatccccccaggagtccccctgcacataccctcctcccatccgtgtcagctgtgtttcctcttgattcccgtgacacccggtttattagttcaaaagtgtgacaccaattctgggcagaggaacagcccctttaaggagcaaatcacttctgtcacagttattatggtaatatgaggcaatctgattagcttcacagactgagtctccacaacaccaaaatatccagatgtaaaccccaaacttgtacacaaaagaaagcacagtattgtttacctgttgtggtattttagtatgtaacaaatgtttatacaaatacatacatgtgacaccatgttttcaaatactaaataaataagagtttaatgccataatgagaaacttttattcttctgggaacaggaccttaaacagttccacaggctcgcctcttcagaatggcaaaactcttctcagtgtcctcagaagcaccctcgcttggaacggccttcagatcctttgggcgagacagggagcttgttgaagcagacatttgtcaaatagtacatgatggatgtgaacaccccaggagagcctggaacttgcgagagttgggtctgtacattatagacggttgtgtttaatcaccttggcctgtgggctaatgccatagctcggtgaaggcatattgccactggggcaggcccaggtgggtgatgagcaggcggtaataggcagtaaaggtgtctgtgagaaaatgccagtataacgctctgtccaggaaccagatctcagtgtcttctgctaat

SEQ ID NO: 123624 - DNA, 469 bp, Homo sapiens
  misc_feature (1)...(469): n = a,t,c or g
acgggtcagaatgtcgcatngcgcgnacnttnggggtagggcagcgncgcctcggtctaaggacgnccgcggagtcggtggtccctgtgcgattgccacctcggtgttgtgctgcctgcggggctgcagagacggggggactggccacatccctctgaaggagatgccggccgtgcagctggacacgcagcacatgggaacagatgttgttattgtaaagaatggaagaagaatatgtggaacaggaggttgtttagccagcgcacctttacatcaaaacaaaagctattttgaattcaaaaacccgtccacaggaatctgggggattggtggtgcaactcaaaaggtaacttgaatcagattcctcttggccgagatatgcacagtctggggatgaaaaatgaaggagccctttaccacaacaatgaagagaaaaataggctggcagcaaacaggctttcgcaggaac

SEQ ID NO: 123625 - DNA, 489 bp, Homo sapiens
  misc_feature (1)...(489): n = a,t,c or g
acgaggaacttcgtagagancntccncacnnccnngggcannnnnacctcggtctagggacggcggcggagtcggtggtccctgctttaggccacctttttgttgtgctgcctgcggtgctgcagagacggggggactggccacatccctctgaaggagatgccggccgtgcagctggacacgcagcacatgggaacagatgttgttattgtaaagaatggaagaagaatatgtggaacaggaggttgtttagccagcgcacctttacatcaaaacaaaagctattttgaattcaaaatccagtccacaggaatctggggtattggtgttgcaacctagaaagttaacttgaatcagattcctctttggcgagatatgcacagcctggtgatgagaaatgatggagccctttaccacaacaatgaagagaaaaataggctgccagcatacaatctttcccaggaaggagatgtggtgggtattacttat

SEQ ID NO: 123626 - DNA, 411 bp, Homo sapiens
tcaacatcgcttcctctttgaatactcatcccacatggtcaccttctctatgaagctttcccagcgtggtactgtggaaggatcttcagaacctgaaaattcaggtcccagggctgatccttttgggagtgggactgatttcagtccctgggggtaggatctaattgctaagaactggaagcaggaaaccgatttcacaggtttgcccctgagcgcccctggtttgaacagtctccatacattcagtccctgtcctgacatctgatcaccaatatccatgatccctttaacactgacatctggtggccctttcatttctttttcttgccttatatggcactggctagaacttccagcattatacttccgcagttccactgtcacttcatttctatgtcttcgcattgtcat

SEQ ID NO: 123627 - DNA, 379 bp, Homo sapiens
gaacgaggggctacctgggggtcactatcaacccttgaacttgagccatgtgtgcggatatgtgtatcctacagcaccccatgtacctcatgtcactgacactcaatgcaagcaccccacaacacacaggctttgcacctaatgtcaggcaatccttcaggagtggcagggcctatctcccttgaaggcttttgaaaccatgcctctacaatgtcagtcagcccttttaatcaatatcctctcctgcttcctattaacttgatgacatcatgatctccctggttgatcttaagctctgctggtcaaataacggacattccttgtgtaaagaggagagcctctcaccaatcctccctaccagtgatggtgtgtgaaaggt

SEQ ID NO: 123628 - DNA, 743 bp, Homo sapiens
agctgaccggcggggggcagtgtatcctcgatctagggacgggggcggagtccgtgggccctgcgcgatggccacctcggtgttgtgctgcctgcggagctgcaaagacagggggactggccacatccctctgaaggatatgctgtccgtgcatatggacacgcagcacatgggaacagatgttgttattgtaaagaatggaagaaaaatatttggaacaggaggttgtttagccagcgcacctttacatcaaaacaaaagctattttgaattcaaaatccagtccacaggaatttggggtattggtgttgcaactcagaaggttaacttgaatcaaattcctcttggccgagatatgcacagtctggtgatgaaaaatgatggagccctttaccacaacaatgaagagaaaaataggctgccagcaaacagtcttccgcaggaaggagatgtgttgatgacagtgcaattttggattgccagttcagtgagttttatcatacgcctccacctggttttgaaaaaatattatttgaacagcaaatcttctgaatgtatttgtttttaaaacttgtatttctgcactgttaaaaaatgttcatcatttaataaaactttacctggcctatagatgaaaatatattcttaaaaatatgcttgttgatgctgtctaaggaaccaatgtattcagtataccaccctgaagttgtgatttaaaatactttatgttttgtgaaatgaaa

SEQ ID NO: 123629 - DNA, 1475 bp, Homo sapiens
ctgagcggcggggggcagtgtcgcctcggtctaggcacggcggcggagtcggtggtccctgcgcgatggccacctcggtgttgtgctgcctgcggtgctgcagagacggggggactggccacatccctctgaaggagatgccggccgtgcagctggacacgcagcacatgggaacagatgttgttattgtaaagaatggaagaagaatatgtggaacaggaggttgtttagccagcgcacctttacatcaaaacaaaagctattttgaattcaaaatccagtccacaggaatctggggtattggtgttgcaactcagaaggttaacttgaatcagattcctcttggccgagatatgcacagtctggtgatgagaaatgatggagccctttaccacaacaatgaagagaaaaataggctgccagcaaacagtcttccgcaggaaggagatgtggtgggtattacttatgaccatgtcgaattaaatgtatacttgaatggaaaaaacatgcattgtccagcatcaggtatacgagggacagtgtatccagttgtttatgttgatgacagtgcaattttggattgccagttcagtgagttttatcatacgcctccacctggttttgaaaaaatattatttgaacagcaaatcttctgaatgtatttgtttttaaaacttgtatttctgcactgttaaaaaatgttcatcatttaataaaactttacctggcctatagatgaaaatatattcttaaaaatatgcttgttgatgccgtctaaggaaccaatgtattcagtataccaccctgaagttgtgatttaaaatactttatgttttgtgaaatgaaaataagcatttgggcagtttatttaattcttatttaaataaatagaattatgggtttaattaacagtataacatgactatatatacatatatatttaaagggaattctttcttacataatatatttgttttgatagagatgtagagttgggtgggtgtttttgtcactctgaagtttagacctcattaaatatttgacatctacagttggataattttgccgcttagtgtccttttttatatacaatataacaaagtgagagaaatttatattactggcaatttcatttttggcagtctatttctgtatcatgtaccgcttttcttaaaacttaaattgcttattttgttgtgtaatgtcattgcttttgatttgctttgtgaaaggagataaacgtttcagtaattgtcagagcattttgttgcctcaggctgtgttacctcaatttcagagtaagtagtggttgattagtaatgtagtatacactggcagacatctagaatagtatgatgctttacatttaaatgaggttattcttttaaggacttttatttgtatgttttctgtaaggaataataaaataattgtaattaaggaatataccatactatattaaacacattcttcct

SEQ ID NO: 123630 - DNA, 1561 bp, Homo sapiens
atggtcaccttctctatgaagctttcccagcgtggtactgtggaaggatcttcagaacctgaaaattcaggtcccagggctgatcctatcagatcaagcccagggatccagcctttggccccatctgtagagtcacagcagctctgctgctgctcatccgctggggctactgccaattgctgctcagtcccttgctgtcttcatagagccttggtcacaagcttcttctcgaggacaactacagggtctgccccaggaatctggggtattggtgttgcaactcagaaggttaacttgaatcagattcctcttggccgagatatgcacagtctggtgatgagaaatgatggagccctttaccacaacaatgaagagaaaaataggctgccagcaaacagtcttccgcaggaaggagatgtggtgctctgctggtcaaataacggacattccttgtgtaaagaggagagcctctcaccaatcctccctaccagtgatggagaagaaaggagaagaaaaaggaagaagaggaagaggaagaagaggaagcagaagcagcagcagcagcaagaagcagcagcaccagcagaagcagatgcagaagcaacagcagcagaagcagcagttgaagaagcagcagcaagaaaggaggaggaggaggaaggggaggagggggaggggaatggggaggaggaggaggagaaggcagcggcggcagcaagaggggactggtcccagcaggagaaggcatgtaaatcgtcccttcaagcaatattatttggacatgctaagctggaaccagggagactgcccaggcccacacagtgcagagtagaagctacggtgctggtagggacaaattctccacttgataaccctctatggagcatttcctggagcttatggcaaaagcctgtgggcacctcccagcaacaaccactgggactttggactagagaatttccacttgaagggcatttactgactcgcaatgaaacatttactgaagccaccccactgatacctgaaataggcatgctgtctcagatgatgtcagaggaacatatctaatggggatgggcagtgcccagaagagttccatgacacaatggaaatggtttatagaggatcatgctactcaaggcatgcagagaatttcttttcccctaggactgactctggaactgtgtgagaaactgctggattctacagtgccaaataaacaactttcaactgaccaaacaagagcttcttggtttatggatggcaattccaaggcacaaaatgctaggaagaactgttctgtttctcagtaagagagacagaaactggctatgggaaagatttcctggtgggaaggccctgaacatagctggcaagtgagactgatgctggcagccctgggggactacaaatggaataggaattcttgataggaatagacactgactctagtgcaggctttgcttatccaatggaagatgaaagtgttcagagtgccataaaaaaaaaattaaaaaaaataaacaacagaagatatttcaaggaaaaaaaaaaaaaaaaa

SEQ ID NO: 123631 - DNA, 2365 bp, Homo sapiens
gagcttcagagagacatagagaagcacagtacaggtgttgcatctgtcctcaacctgtgtgaagtcctgctgcacgactgtgacgcctgtgccactgatgccgagtgtgactctatacagcaggctacgagaaacctggaccggcggtggagaaacatttgtgctatgtccatggaaaggaggctgaaaatcgaagagacgtggcgattgtggcagaaatttctggatgactattcacgttttgaagattggctgaagtcttcagaaaggacagctgcttttcccagctcttctggggtgatctatacagttgccaaggaagaactaaagaaatttgaggctttccagcgacaggtccacgagtgcctgacgcagctggaactgatcaacaagcagtaccgccgcctggccagggagaaccgcactgattcagcatgtagcctcaaacagatggttcacgaaggcaaccagagatgggacaacctgcaaaagcgtgtcacctccatcttgcgcagactcaagcattttattggccagcgtgaggagtttgagactgcgcgggacagcattctggtctggctcacagagatggatctgcagctcactaatattgaacatttttctgagtgtgatgttcaagctaaaataaagcaactcaaggccttccagcaggaaatttcactgaaccacaataagattgagcagataattgcccaaggagaacagctgatagaaaagagtgagcccttggatgcagcgatcatcgaggaggaactagatgagctccgacggtactgccaggaggtcttcgggcgtgtggaaagataccataagaaactgatccgcctgcctctcccagacgatgagcacgacctctcagacagggagctggagctggaagactctgcagctctgtcggacctgcactggcacgaccgctctgcagacagcctgctttctccacagccttcctccaatctctccctcttcgcttcgcttcagcccctccggagcgagcggttcaggacgagacaccccgggttagtgtggactccatccccctgggagtgggatcacgactatgacctcagtcgggacctggagtctgcaatgtccagagctctgccctctgaggatgaagaaggtcaggatgacaaagatttctacctccggggagctgttggcttatcagatgtaatgatccccgaaagccctgaggcctatgtaaaactcacagaaaatgcaatcaaaaatacctccggggaccacagtgccctagagtcacagatccgacaactgggcaaagccctggatgatagccgttttcagatacagcaaaccgaaaatatcattcgcagcaaaactcccacggggccggagctagacaccagctacaaaggctacatgaaactgctgggcgaatgcagtagcagtatagactccgtgaagagactggagcacaaactgaaggaggaagaggagagccttcctggctttgttaacctgcatagtaccgaaacccaaacggctggtgtgattgaccgatgggagcttctccaggcccaggcattgagcaaggagttgaggatgaagcagaacctccagaagtggcagcagtttaactcagacttgaacagcatctgggcctggctgggggacacggaggaggagttggaacagctccagcgtctggaactcagcactgacatccagaccatcgagctccagatcaaaaagctcaaggagcttccagaaagctgttgggaccaccgccaaagccatcatcctctccatcaatctctgcagccctgagttcacccaggctgacagcaaggagagccgggacctgcaggatcgcttgtcgcagatgaatgggcgctgggaccgagtgtgctctctgctggaggagtggcggggcctgctgcaggatgccctgatgcagtgccagggtttccatgaaatgagccatggtttgcttcttatgctggagaacattgacagaaggaaaaatgaaattgtccctattgattctaaccttgatgcagagatacttcaggaccatcacaaacagcttatgcaaataaagcatgagctgttggaatcccaactcagagtagcctctttgcaagacatgtcttgccaactactggtgaatgctgaaggaacagactgtttagaagccaaagaaaaagtccatgttattggaaatcggctcaaacttctcttgaaggaggtcagtcgtcatatcaaggaactggagaagttattagacgtgtcaagtagtcagcaggtaagcaataaacagacatcatcgtgtagcatttcttactggagaccaaagaagcatcatcttcatgcattttag

SEQ ID NO: 123632 - DNA, 4060 bp, Homo sapiens
agaaaatgcagttgggagctggacagatgacttgacccagttgagcctgctgaaggacaccctctctgcctatatcagtgctgatgatatctccattcttaatgaacgcgtagagcttctgcaaaggcagtgggaagaactatgccaccagctctccttaaggcggcagcaaataggtgaaagattgaatgaatgggcagtcttcagtgaaaagaacaaggaactctgtgagtggttgactcaaatggaaagcaaagtttctcagaatggagacattctcattgaagaaatgatagagaagctcaagaaggattatcaagaggaaattgctattgctcaagagaacaaaatacagctccaacaaatgggagaacgacttgctaaagccagccatgaaagcaaagcatctgagattgaatacaagctgggaaaggtcaacgaccggtggcagcatctcctggacctcattgcagccagggtgaagaagctgaaggagaccctggtagccgtgcagcagcttgataagaacatgagcagcctgaggacctggctcgctcacatcgagtcagagctggccaagccaatagtctacgattcctgtaactcggaagaaatacagagaaagcttaatgagcagcaggagcttcagagagacatagagaagcacagtacaggtgttgcatctgtcctcaacctgtgtgaagtcctgctgcacgactgtgacgcctgtgccactgatgccgagtgtgactctatacagcaggctacgagaaacctggaccggcggtggagaaacatttgtgctatgtccatggaaaggaggctgaaaatcgaagagacgtggcgattgtggcagaaatttctggatgactattcacgactttgaagattggctgaagtcttcagaaaggacagctgcttttcccagctcttctggggtgatctatacagttgccaaggaagaactaaagaaatttgaggctttccagcgacaggtccacgagtgcctgacgcagctggaactgatcaacaagcagtaccgccgcctggccagggagaaccgcactgattcagcatgtagcctcaaacagatggttcacgaaggcaaccagagatgggacaacctgcaaaagcgtgtcacctccatcttgcgcagactcaagcattttattggccagcgtgaggagtttgagactgcgcgggacagcattctggtctggctcacagagatggatctgcagctcactaatattgaacatttttctgagtgtgatgttcaagctaaaataaagcaactcaaggccttccagcaggaaatttcactgaaccacaataagattgagcagataattgcccaaggagaacagctgatagaaaagagtgagcccttggatgcagcgatcatcgaggaggaactagatgagctccgacggtactgccaggaggtcttcgggcgtgtggaaagataccataagaaactgatccgcctgcctctcccagacgatgagcacgacctctcagacagggagctggagctggaagactctgcagctctgtcggacctgcactggcacgaccgctctgcagacagcctgctttctccacagccttcctccaatctctccctctcgctcgctcagcccctccggagcgagcggtcaggacgagacaccccagctagtgtggactccatccccctggagtgggatcacgactatgacctcagtcgggacctggagtctgcaatgtccagagctctgccctctgaggatgaagaaggtcaggatgacaaagatttctacctccggggagctgttgccttatcaggggaccacagtgccctagagtcacagatccgacaactgggcaaagccctggatgatagccgctttcagatacagcaaaccgaaaatatcattcgcagcaaaactcccacggggccggagctagacaccagctacaaaggctacatgaaactgctgggcgaatgcagtagcagtatagactccgtgaagagactggagcacaaactgaaggaggaagaggagagccttcctggctttgttaacctgcatagtaccgaaacccaaacggctggtgtgattgaccgatgggagcttctccaggcccaggcattgagcaaggagttgaggatgaagcagaacctccagaagtggcagcagtttaactcagacttgaacagcatctgggcctggctgggggacacggaggaggagttggaacagctccagcgtctggaactcagcactgacatccagaccatcgagctccagatcaaaaagctcaaggagctccagaaagctgtggaccaccgcaaagccatcatcctctccatcaatctctgcagccctgagttcacccaggctgacagcaaggagagccgggacctgcaggatcgcttgtcgcagatgaatgggcgctgggaccgagtgtgctctctgctggaggagtggcggggcctgctgcaggatgccctgatgcagtgccagggtttccatgaaatgagccatggtttgcttcttatgctggagaacattgacagaaggaaaaatgaaattgtccctattgattctaaccttgatgcagagatacttcaggaccatcacaaacagcttatgcaaataaagcatgagctgttggaatcccaactcagagtagcctctttgcaagacatgtcttgccaactactggtgaatgctgaaggaacagactgtttagaagccaaagaaaaagtccatgttattggaaatcggctcaaacttctcttgaaggaggtcagtcgtcatatcaaggaactgggagaagttattaggacgtgtcaagtagtcagccaggatttgtcttcctgggtcttctgctgatgaactggacacctcagggtctgtgagtcccacatcaggaaggagcaccccaaacagacagaaaacgccacgaggcaagtgtagtctctcacagcctggaccctctgtcagcagtccacatagcaggtccacaaaaggtggctccgattcctccctttctgagccagggccaggtcggtccggccgcggcttcatgttcagagtcctccgagcagctcttccccttcagcttctcctgctcctcctcatcgggcttgccatgccttgtaccaatgtcagaggaagactacagctgtgccctctccaacaactttgcccggtcattccaccccatgctcagatacacgaatggccctcctccactctgaactaagcagatgccatcagcagaagagctggatagcataaggaggatcgggtcataagcaatcctaaactactaacaagaggaccttgatcttggcgaaagccctcgggtgtggcagctttagccctcctccagatcacatgtgacgcaaataatggcttcacaggtggaagataaacagtgacaggggagcaaccagacaacatgaaggtatggaagaaatctgggttgagactcctgaacccttaagcactaaaggagatttgagtaaaggaccctcccaaaagtttcccccgggactccatggaatttccgggcccttggccccattcctgtgcacagcccaaggactttcagtagacccatcctgggcagctttccccatggtgctgcctccaacccatcagattaaatgaccctccccaagcgacccatgtccagtgtcgtacaatctaccgaaccaaccagtgctgaagagattttagaaccttgtaacatacaattttttaagagcttatatgggcagcttcctttttaccttgttttccctttggggcatgatgttttaaccttttgctttagaagcacaagctggtaaatctaaaaggcacttttttttaagaggtataaagaaaaactaagatgtaataaataaggttcatgggaaggcttttatgtgaaaaaagttgaatgttatagtaaaaaaaaaaagatatttatgtatgtgccgtttggttaagccaaaagtttgtttggattgatttctttgcatttaattatagatattataaaataaaaaaaaaaaaaaaaa

SEQ ID NO: 123633 - DNA, 1326 bp, Homo sapiens
atgctcaacatcactaatgatcagggaaatgcaaatcaaaaccacagtgcgataccaccttacttctgcaagaatggccataataaaaaaatcaaaaaaatagtagatgttggcatggatgtggtgaacacggaacacttctacactgctgtaacctatggaaagaaagaaatgtctcatatgtttctgcctaaattggtctttaatactttagcgattctcttgagtttggattataaaatagtttttggtctttttgtattttctgctgtaagcctgtatgattatgtaatgaagaattccgcgaggcggaggccgcacgagaaaaaaaaactcagaaaacccaacgacaggatcggagcacgaaagaacgagaagaagagcgagcaggggagagcgcgcggagtcagagaagagcaaaagcgaagacaaaagagaaaagagaaccagcccgaagaagaaaacggggcgggaacgcgaaagaaccgaggacgaaggtcgaggagggcctgcacaactacaaggcggcagagcgagggaaggcggacaaaagcacacagagcgccggcgccgccggcccatagaaacggaacggcggcgaggcgcaggaaaaacaagaggctaggggaggaccgagggcagaccgggcaagggacgcgagcgtgggggaaggctgaccaaggatgcaaacaaaggaaggagggggcaagaaggcagagaggaacgaaaagcggccagaaggacaggacaggtgcgaacaacagggacgaaaggcggggggagcgggagacgcagaaatcgagagcagtgagagataggaaaagaaacaaacggagccggcgagcgcagcgcgggtcaggagcagagcgaggctgcagcgggagcgaaccgggggccacgagacacaggacagaggaacaaacaccgaagcgggaagaccgacgacggacagagagcgaggaaacgaggagggaatcgggagacgggaagggcgggacggaaacgcgaacggcaaggaggcagatacggaaggaggagccgccggaggggagacaagaagccagagaagaaagagaagaaaagaaaacgggagagaggaagggagaggagaggagagaaaagaagaggacaagaagaagagaaagaagaacgaaaaaagagaaagaagaaacagagggcaaaggcacccataaccatgcataccacacgacaggcccccctcaccttgcctcctcccctctcactcttatgccagcccctgccattccccaccccctgtgtagactgcaagactcaacaagtgacttgctgagcaaaccctgctga

SEQ ID NO: 123634 - DNA, 571 bp, Homo sapiens
cggacgcgtgggtgcaaaaagggcacggggcagagggactatgttgtgagcctgcgaaagaagtttgtgtggggactgtgggcagtgaatgcgttgggaacaatatggaaaactgggagctgccttggaatctacagggccgggctgaagaaaagaagaatggtattcatgcagttcccattttacagatgaaaacaagaggactttttctgtgaagtcaagaaagtggttacaatggtactttcagcctgtccgaattatgtgttgcccctcccctttttattaataacattgaagtgtgatgggacaaccactgaagccgtctgttgaaacctgctgggactttttagccattctcttcaacataaagaatgggtgttttttgagggggtgagaggaatgtggaaatgttgtcaaagagtacaatgttttagttgagacaggaggaatatattttgttgagatctacagcacagcatggtgactgtagttaacaatgaagtattgtgtatttcaaaattgctaagacaataaatttcaaatgttctcaccacaaaaaaaaaaaaaaaaa

SEQ ID NO: 123635 - DNA, 1141 bp, Homo sapiens
  misc_feature (1)...(1141): n = a,t,c or g
atgaatagccatttcttaaaagaagatatccaaatggccaataaacatatggaaaaatgctcacacattactaatgatcagggaaatgcaaatcaaacccacagtgcgataccaccttacttctgcaagaatgcccataataaaaaaatcaaaaaaatagtagatgttggcatggatgtggtgaacacggaacacttctacactgctgattatcctggttcctatattgttcgtcccagttctagtatcagacatttcttcaaagagcctgattcctttcagaatggtaggaaaacttacatctggctgctgaatgagcacattgtatcttctccctcattggcaatgctaggaagtatatcgcatggtctagctgtccgccagcctcgggtcctccttgcagccctcgccctggttttgtccgccttccctgcctcctcttctgggggagttagattgagttgtaacaagaacatgccactgtctcactggctgcagcgtgtggtccccttaccagaggtaaggaagagatggatctccactcatgttgtagacagaatgtttatgtcctctccaaattcttatgttgaaaccctaacccctaatgtgatggtatgtggagatgggcctttggtagtgaggatgcgaagagaaggtggctgtctgcaaaccaggaagagagccctcaccagaaaccggcagagctaagacttaggggactggcagactattgcaaaaagggcacggggcagagggactatgttgtgagcctgcgaaagaagtttgtgtggggactgtgggcagtgaacgcgttgggaacaatatggaaaactgggagccgccttggaatctacagggccggagagaccgnnnnnnnnnnnnnnnnnnnnnnnnnnnnnnnnnnnnnnnnnnnnnnnnnnnnnnnnnnnnnnnnnnnnnnnnnnnnnnnnnnnnnnnnnnnnnnnnnnnnnnnnnnnnnnnnacctaaaatattgaatgctgttaataaatctcctgaggccagcataagaaggtgatgggcaaaactaatgcagtaggagctgaaatcgaccagggggttcttatccaacagacagcagcaaaactctttgtgtatctgcgttcctttcaacaagtgtga

SEQ ID NO: 123636 - DNA, 289 bp, Homo sapiens; identical to SEQ ID NO: 123455
  misc_feature (1)...(289): n = a,t,c or g

SEQ ID NO: 123637 - DNA, 484 bp, Homo sapiens
agatgaacgagctgcagcggcgcctcggaccccggggcctggtggtgctcggcttcccgtgcaaccagtttgggcatcaggagaacgccaagaacgaagagattctgaattccctcaagtacgtccggcctggtggtgggttcgagcccaacttcatgctcttcgagaagtgcgaggtgaacggtgcccctacgcaggtacagccgccgcttccagaccattgacatcgagcctgacatcgaagccctgctgtctcaagggcccagctgtgcctagggcgcccctcctaccccggctgcttggcagttgcagtgctgctgtctcgggggggttttcatctatgagggtgtttcctctaaacctacgagggaggaacacctgatcttacagaaaataccacctcgagatgggtgctggtcctgttgatcccagtctctgccagaccaaggcgagtttccccactaataaagtgccgggtgtcagc

SEQ ID NO: 123638 - DNA, 552 bp, Homo sapiens
atgtgtgctgctcggctagcggcggcggcggcggcggcccagtcggtgtatgccttctcggcgcgcccgctggccggcggggagcctgtgagcctgggctccctgcggggcaagatgaacgagctgcagcggcgcctcggaccccggggcctggtggtgctcggcttcccgtgcaaccagtttgggcatcaggagaacgccaagaacgaagagattctgaattccctcaagtacgtccggcctggtggtgggttcgagcccaacttcatgctcttcgagaagtgcgaggtgaacggtgcgggggcgcaccctctcttcgccttcctgcgggaggccctgccagctcccagcgacgacgccaccgcgcttatgaccgaccccaagctcatcacctggtctccggtgtgtcgcaacgatgttgcctggaactttgagaagttcctggtgggccctgacggtgtgcccctacgcaggtacagccgccgcttccagaccattgacatcgagcctgacatcgaagccctgctgtctcaagggcccagctgtgcctag

SEQ ID NO: 123639 - DNA, 1195 bp, Homo sapiens
  misc_feature (1)...(1195): n = a,t,c or g
acggagccctcgaggggcccagccttggaagggtaactggaccgctgccgcctggttgcctgggccagaccagacatgcctgctgctccttccggcttaggaggagcacgcgtcccgctcgcgcgcactctccagccttttcctggctgaggaggggccgagcctccggtagggcgggggccggatgaggcgggacctcaggcccggaaaactgcctgtgccacgtgacccgccgccggccagttaaaaggaggcgcctgctggcctccccttacagtgcttgttcggggcgctccgctggcttcttggacaattgcgccatagtgtgctgctcggctagcggcggcgacggcggcggcccagntcggtgtatgccttctcggcgcgcccgctggccggcggggaagcctgttgagcctgggctccctgcgggggcaagggtcctacttatcgaaaaatgtggcggtcccttctgaggccaccacggtccgggaactacacccataatgaacgagcttgcagcggccgccttcggacccggggggctgggtggtgctcggcttccccgtgcaaccagtttgggcatcaggagaaccgccaagaacgaaagagattctgaattccctcaaagtacgctccggccctggtggtgggttcgaagcccaacttcatggctcttcgagaaagtgcgaggttgaacggttgcgggggcgcaccctctcttcgcctttctgcgaggaggccctgccagctcccaagcgacgacggcccccgcgctttatgaccgacccccaagcttattcacctggttctccggtgtgttcgcaacgatagttgcctggaacttctttgagaagttcctgggtgggccctgacggtgtgcccctacgcaggtacagccgccgctttccagaccattgacatcgagcctgacatcgaagccctgctgtctcaagggcccagctgtgcctagggcgcccctcctacccccggctgctttgcagtttcaagtgctgctgtctcgggggggttttcatctatgaggatgatacctactaaacctacgagggaggaacaccttgatcttacagaaaataccaacctcgagatgggtgctggtcctgttgatcccagtctctgccaggaccaaggcgaggtttccccactaataaagtgccgggtgtcagcagaaaaa

SEQ ID NO: 123640 - DNA, 480 bp, Homo sapiens
tatcttaaatggcagcaattgaagtttatgcatactccacatcagttccttcttctcagcagtccaccagccaaagaatccaattttagagctgctaaaaaactctttggaagcacctttgcatttcagtgagtaaggcttaatgttaatgggggtgtgctcccattaacattttccagaaatgtatggggaagatatcactgtctttcagtaaatgatcattcagtagatggtcattcaacagatggtcatgtagtcaactacataatacttgatttggcaatccagaaccttcagaaggcaccatgacttattatgttttgaccactttgaagataattaattttctggttttgctttttcctttccgtctgtttttttagtggctcacacattgaaaactggcactccatcctgaggaatggtctggttgttgcttctaatacacgattgcagggagattttctgaatgctttcaca

SEQ ID NO: 123641 - DNA, 737 bp, Homo sapiens; identical to SEQ ID NO: 123512

SEQ ID NO: 123642 - DNA, 1055 bp, Homo sapiens
atcaagcaatagatcacatattgtgaaactgccagttaacaggcgattgaagtttatgcatactccacatcagttccttcttctcagcagtccaccagccaaagaatccaattttagagctgctaaaaaactctttggaagcacctttgcatttcatggctcacacattgaaaactggcactccatcctgaggaatggtctggttgttgcttctaatacacgattgcagctccatggtgcaatgtatggaagtggaatctatcttagtccaatgtcaagcatatcatttggttactcagggatgaacaagaaacagaaggtgtcagccaaggacgagccagcttcaagcagtaaaagcagcaatacatcacagtcacagaaaaaaggacagcaatcccaattcctgcaaagccgtaacttaaaatgccatagccttatgtgaagtgatcacctcatctgacctgcacaaaccatggggagatatggggttgtcccccaatactgaccatgtctgcacacgattctttttcgtctatgaagacggccaagtgggagatgcaaatattaatacacaagaaggaggcattcacaaagagatcctccgagtaattggtaatcaaactgctactggttaaaggaccaccatttaattaacatgattccgaaagcccttccctcgggttcaaagctggattttgaactgaagaagattataaaaattatttattggttattataaacaaaattaaccctttgaatactggattttttttcttagtatttctaagtatctcattaaatacctaaaatgggtataaggtttatccaattgtaggggttatggaatctagtaataaaatttcaacagcacttaaactgaagtttgggttgctcatacaataaacagattgaaaaaactgttttgtgctgatatttttatactaaactctttaactggatatttggtattatataccgacattttaggttaccaaaatagaattgagaacattttataatggcatctaaatctatcagatactttgcaataagat

SEQ ID NO: 123643 - DNA, 3685 bp, Homo sapiens
gcttcggggtctgcgctcgcggctgcctggactcagcaggcccctggaccatgtcccgcgccctgcggccaccgctcccgcctctctgctttttccttttgttgctggcggctgccggtgctcgggccgggggatacgagacatgccccacagtgcagccgaacatgctgaacgtgcacctgctgcctcacacacatgatgacgtgggctggctcaaaaccgtggaccagtacttttatggaatcaagaatgacatccagcacgccggtgtgcagtacatcctggactcggtcatctctgccttgctggaagatcccacccgtcgcttcatttacgtggagattgccttcttctcccgttggtggcaccagcagacaaatgccacacaggaagtcgtgcgagaccttgtgcgccaggggcgcctggagttcgccaatggtggctgggtgatgaacgatgaggcagccacccactacggtgccatcgtggaccagatgacacttgggctgcgctttctggaggacacatttggcaatgatgggcgaccccgtgtggcctggcacattgaccccttcggccactctcgggagcaggcctcgctgtttgcgcagatgggcttcgacggcttcttctttgggcgccttgattatcaagataagtgggtacggatgcagaagctggagatggagcaggtgtggcgggccagcaccagcctgaagcccccgaccgcggacctcttcactggtgtgcttcccaatggttacaacccgccaaggaatctgtgctgggatgtgctgtgtgtcgatcagccgctggtggaggaccctcgcagccccgagtacaacgccaaggagctggtcgattacttcctaaatgtggccactgcccagggccggtattaccgcaccaaccacactgtgatgaccatgggctcggacttccaatatgagaatgccaacatgtggttcaagaaccttgacaagctcatccggctggtaaatgcgcaggtcagtgaaacatgacgacttcttcccttacgcggatggcccccaccagttctggaccggttacttttccagtcggccggccctcaaacgctacgagcgcctcagctacaacttcctgcaggtgtgcaaccagctggaggcgctggtgggcctggcggccaacgtgggaccctatggctccggagacagtgcacccctcaatgaggcgatggctgtgctccagcatcacgacgccgtcagcggcacctcccgccagcacgtggccaacgactacgcgcgccagcttgcggcaggctgggggccttgcgaggttcttctgagcaacgcgctggcgcggctcagaggcttcaaagatcacttcaccttttgccaacagctaaacatcagcatctgcccgctcagccagacggcggcgcgcttccaggtcatcgtttataatcccctggggcggaaggtgaattggatggtacggctgccggtcagcgaaggcgttttcgttgtgaaggaccccaatggcaggacagtgcccagcgatgtgagcccaaacaacgaatattcccccgctgggactcctcccccagtgggcatttcctcatcgcccccatggatatcgcctgcttccatgaatacctcccactcatgcatatctcttcccccctcttgtatcttctccctctgccccttaatatcagtctccccttgggaacatatgcctcctgtgagtggtcctcccttttttttttttttttgagacggagtctcgctctgtcacccaggctggagtgcagtggcgcgatcttggctcacttcaaactccgcctgctggattataggcatgagccaccgtgcctggctggtcctccattttaataccccgcttccccaggaaaatttattgctgtttatggacatctccttcattccagaaaacgtcctcccccaaacctcttcctcccccgagaacctgcctcaagggtttcttcccctacttcctccttcactcccccgactccatggtctctccaccctcccggtgggtttttttttccacctggtgaatcttctctgcaatcatttccttggaatctgactgtccccccaccacacacacctccatttcctttccccatctcaggactcttttccttccttgagttttttgtctccatgcatgtacagctttccatgggtactcttgactcagtttccctcctcctttatccgaggtggtaatatttcccagctcagacagccaggcgcaccctccggagctgctgttctcagcctcactgcccgccctgggcttcagcacctattcagtagcccaggtgcctcgctggaagccccaggcccgcgcaccacagcccatccccagaagatcctggtcccctgctttaaccatcgaaaatgagcacatccgggcaacgtttgatcctgacacagggctgttgatggagattatgaacatgaatcagcaactcctgctgcctgttcgccagaccttcttctggtacaacgccagtataggtgacaacgaaagtgaccaggcctcaggtgcctacatcttcagacccaaccaacagaaaccgctgcctgtgagccgctgggctcagatccacctggtgaagacacccttggtgcaggaggtgcaccagaacttctcagcttggtgttcccaggtggttcgcctgtacccaggacagcggcacctggagctagagtggtcggtggggccgatacctgtgggcgacacctgggggaaggaggtcatcagccgttttgacacaccgctggagacaaagggacgcttctacacagacagcaatggccgggagatcctggagaggaggcgggattatcgacccacctggaaactgaaccagacggagcccgtggcaggaaactactatccagtcaacacccggatttacatcacggatggaaacatgcagctgactgtgctgactgaccgctcccaggggggcagcagcctgagagatggctcgctggagctcatggtgcaccgaaggctgctgaaggacgatggacgcggagtatcggagccactaatggagaacgggtcgggggcgtgggtgcgagggcgccacctggtgctgctggacacagcccaggctgcagccgccggacaccggctcctggcggagcaggaggtcctggcccctcaggtggtgctggccccgggtggcggcgccgcctacaatctcggggctcctccgcgcacgcagttctcagggctgcgcagggacctgccgccctcggtgcacctgctcacgctggccagctggggccccgaaatggtgctgctgcgcttggagcaccagtttgccgtaggagaggattccggacgtaacctgagcgcccccgttaccttgaacttgagggacctgttctccaccttcaccatcacccgcctgcaggagaccacgctggtggccaaccagctccgcgaggcagcctccaggctcaagtggacaacaaacacaggccccacaccccaccaaactccgtaccagctggacccggccaacatcacgctggaacccatggaaatccgcactttcctggcctcagttcaatggaaggaggtggatggttaggtctgctgggatgggccctccaagcccaagcctcctgctccgggggcagaccgagactct

SEQ ID NO: 123644 - DNA, 3877 bp, Homo sapiens
atgtcccgcgccctgcggccaccgctcccgcctctctgctttttccttttgttgctggcggctgccggtgctcgggccgggggatacgaggcgagatcaggcctctctgagtcactcacctctagatcaagacttactctgcagcccccgacctcgggggttattgacaaggtatgtgtgtttggggtccctgtgcagacatgccccacagtgcagccgaacatgctgaacgtgcacctgctgcctcacacacatgatgacgtgggctggctcaaaaccgtggaccagtacttttatggaatcaagaatgacatccagcacgccggtgtgcagtacatcctggactcggtcatctctgccttgctggcagatcccacccgtcgcttcatttacgtggagattgccttcttctcccgttggtggcaccagcagacaaatgccacacaggaagtcgtgcgagaccttgtgcgccaggggcgcctggagttcgccaatggtggctgggtgatgaacgatgaggcagccacccactacggtgccatcgtggaccagatgacacttgggctgcgctttctggaggacacatttggcaatgatgggcgaccccgtgtggcctggcacattgaccccttcggccactctcgggagcaggcctcgctgtttgcgcagatgggcttcgacggcttcttctttgggcgccttgattatcaagataagtgggtacggatgcagaagctggagatggagcaggtgtggcgggccagcaccagcctgaagcccccgaccgcggacctcttcactggtgtgcttcccaatggttacaacccgccaaggaatctgtgctgggatgtgctgtgtgtcgatcagccgctggtggaggaccctcgcagccccgagtacaacgccaaggagctggtcgattacttcctaaatgtggccactgcccagggccggtattaccgcaccaaccacattgtgatgaccatgggctcggacttccaatatgagaatgccaacatgtggttcaagaaccttgacaagctcatccagctggtaaatgcgcagcaggcaaaaggaagcagtgtccatgttctctactccacccccgcttgttacctctgggagctgaacaaggccaacctcacctggtcagtgaaacatgacgacttcttcccttacgcggatggcccccaccagttctggaccggttacttttccagtcggccggccctcaaacgctacgagcgcctcagctacaacttcctgcaggtgtgcaaccagctggaggcgctggtgggcctggcggccaacgtgggaccctatggctccggagacagtgcacccctcaatgaggcgatggctgtgctccagcatcacgacgccgtcagcggcacctcccgccagcacgtggccaacgactacgcgcgccagcttgcggcaggctgggggccttgcgaggttcttctgagcaacgcgctggcgcggctcagaggcttcaaagatcacttcaccttttgccaacagctaaacatcagcatctgcccgctcagccagacggcggcgcgcttccaggtcatcgtttataatcccctggggcggaaggtgaattggatggtacggctgccggtcagcgaaggcgttttcgttgtgaaggaccccaatggcaggacagtgcccagcgatgtggtaatatttcccagctcagacagccaggcgcaccctccggagctgctgttctcagcctcactgcccgccctgggcttcagcacctattcagtagcccaggtgcctcgctggaagccccaggcccgcgcaccacagcccatccccagaagatcctggtcccctgctttaaccatcgaaaatgagcacatccgggcaacgtttgatcctgacacagggctgttgatggagattatgaacatgaatcagcaactcctgctgcctgttcgccagaccttcttctggtacaacgccagtataggtgacaacgaaagtgaccaggcctcaggtgcctacatcttcagacccaaccaacagaaaccgctgcctgtgagccgctgggctcagatccacctggtgaagacacccttggtgcaggaggtgcaccagaacttctcagcttggtgttcccaggtggttcgcctgtacccaggacagcggcacctggagctagagtggtcggtggggccgatacctgtgggcgacacctgggggaaggaggtcatcagccgttttgacacaccgctggagacaaagggacgcttctacacagacagcaatggccgggagatccttgagaggaggcgggattatcgacccacctggaaactgaaccagacggagcccgtggcaggaaactactatccagtcaacacccggatttacatcacggatggaaacatgcagctgactgtgctgactgaccgctcccaggggggcagcagcctgagagatggctcgctggagctcatggtgcaccgaaggctgctgaaggacgatggacgcggagtatcggagccactaatggagaacgggtcgggggcgtgggtgcgagggcgccacctggtgctgctggacacagcccaggctgcaagccgccggacaccggctcctggcggagcaggaggtcctggcccctcaggtggtgctggccccgggtggcggcgccgcctacaatctcggggctcctccgcgcacgcagttctcagggctgcgcagggacctgccgccctcggtgcacctgctcacgctggccagctggggccccgaaatggtgctgctgcgcttggagcaccagtttgccgtaggagaggattccggacgtaacctgagcgcccccgttaccttgaacttgagggacctgttctccaccttcaccatcacccgcctgcaggagaccacgctggtggccaaccagctccgggaggcaagccttcagggttcaagtggacaacaaacacaggccccacaccccaccaaactccgtaccagctggacccggccaacatcacgctggaacccatggaaatccgcactttcctggcctcagttcaatggaaggagtgtgccactgaagattctgggtgtcgccccatgggcccgccgccccggcccgttgttacccggtattgtaagaacaagccggtacccaaagttctcgcttctgccgaaggtgtcccctgatgccaagattccgcattttttgacctggggcggaaaaaaggcaaaaagtggaatgagttttccgcttttgtggcccacatgggtggtcagatgaatatgagcagctgtcctctgaaagccctggagggctgcccgaaatttgtggccaataaggtccatgggaaaaagttgtggcaaaagatggcttcccatatcccgggtgccgcttccaccccttccacgtcatccgcatcgaacaagatgttgtcctgtgctggggctgaacaggctccaaaacaggccatgcgaaggtgcctttgggaaaggccccagggcactgtggccagggttcacattgggccaagttatcatgtccattccgcaccaaggctgcagaacaaggagcatgtgaatgaaggccctgcgcagggccaaagttcaagtttcctggccgccaagaagatccacatcttcaaagaagtgggggttcaccaagtttcaatgctgatgaattttgaagacatggtggctgaaaagcggctcatcccagatggctgtgggggtcaagttacatcccccagtcgtggcccctctggaacaagttggcgggcccctgccactccatgaagggcttcccaatgttgctgcccccctcttaatactcccccaataaaattcctacttccctggtccaaaaaaaaaaaaaaaaaaa

SEQ ID NO: 123645 - DNA, 513 bp, Homo sapiens
atggcacctggaaaggggaaggaaaagaaggaagaacaggtcatcaacctcggacctcaggtggctgaaggggagaatgtatttggtgtctgccatatctttgcatccttcaatgacacttttgtccatgtcacggatctttctggcaaacaaaccatctgccgtgtgactggtgggatgaaggtgaaggcagaccgagatgaatcctcgccatatgctgctatgttgaccacccaggatgtggcccagaggtgcaaggagctgggtatcattgccctacacatccaactccgggccacaggaggaaataggaccaagacccttggacctggggcccagtcggccctcagagcccttgcctgctcgggtatgaagatcgggaggattgaggacgtcacccccatcccctctgacagcactctcaggaagggggtcaccgtggtcgccgtctgtgaacaagattcctcaaaatattttctgttaataaattgccttcatgtaaaaaataaataa

SEQ ID NO: 123646 - DNA, 529 bp, Homo sapiens
  misc_feature (1)...(529): n = a,t,c or g
aaacaggagttgaatgagcccccgaaacagtccacgtctttcttggttttgcaggaaatcctggagtctgaaganaaaggggatcccaacaagccctcaggattcagaagtggttaaagctcctgtcactaaagtggctgcgtcgattggaaatgctcagaagttgcctatgtgtgacaaatgtggcactgttctccagcaggcctctgctgcagctttttctctcagtgttntggccctctcctctcttgaaagttctctgccaactttggttttccctctgcttgtaaaacattgagtcccctccctgccttggttaattgactcacaccagctgtgcgatgcccgcttttacaattaaaggaaaactgttgtgttcagtgtccccttgtcagcaacactgtgtcccttcgccccgccgtttttttttggtgcatttggacatcagccaaatttgaacccaatcaaatataacgtgtctgacactgattttgtttttacccaataaatgtatagcctccaaaacaaa

SEQ ID NO: 123647 - DNA, 469 bp, Homo sapiens
acctcactgtagccagatctgaacataaagtctggtctcctctggtgacgggggaagggaagcgtcatccatacaagatgaatttagcctctgaaccccaggaggtcctgcacataggaagcgcccacaaccgaagtgccatgccctttaacgcctcgcctgcctccagcactactgccagggtcatcacaaaccagtacaacaacccagctggcctctactcttcagaaaatatctccaacttcaacaatggcaagcagccttgtcatcgacaaagaatctgaagtttacaagatgcttcaggagaaacaggagttgaatgagcacccgaaacagtccacgtctttctgggttttgcaggaaatcctggagtctgaagaaaaaggggatcccaacaagccctcaggattcagaagtgttaaagctcctgtcactaaagtggctgcgtcgattggaaatgctcagaagt

SEQ ID NO: 123648 - DNA, 1600 bp, Homo sapiens
  misc_feature (1)...(1600): n = a,t,c or g
atgaccacccagcagatagacctccagggcccggggccgtggggcttccgcctcgtggggcgaaaggacttcgagcagcctctcgccatttcccgggtcactcctggaagcaaggcggctctagctaatttatgtattggagatgtaatcacagccattgatggggaaaatactagcaatatgacacacttggaagctcagaacagaatcaaaggctgcacagacaacttgactctcactgtagccagatctgaacataaaaggtctggtctcctctggtgacggaggaagggaagcgtcatccatacaagatgaatttagcctctgaaaccccaggaggtcctgcacataggaagcgcccacaaccgaagtgccatgccctttaccgcctcgcctgcctccagcactactgccagggtcatcacaaaccagtacaacaacccagctggcctctactcttctgaaaatatctccaacttcaacaattgcccttggagtcaaaagactggctgccagcgggggtggaggcgaacagcagacccttagaccatgcttcagcctccaaagcagccttgtcatcgacaaaagaatcttgaaagtttacaagatgcttcaggagaaacaggaagttgaatgaagcccccgaaacagtccacgtcttttcttgggttttgccaggaaatcctgggagtctgtaagaaaaaggggatcccaacaagccctgcaggattcagaagtgtttaaagctcctgtcacttaaagtggcttgcgtcgattgggaaatgctccaggaagtttgccttttgtgttgacaaatgttggcacttgggatttttgggtgtgttttttgaagctgcgggcaccgtcaccgccacccctgagtgtttatgtgttgcactggactgtgggcaccaaacctgaaaacagaaggggccatttcttttgtggatggatcaaaatctactgtgaagaaagcatggccccgggaagcgaagtcaacacccaccctgaggggttatgaaagtgggtcaactgtgtttcccccaagtggagcccagcaagatctggacccactgttcctcccagcaggccttctgctgaagcttttcctcctcaagtgttctgggcccctctccctctcttgaaagttctctgccttactttgggttttcccctctgcttgtaaaacattgagtcccctccctgccttggttaattgactcacacccagctgtgcgattgcccggcttttacaattaaaggaaaactgttgtgttcagtgtccaccttgtcagcaacactgtgtcccttcaccccggccggtcttctctgctgcatttggacatcaggccaaatttgaacccaattcaaatataaccgtgtctgacacttgattttgtttttactcaataaatgtatagactacaaagcnnnnnnnnnnnnnnnggggcgccctttaaaaagaacaaattttaaataccgcgggttgggaaggaaaaattttttaattggggcccaaaataaaatcctgggcgggtttttaaaacgggggggtgggaaaaacccgggggtccccaaataaatcctttggaaaaaaaca

SEQ ID NO: 123649 - DNA, 565 bp, Homo sapiens
tccactggtacgtaaggcagcctgtgcgggcgagaccagactgggccctcccctcctgcagtgatttgtttcttcttcttttttaaatcacgttttcctgccttttctaggttataggtaccagcctctggcttctacagcctcagacaatgactttgtcacaccagagccccgccgtactacccgtcggcatccaaacacccagcagcgagcttccaaaaagaaacccaaagttgtcttctcaagtgatgagtccagtgaggaaggtatgatgctcccgcctgttcccggccgagaaggcacacagctagggtgcagagggctggtttccataggacctgctgcgggggcctgagtgtagatgctctgccccactgccgcagaagggcctctcctgtacagcttggattttatttcttctgtgcggtgtgggattgtctcacttgttctctgatatctattttttcaccatgtttgtgactcagctttttcttattcctttaattctttgcatagatctttccgccgagatgacagaagacgagacacccatgaaacaactccc

SEQ ID NO: 123650 - DNA, 1977 bp, Homo sapiens
atgaatggggttccagttggagcacaaaagcgggtggacaaggaagaagtcaagaatggggcaatagctgagcttttcagtgaggattggtcagattgtgcttataaagcaaacgaggtgtccaggattagacctctagaagagtctgagctgttgtaccccatactggggcaaagtaagttgtttgtgctgagtggggagtggagccaaagctcagaggaggcatcggaagaggtggcagtgaccctcatttaccaactggcagagagtcccacagtgatctgtgcccagatatggcagggctgtgcaaaacaggccctggagaagctagaagagaagagaaccagtcagggggacccgaaggagtctcccacaatgctccccactttcctgttgatgaacctcttgtccctggctggggatgtggctctgcagcagctggtccacttggagcaggcagtgagtggagagctctgtcagcgccgagttctccgggaagaacaggagcacaagaccaaagatcccaaggagaagaatacaagtttcgagaccactatggaggaggagctggggctggttggggcagcagatgacacggaggcagaactaatccgcggcttctgcaagatggaactgttggatggcaaacagacactggctgcctttgttccactcttgcttaaagtctacaacaactcaggcctctatagcaacccagacctctctgcagctgcttcacctacccttggcaagttctgcatgatcagtaccactttctgcaactcccagcctcatcttctgttcaccatgctagaaaagtctccacttcccattgtccggtctaatctcatcgttgccactggggatctggccatccactttcccaatctggtggacccctggactcctcatctatatgctcaccttcaggaccctgctcagccagtgtggaaaacagtggggctggtgatgactccacctgatcctcaaggacatggtgaaggtaaaggggcagagcaaggcccttgcaagatgcttggcaattttgactgttttggagataaactgtcagatgagtccatcttcagttcttttttgtcagttatgggcaagctacaacatggggccaagcctgagggcaaggctataatagatgaatttgagcaaaagcttcaggcctgtcatgccagaggtttggatgggattgaggagcttgagattaaccaagcaggtagccagagagccccaacagccaagaaaccatccactgtttgtaggcaccagcctctggcttctgcagcctcagacaatgacttcgtcacaccagagccccgtcgtactacccatcggcatccgaacacccagcagcgagcttccgaaaagaaaccaaaagttgtcttctcaagtgatgagtcaagcattaagactgaggttgaaggtttggggtacaacatcaaactgagagtggccacacagaggctcagctttgtttgggtcatgaacattgcagagggagaatcagctgtgctggtgactgtggcatggcctgagtgtgaagtggctgtgatggggtccttggggagtgctgccagaggcactgggaaaaggctacaaggagaaggaaacctccagctgaacttcgtaacaattgctaccaaactagaagtctcctggacagaacttgggggagggtgtgtatctgctttgttcgccagtgtgggtacaaagagagaaaaagcaggattttaccagggttgtagttttgccagtaatatcatgaaaagaggcagggtgaaggaagttgaggatgtgcaaaagagacttataaaaatgactgtggaattcaatctggcatggtcatctctgcctccacacatggctatgaatggagaccagggaggggatagagtcacccatgaatcattcctcaggtgcatgaccctgatgagggccaagggagtggagagactctcttga

SEQ ID NO: 123651 - DNA, 5590 bp, Homo sapiens
aagttttggagcgccggacaagctgaggtccgcgactcgtcgctaagattccccaaaactgagatttcaagaaaattcaccctttccgctttctttggcgcccttcaaccgtgaaggaaatgaaggttgagaacctggaacccgcttccaaagaccaagccctttctctgtgcctcacaacagtcttgcgctgtagctgtttttattacccctattttactactggggaggagatttgaggtcctgaaagtgaagtgacttgctggacgtcacttagcagaggagatggcgaaacctggattagaggcgatgccttctaactcccagcgtggacttgcctcctttcctgggggtgactgaatgcccagccagggacgcgacgtctctggccagcagaaatacggcctcctccccgccgactgggcaaagggggaccttgcggccaaggagggattcgcaggcgggccgggggtgggagcgggggccggagccggagccttggcccgcccccgggcggcgctgtgattggccggccgctccggcgggcgtcgcgattggccgtcctgcagccgttgagatttgaactcggtatttgtggctttgcccgcgcgttgccagactcagaggcggccctttgcctctgcctgccggggattggccggattctccgccgacttgaaaactgccttgctaattggtgcgtgttgtgcacgcgtgttttttccttttcatttcagcctgactgccggaatcagagccgcgggtgagatccccagccctgtgagcctgtaggagtagaatggctccccaaatgtatgagttccatctgccattatccccagaggagttgttgaaaagtggaggggtgaatcagtatgttgtgcaagaggtactgtccatcaaacatcttccaccacagcttagagcttttcaggctgcctttcgagctcaggggcccctggctatgctgcagcactttgatactatctacagcattttgcatcactttcgaagtatagatcctggcctcaaagaagatactctggaattcctgataaaaggtgtttatgggtcaggggtggtatcccgccactcccaggagcttccagctatcctggatgatacaactttgagtggatcagatagaaacgcccatctaaatgccctcaaaatgaactgttatgctctgatacgtctcctggaatcctttgagaccatggccagccagacaaaccttgtggacctggaccttggtgggaagggtaagaaagctcggaccaaggcagcccatggctttgactgggaagaagagaggcaaccaattcttcagcttttaacacagctacttcagttggacatccgtcacctgtggaaccactcaataattgaagaagaatttgtcagtttggttactggctgttgctaccgccttctggagaatcccaccattaatcaccagaagaaccgccccactcgggaagccataacacacctgcttggtgtagccttgacccgttataaccatatgctcagtgctacagtgaagatcatccagatgctgcagcactttgaacacctggcacctgtactggttgcagccgtgagtctatgggcaactgactatggaatgaagagcatagtgggagagattgtaagagagattggacaaaagtgtccccaagagctgagtcgagacccttcagggacaaagggctttgcagcattcctgacagaactagcagaacgtgtcccagctatcctgatgtccagcatgtgcattttgctagatcacctggatggagaaaattacatgatgcgtaatgctgtgctggcagccatggcggagatggtgctgcaggttctcagtggcgatcaactggaagcagcagcccgagacaccagagaccagttcttggatactttacaagcccatggccatgatgtcaactcctttgtgcggagccgtgttttgcagctcttcacccgaattgtccagcagaaggctctccccctgacacgtttccaggcagtggtggctttagctgtgggacgtctggcagacaagtcagtgctagtatgtaaaaatgccatccagctgctggccagttttctagccaataatcctttctcctgcaagcttagtgatgctgaccttgccggaccactgcagaaggagacccagaaattacaagagatgagggcccagaggcgaactgcagcagcttctgcagtgctggacccagaggaggagtgggaagccatgctgccagagttgaagtctaccctgcagcagcttctacagcttccccagggagaggaggagattcctgagcaaattgccaatacagagacaactgaagatgtgaaaggacgcatctatcaactgcttgccaaagctagttacaaaaaggccatcattctcactcgagaagccacaggccacttccaggagtccgaacccttcagtcatatagacccagaggagtcagaggagaccaggctcttgaatatattaggacttatcttcaaaggcccagcagcttccacacaagaaaagaatccccgggagtctacaggaaacatggtcacaggacagactgtctgtaaaaataaacccaatatgtcggatcctgaggaatccaggggaaatgatgaactagtgaagcaggagatgctggtacagtatctgcaggatgcctacagcttctcccggaagattacagaggccattggcatcatcagcaagatgatgtatgaaaacacaactacagtggtgcaggaggtgattgaattctttgtgatggtcttccaatttggggtaccccaggccctgtttggggtgcgccgtatgctgcctctcatctggtctaaggagcctggtgtccgggaagccgtgcttaatgcctaccgccaactctacctcaaccccaaaggggactctgccagagccaaggcccaggctttgattcagaatctctctctgctgctagtggatgcctcggttgggaccattcagtgtcttgaggaaattctctgtgagtttgtgcagaaggatgagttgaaaccagcagtgacccagctgctgtgggagcgggccaccgagaaggtcgcctgctgtcctctggagcgctgttcctctgtcatgcttcttggcatgatggcacgaggaaagccagaaattgtgggaagcaatttagacacactggtgagcatagggctggatgagaagtttccacaggactacaggctggcccagcaggtgtgccatgccattgccaacatctcggacaggagaaagccttctctgggcaaacgtcacccccccttccggctgcctcaggaacacaggttgtttgagcgactgcgggagacagtcacaaaaggctttgtccacccagacccactctggatcccattcaaagaggtggcagtgaccctcatttaccaactggcagagggccccgaagtgatctgtgcccagatattgcagggctgtgcaaaacaggccctggagaagctagaagagaagagaaccagtcaggaggacccgaaggagtcccccgcaatgctccccactttcctgttgatgaacctgctgtccctggctggggatgtggctctgcagcagctggtccacttggagcaggcagtgagtggagagctctgccggcgccgagttctccgggaagaacaggagcacaagaccaaagatcccaaggagaagaatacgagctctgagaccaccatggaggaggagctggggctggttggggcaacagcagatgacacagaggcagaactaatccgtggcatctgcgagatggaactgttggatggcaaacagacactggctgcctttgttccactcttgcttaaaagtctgtaacaacccaggcctcttatagcaaccccagacctcttctgcagctgcttcactttgcctttggcaagttttctgcatgattcagtgccactttctgcgactcccagctttggtctttctgttcaccatgctggaaaaagtctccactttccatttgtccggtctaaacctcatggttgccactggggattttggccatccgcttttccaatctgggtggacccctgggactcctcatctgtatgctcgcctccgggaccctgctcagcaagtgcggaaaacagcggggctggtgatgacccacctgatcctcaaggacatggtgaaggtgaaggggcaggtcagcgagatggcggtgctgctcatcgaccccgagcctcagattgctgccctggccaagaacttcttcaatgagctctcccacaagggcaacgcaatctataatctccttccagatatcatcagccgcctgtcagaccccgagctgggggtgggaggaagagccttttccacaccattcattgaaacagctcctctcctacattcaccaagggacaaggcagacagagagcctggtggaaaagctgtgtcagcggttccgcacatcccgagactgagcggcagcagcgagacctggcctactgtgtgtcacaagctgcccctcacagagcgaggcctccgtaagatgcttgacaattttgactgttttggagacaaactgtcagatgagtccatcttcagtgcttttttgtcagttgtgggcaagctgcgacgtggggccaagcctgagggcaaggctataatagatgaatttgagcagaagcttcgggcctgtcataccagaggtttggatggaatcaaggagcttgagattggccaagcaggtagccagagagcgccatcagccaagaaaccatccactggttctaggtaccagcctctggcttctacagcctcagacaatgactttgtcacaccagagccccgccgtactacccgtcggcatccaaacacccagcagcgagcttccaaaaagaaacccaaagttgtcttctcaagtgatgagtccagtgaggaagatctttcagcagagatgacagaagacgagacacccaagaaaacaactcccattctcagagcatcggctcgcaggcacagatcctaggaagtctgttcctgtcctccctgtgcagggtatcctgtagggtgacctggaattcgaattctgtttcccttgtaaaatatttgtctgtctcttttttttaaaaaaaaaaaaggccgggcactgtggctcacgcctgtaatcccagcactttgcgataccaaggcgggtggataacctgaggtagggagttcgagaccagcctgaccaacatggagaaaccccatctctactaaaaataaaaaattagccgggcgtattggcgtgcgcctgtaatcccagctactcaagaggctgaggcaggagaatcgcctgaacccagaggcggaggttgtagtgagccgaaatcacaccattgcactccagcttgggcaacaatagcgaacctccatctcaaattaaaaaaaaaatgcctacacgctctttaaaatgcaaggctttctcttaaattagcctaactgaactgcgttgagctgcttcaactttggaatatatgtttgccaatctccttgttttctaatgaataaatgtttttatatactttt

SEQ ID NO: 123652 - DNA, 487 bp, Homo sapiens; identical to SEQ ID NO: 116078

SEQ ID NO: 123653 - DNA, 448 bp, Homo sapiens
tttgctgtcacagcgggagaggacctgctggccccaccgcacgacaccagcacggatctcacggaggtcatggagcagattcacagcacgtttccatcttgctgccgtgagtatgaaagattgcagcaccacagctgcacgtgttccttccctttctctttttctgcatgcggcccttcgccttctggcagccactcccagagcccctggaactccggcccaaggctctctgactgactccttcccagatcttctcggcttagcggctgaagactgctgctcggttgcctcggaagccctgggctgtacttccgcaaggcttcacagacagaccccactacctcagtcaagcccaaatttcatcctcatctgttacctatctcagcataattctcgtaaaaacacacgtgctctgctctcccgaattccaccgcactggagtagtgat

SEQ ID NO: 123654 - DNA, 732 bp, Homo sapiens
atgggcaatgacttcatgactaaaacaccaaaagcaatggcaacaaaagccaaaatagaaacacatgatctaattaaactaaagagcttctgcacagcaaaagaaactaccatcagagtgaacaggcaacctacagaatgggagaaaatttttgcaatctacccatctggcaaaggtctaatatccagaatctacaaagaacttaaacaaatttacaagaaaaaaatcaaacaaccccatcaaaaagtgggcaaagaatatgaacagacacttttcaaaagaagacatttatgcagccaacagacacatgaaaaagtgctcatcatcactggtcatcagagaaatgcaaatcaaaaccacagtaatgacatttatttgtctcccttgtcttctgactttcaactagacatgaccattagtagccatggcaaaatttggagggcttctgaggcgatcgggcagtgtcagtcttcagctgctaagccgagaagatctgggcaggagtcagtcagacagccttggaccagagtcccaggggctctggaagtggctgccagtctggtttctgtccacatcccttcatggaaacgacttttactaaggtcttcctataaactctttcaaccaattgccaataaggaaatctttgaatccacctactacctggaagttttccacttcaagttgtcctgcctttatggactgaatcagtgtccatcttacacgtattga

SEQ ID NO: 123655 - DNA, 420 bp, Homo sapiens; identical to SEQ ID NO: 114509

SEQ ID NO: 123656 - DNA, 928 bp, Homo sapiens; identical to SEQ ID NO: 116086

SEQ ID NO: 123657 - DNA, 1065 bp, Homo sapiens
atgaaactcatggaaacacttaaccagtgcataaacgctggtcatgaaatgacgaaggctatcgccattgcacagtttaatgatgacagcccggaagcgaggaaaataacccggcgctggagaataggtgaagcagcggatttagttggggtttctctcaggctatcagagatgccgagaaagcagggcgactaccgcacccggatatggaaattcgaggacgggttgagcaacgtgttggttatacaattgaacaaattaatcatatgcgtgatgtgtttggatctggctctgaaggggctacgtgttttgctcgtggaaggtaacgacccccagggaacagcctcaatgtatcacggatgggtaccagatcttcatattcatgcagaagacactctcctgcctttctatcttggggaaaaggacgatgtcacttatgcaatatatttcacttgctggccggggcttgacattattccttcctgtctggctctgcaccgtattgaaactgagttaatgggcaaatttgatgaaggtaaactgcccaccgatccacacctgatgctccgactggccattgaaactgttgctcatgactatgatgtcatagttattgacagcgcgcctaacctgggtatcggcacgattaatgtcgtatgtgctgctgatgtgctgattgttcccacgcctgctgagttgtttgactacacctccgcactgcagtttttcgatatgcttcgtgatctgctcaagaacgttgatcttaaagggttcgagcctgatgaccccactggaaatcggactgttcaactcacctggcagccactcccagagcccctggaactctggctgaaggctctctgactgactccttcccagattttctcagcttagcagctgaagactgacgctgccggatcgcctcggaagcccctagatctgatgatttaataagagggtatttttccttttgctcagcacgtctcctttctgctgccatgcgtagagggatgtgtttgctttcccttctgtcattactgtaagtttcctgaggcttctccaacc

SEQ ID NO: 123658 - DNA, 1365 bp, Homo sapiens
tcatactttctccctcccggctcggtaccaacggaatacccgcgttgcacagtgtttccagctcttcgccaccacggccaaaaataacggatcgccacctttcagccgcaccacgcgtttgcctttttgcgcttcccgcagcaggatctggttaatctcttcctggggtacgcagtggtatcccgcgcgtttgccgacgaaaacacggtccgcatcgcggcgtaccagattcataatatcgtcagaaaccagacggtcgtagaccaccacatctgcctgctgaatttgttgcagtcctttcagtgtcagcagcccggcatcgcccggacctgcaccaaccagcaccacttcaccgcgatggtcgagcggttcgttgattaactgttcggtcgtttcagtaatggctttctgatcgttgtttgccagcgactgcgccaggcggtcgttaacgaacaatttctcccagaaacggcgacgctcacccatcgtggcgaactgttgtttcactcgcccgcgtaattgcccggcgtatttcgctacctggcccagatgtaacggcagcagtgattcaagtttttcgcgcaacaggcgtgccagaaccggagaggtgccgccagaggagaccgctaccatgagcggtgagcggtcaataatcgacggcataataaagctggcggctttcggcgcatcgaccacgttacagaagatgcgacgagcttcagcggcttcgctgacgcgctggttaagcgcgtcagtcatccgtcgctgcaatcgccagccagcaggtgtcgagaaggcactgccagttcgtggctcgccatattcccaccaacacccaggtgtatgacttgtcacagacgccgtgtccacagttgtggcccgcacaattgggtcagacccagatgtcaattgacggagggtcactatgtatccatcgccgtaatcaccggcccactcccacgctactgagtcactacgacgtgttatcctacggacacaccacgctactgagtcactacggctggttatccatagcgacacaccacggctactgagctcactacgctggtttcctggcagccactcccagagcccctggaactctggcccaaggttctctgacttcttcccagatcttctcggcttagcagctgaagactgagactgcccgattgcctcggaagccagctcctccttgtacctctggtagaattcagctgtgaatccatctggtcctggagtttttttggttggtaagctattaattattgcctcaatttcagagcctgttattggtctattcagggattcaagttcttcctggtttagtcttgggagggtgtaggtgcccaggaatttatccat

SEQ ID NO: 123659 - DNA, 806 bp, Homo sapiens
atgcccgggcaccaaaaagcacctctgagacccgcagtttccaaaaaggtagtcaatgttggagaaaggcaaaatcaagtaattattgaaaccggaggggattttgccgatttcggaaccaccatcaaacaggattttcgcctgctggggcaaaccagcgtggaccgcttgctgcaactctctcagggccaggcggtgaagggcaatcagctgttgcccgtctcactggtgaaaagaaaaaccaccctggcgcccaatacgcaaaccgcctctccccgcgcgttggccgattcattaatgcagctggcacgacaggtttcccgactggaaagcgggcaggggcttccgaggcgatcgggcagtgtcagtcttcagccactaagccgagaagatctgagaaggagtcagtcagagagctttgggccagagttccaggggctctgggagtggctgccaggtgagttgaacagtccgattttcagtggggtcccacacagatgggacgcggcttaggaggaatcccaggctgcgggcattccttggcccagtggccagatttccggcacatgtagcaagctccggatttgaaattggtgagatgtttcttgggctggtcggtctgaggacctgaggtcgtaggcggatgtttctcacagagcaaagagcaggaggacaggggattgatctcccaagggaggtcccccgatccgagtcacagcaccaaatttcatgcgcgtccgtgtgaagagaccaccaaacaggctttgtgtgagagcagtaaagctgtttatttcacctgggtgcag

SEQ ID NO: 123660 - DNA, 894 bp, Homo sapiens; identical to SEQ ID NO: 115010

SEQ ID NO: 123661 - DNA, 478 bp, Homo sapiens
cccacggatgagtcttcggaaccgccccggaatttccggggcgacccacgcgtacgcccacgcgtccgcccacgcgtccgcaattttggaggtggtggaagctacaatgattttgggaattacaacaatcagacttcaaattttggacccatgaagggaggaaattttggaggcagaagctctggcccctatggcggtggaggccaatactttgcaaaaccacgaaaccaaggtggctatggcggttccagcagcagcagtagctatggcagtggcagaagattttaattaggaaacaaagcttaccaggagaggagagccagagaagtgacagggaagctacaggttacaacagatttgtgaactcagccaagcacagtggtggcagggcctagctgctacaaagaagacatgttttaaacaaaaacttatgtgtgttggggcaaaaaactcaaggaacggttttgtgactaattgt

SEQ ID NO: 123662 - DNA, 1677 bp, Homo sapiens; identical to SEQ ID NO: 118348

SEQ ID NO: 123663 - DNA, 1855 bp, Homo sapiens
gagagggcgaaggtaggctggcagatacgttcgtcagcttgctcctttctgcccgtggacgccgccgaagaagcatcgttaaagtctctcttcaccctgccgtcattggtctaaagtcaaagtttcttaaaaagcccgaccagttgaggaagctttttcattggagggttgagctttgaaacaactgatgagagcctgaggagccattttgagcaatggggaacgctcacggactgtgtggtaatgagagatccaaacaccaagcgctccaggggctttgggtttgtcacatatgccactgtggaggaggtggatgcagctatgaatgcaaggccacacaaggtggatggaagagttgtggaaccaaagagagctgtctccagagaagattctcaaagaccaggtgcccacttaactgtgaaaaagatatttgttggtggcattaaagaagacactgaagaacatcacctaagagattattttgaagagattattttgaacagtatggaaaaattgaagtgattgaaatcatgactgaccgaggcagtggcaagaaaaggggctttgcctttgtaacctttgacgaccatgactccgtggataagattgtcattcagaaataccatactgtgaatggccacaactgtgaagttagaaaagccctgtcaaagcaagagatggctagtgcttcatccagccaaagaggtcgaagtggttctggaaactttggtggtggtcgtggaggtgggtttcggtgggaatggacaacttcggtccgtggaggaaacttcagttggtccgtggtggcctttggtggcaccccgtggtggtggtggatatggtgggcagtgggggatggcttataatgggatttggtaatgatggaagcaattttggaggtggtggaaagctacaatgattttgggaattaacaacaaatcagtcttcaaattttggaccccatgaaagggaggaaattttggaaggcagaagctctggccccctatggtggtgccaggccaatacttttgctaaaccccgaaaaccaagggtggctatggcgggttcccagtagcagcagtagctatcggcagtggcagaagattttaatttaggaaaccaaagcttagcaggaagaggagagccagagaagtgccaggggaagctacaggtttacaacagatttgtgaactcagcctaagcacagtggtggcaaggccctagctggcttacaaagaagacatgtttttaggacaaattactcatgttgtatggggcaaaaaactcggagggactgttatttgtggactaattggttattaacaggttattttagtttcccgttctgtggggaaagttgttaaagcctttccaacaaaagggttttaatggtagattttttttttttgcaccccatgctgtttgattgctaaatgtaacagtctgatcgtgacgcttgaataaatgtcttttttttttaatgtgctgtgtaaagttagtccactccttaagccatcttggtaaattttccccaagagtgtgaagttagaattccttcagggtgatgccaggttctttttggagtttatatacaacctgcttgggtggagaagccattgtcttcagaaaccttggtgtaggtgaactgatggttactgttgcgatctgaagttcaccattaaaagggattacccaagcaaaatcatggaattattggttataaaagtgattgttggcacatcctatgcaatatatctaaattgaataatggtaccagataaaattatagatggaaatgaagtttgtgtatcattcattatcatgtgtaatcaataaacgatttaattctcttgaa

SEQ ID NO: 123664 - DNA, 852 bp, Homo sapiens
tacaacagggcaatgtttcatccccacgctgtcaataagattgcattaagcttgaacaacaagaatccccagatcaaaagtcttgtttttagaactgttggcagccgtttgtcttgtaagaggcgggcataaattattttatctagcatttgataactttaaagaggtttgtggagaaaaacagcgctttgagaagttgatggaacatttcaggaatgaagacaataacatagattttatggtggcttctatgcagtttattaatattgtagtccattcagtagaagatatgaatttcagagttcacctgcagtatgaatttaccaaattaggcctggacgaatacttggacaagctgaaacacactgagagtgacaagctttcaagtccagatccaggcttacctggacaatgtttttgatgtaggagctctactggaagatgctgaaactaagaatgctgccttggagagggtggaagaactggaagaaaacatttctcatttatctgaaaaactgcaagacacagagaatgaagccatgtccaagattgtggaactggaaaagcaactcatgcagaggaacaaggagctggatgtcgttcgggaaatctacaaagatgcaaatactcaagttcacacattaagaaaaatggtcaaagaaaaagaagaagcaattcaaagacagtctaccctggaaaaaaagattcatgagctagagaaacaagggaccattaaaattcacaagaaaggggatggggatatcgccatactgccagttgtggcttctgcacattgtccatggggtcagaagtggtagcaggtaactctgtgggacccacaatgggggccgg

SEQ ID NO: 123665 - DNA, 1432 bp, Homo sapiens
atggctttactgaccctaaaacagcaacagaatgaggatttacaagatattagccactttaccacaacaagaacacctagacaagggaccccagtccagaaggaaaagagtgaagagacaaggttagaatgggctagaaggatgctcagaagagaccagcacagtacaaaggggaaggtggtcaagaggatgagaggattcctggtgggtctggtatattgtgataaacaaagtggggctctggaatccttgctgtgcctgtggaatgtgtcaggaaacacaaccctgagttcattagttgagattggcagcaaagcagccttgggtctggtttgtggagaaaaacagcgctttgagaagttgatggaacatttcaggaatgaagacaataacatagattttatggtggcttctatgcagtttattaatattgtagtccattcagtagaagatatgaatttcagagttcacctgcagtatgaatttaccaaattaggcctggacgaatacttggacctcttagatacaaagtcaacagacagaaagcaaacactgttgcactatatatccaatgtggtgaaagaacaatatcaccaagtgtccctgttttataatgagcttcattatgtggaaaaagctgctgcagtctcccttgagaatgttttgctggatgtcaaggagctccagaggggaatggactttaccaagagagagtacaccatgcatgaccataacacgctgctgaaggagttcatcctcaacaatgaggggaagctgaagaagctgcaggatgatgccaagatcgcacaggatgcctttgatgatgttgtgaagtattttggagaaaaccccaagacaacaccaccctctgtcttctttcctgtctttgtccggtttgtgaaagcatataagcaagcagaagaggaaaaatggagctgaggaaaaagcaggaacaagctctcatggaaaaactcctagagcaagaagctctgatggagcagcaggatccaaagtctccttctcataaatcaaagaggcagcagcaagagttaattgcagaattaaggaagacggcaagttaaaggataacagacatgtatatgagggaaaagatggtgccattgaagatattatcacagtctcccttgagaatgttttgctggatgtcaaggagctccagaggggaatggacttgaccaagagagagtacaccatgcatgaccataacacgctgctgaaggagttcatcctcaacaatgaggggaagctgaagaagctgcaggatgatgccaagatcgcacaggcaagtattggtgcccctgaaacctgtgaagaggctgcatccattaaagctgcctgtggtgcaggccctgtatttggggagaaatgttccatttccctctgtttgtggagggtagctttcttgttgtaa

SEQ ID NO: 123666 - DNA, 286 bp, Homo sapiens
  misc_feature (1)...(286): n = a,t,c or g
caggcatgaattgagaagatcctgagcgaggacccccggtggcaagatgcaacttcgtgctgggcagctacaagacggagcagtgcccgangccgcnacgcctgtgcngccaggctatgcgtgcccacactaccanaatagccgggacaggcggcgcaanccccggcggttccagtacaggtccacgccctgccccagcgtgaagcacggggatgagtggggggaacctcacgctgcgatggcggcgacggctgccagtattgccantcccgcacgagcagtagtt

SEQ ID NO: 123667 - DNA, 429 bp, Homo sapiens
ccgggtcgacgatttcgtaatgccgtcggtttcgaaagcggcggcagcggcgctgagcgggtcccccccgcagacggagaagccgacccactacagcacaagtgcgcgcagcaccggccgttcacctgcttccactggcacttcctcaaccagcggcgccgcaggcccctccgcaggcgcgacggcaccttcaactacagccccgacgtgtactgctccaagtacaacgaagccaccggcgtgtgccccgacggcgacgagtgtccctacctgcaccggacgacgggggacacagaacgcaagtaccacctgcgttactacaaaacaggaacctgcatccacgagacagacgcacgtggccactgcgtgaagaatgggctgcactgtgccttcgcgcacggccccctggacctgcggccgctctagagg

SEQ ID NO: 123668 - DNA, 2017 bp, Homo sapiens
atgccgtcggtttcgaaagcggcggcagcggcgctgagcgggtcccccccgcagacggagaagccgacccactacaggtacctgaaggagttcaggacggagcagtgccccctgttttcacagcacaagtgcgcgcagcaccggccgttcacctgcttccactggcacttcctcagaccaggcggcgccgcagggcccctcggcaggcgcgacggcaccttcaactacagccccgacgtgtactgctccaagtacaacgaagccaccggcgtgtgccccgacggcgacgagtgtccctacctgcaccggacgacgggggacacagaacgcaagtaccacgtgctgttactacaaaacaggaacctgcatccacgagacagacgcacgtggccactgcgtgaagaatagactgcactgtgccttcgcgcacggccccctggacctgcggccgcccgtgtgtgacgtcagggagctgcaggcccaggaagccttgcagaacggccagctgggcggcggggaaggggtcccggatctgcagcctggggtcttggccagccaggccatgattgagaagatcctgagcgaggacccccggtggcaagcattgcttccagtcgcgctgctcaggcaccgtgtggcccatttttcagatgccaacttcgtgctgggcagctacaagacggagcagtgcccgaagccgccacgcctgtgccgccagggctatgcgtgcccacactaccacaatagccgggacaggcggcgcaacccccggcggttccagtacaggtccacgccctgccccagtgtgaagcacggggatgagtggggggaaccctcacgctgcgatggcggcgacggctgccagtattgccactcccgcacggagcagcagttccatcccgaggggcctgtccgggagtccggtgtccggggcgttttctgtgttcagtcacgcaggccttggttgcagaccccagtctctggtacccagctgaagtggagctggcaccacgtgggccacagccgcaccataaatcctgagggagataaaccctcccgcctgggccccgccccagaaaatatcaagcggggaaatgactttgcctgtgatgggagggcagatgctgcgggaatggccccacatgtgtgcgtgttccctatctacaaatctacaaaatgcaacgacatgcgccaaaccgggtactgcccgcgcggccccttctgtgcctttgcacacgttgagaagagcctggggatggtgaatgaatggggctgtcacgacctccacctcacgagtccttcctccacgggcagcggccagccgggaaatgccaagcggagagactcgccggccgagggtggccctaggggcagcgagcaagacagcaagcagggggtgcgcgctcacggtgtttatgtctttgaacagaaccacctggccgtgtttgcagcggtccacccgccggcccccagcgtgagctccagcgtggcgtccagcctggcgtccagcgccggctccggcagctcctcccccactgcgctgcccgcgccccccgcccgtgccctcccgctcggccccgccagcagcactgtggaggccgtcctcgccctggagcccaccccttcctctcctacatcctctgctgtgcagggtgtggcgggggagctgggcatgggatcaggaggacagggctgctggagccacgtggtgggggccctcgctgcagtccctgcctggacacactctggggacttggagtgggaccccagcaccatcaggacccgcgtcaatgtgggcggcggcccggcggccagacccgcaatgactcttgcccgagagccgcagcttctggtcgttggtggttgccccacacggaactgctcaggcccagctgcaagcccccagcaactcctagacgatgccggccaaggaggccgaggagagagagactcttcccagcggccacttaggccacagaccacacatcggcaggacactagaccagtcccatcctga

SEQ ID NO: 123669 - DNA, 612 bp, Homo sapiens
aatacattctctctgtgtgtctccttgcctctctccctgtcactgtctctctctctcccctgcctccctcttggtctcttttttttgctgtctctttctgatgaccttgttcccatctctgtgcgtgtgtggctctctccctgtccatctcttaccatctctgccttcctctcccaggtcttaaacgaatatttccacaatgtctgtgaactggacctggtgttcaacttctacaaggtggaatgtttcccacttaagagcccagtggtcccggaaagtaaagagatcggaagtcaggtggacggacagagtcggatggagcaaagaagcccggcacacaccaacagagagaacgacatagcgcgggaaggagggtccgaggagacacattccaaacccggaaagggaaatttggaatttaggtttaggtgctcgcacttgcaactgggtgagtgcccgatcccgccgtggcagaaggaaaggaccatcgctcaggggccggagccggaggcacgagcagcagtacctgcaggccgccatgacacccggcacgcggtcaacgcaggctgtgccctgattggctcactccgcagaccgtggggcggagcctga

SEQ ID NO: 123670 - DNA, 464 bp, Homo sapiens
aaaaagtagccagctggaaagagcggtctaattgaacgatctattattcgacttgttagaatttctttatcagaagtaccaacctctcttctcagatagtttgtgggaattctacctgctgcagcagctttttgtctgtagtcaaccaccaaaggcataatctgggaaggggaaggttttgttttactgaccgctgtgaccattactgcagtgtcacctgcctgtactacagcagagccatctgcaaatctggccagctttccagaagatatttctaatttcctgttgcctaagtccgcggccacagctcgagaccctgcgctactccatagtgctcgcacttgcaactgggtgagtgcccgatcccgccgtggcagaaggaaaggaccctcgctcaggggccggagccggaggcacgagcagcagtacctgcagcccgccatgacacccggcacgcgacgaaa

SEQ ID NO: 123671 - DNA, 791 bp, Homo sapiens
  misc_feature (1)...(791): n = a,t,c or g
tttttttttttttttttttgccaggcaggaccacaggtttattggggactccacgcacagacgcttatggcatcaacacgaacaacggcaacagtttactcgggacacacacggtggcctctgccccaacagcccagggcccaagaggcaagtggggtgcagtctcctcccttgtggcccagacccagctgggtcccttcctcctaggcagctgagggaaaggactgctgggcttgccacgggcctgggaaggggaagcgagcaggcgagtcccaggaggggccggggccggggtggggtgctcgcctgccctcactccaggggantgtagcatcagcagctgtttcagcaccttaggaggccctggtctctcggatttcgccagccaggaacatctcgtccacgaccgtgtaaaccttgttagaagttgaacaccaggtccagttcacagacattgtggaaatatttcgtttaagacctccacgaagttgtgaatggcctccaggtaagccaggtttgttgtcattgacatccccacagatgcagaagtagaggccagcatagcggcggtaaatgatcttaaagttccggaactccacaaagttggtgtgtttggcgtctcggacggtgaccacggcatgcacctcctcgatcagcttctgtttctcatcatcatcaaactgcatgtaccacttggccaggcgcgtcttgcctgcccggttctggatgaggataaagcgaatcatggcgacccccgtccagaccccagcggccccggtcccgcggcgact

SEQ ID NO: 123672 - DNA, 788 bp, Homo sapiens
atggcggcggccaggggaggcccggtgccggcggccagggaaggtcggatggcggcggccagggcagccccggcggcggcagccaggggagccccggtggcagcggcggcgttggccagggcagccgcggcgggcagggaaagcccggcggcggcggcggccagggaagcccggatggcggaggtcgcccgcttgctgggggagccagtggacgaagagggtcccgagggcaggcccaggtccagacacgggaacggaggcctggctgcgttgccctatctccgtctccgccacccacttagcgttttaggcatcaattaccagcagtttctccgccactatctggaaaattacccgattgctcccggcagaatacaagagcttgaagaacgccgcaggcgattcgtggaagcctgcagagcaagggaagcagcgtttgatgccgaatatcagcgaaatcctcacagggtggacctcgatattttaacctttacgatagctctgactgcctctgaagttatcaaccctctgatagaagaacttggttgcgataagtttatcaatagagaatagttatgtggtgacactacttcaagagaacctctgcattccaggcataccaatcctgcaacttgattttcagaagtcaagagtatatcgcgataagacagtgcacaggtggaggggaaaaaaagggggagggggaagcttatcttgaaaaagcatcacagaagtagaaaaaaatgtcggaagcattataactgtaacgttctttgagtttgtgattg

SEQ ID NO: 123673 - DNA, 363 bp, Homo sapiens
ttcagatgaagcacccaggtgtcctgccttattagaatgcacacagtctcccaattgagtgggctttttgtaaaattgaaaacctctgtgggaagtgtgtgtatatgtgtatgtgttcccaaaataaaaataatcagctgaaattctccttcattccagggcgatggtgtgctagtctgaaaatgtacagcaagggccagaggagtcttatgtacccttgcaggtaccatcagcggatgctgctagtgtccaggtatcttgacactgtgctgctggactgggatcccccaggaccactgcctgaaggaaggcaacacagtcccggacgcaggcagagagacctggcatcagcattactgtgtc

SEQ ID NO: 123674 - DNA, 762 bp, Homo sapiens
atgctgatgccaggtctctctgcctgcgtccgggactgtgttgccttccttcaggcagtggtcctgggggatcccagtccagcagcacagtgtcaagatacctggacactagcagcatccgctgatggtacctgcaaggccgtgggcacggaggatggctcggtctacttcatcagcgtatatgataaggaatcccctcaggtcgtgcacaaggcctttctctcggaatcgtccgtgcagcacgtcgtttatgatcagcaaggaatatttctgttagttggaacagcagaaggaaaagtctttattatcaatgccaactcctcaagctcatttcagattattggattcacagaggtggccaaagacattttacagatatccacagcgtctcttttagaaacagacatagtggaagtgatggtgctttcctcgcttccagaagcagggagaagcaggttggagatgttcacactgcctacattactgccacaagtttccacaacctttgctgatgaaagaggaaggctgaaagatgaaatcattcataagtacctgtatgagttggagcacgctctgtcctctgcagtcttgggctttcaaagtaaccaaatatatggcttctgtagtcaagtgccatacatctgtagctaccttcttcctgaagaagaacataccggtatctacattcttaaaccatacaaaaaagtacaaagcagacagtatggacctggactgctctatctgtcttcacatggattgtgg

SEQ ID NO: 123675 - DNA, 825 bp, Homo sapiens
atgaagcttggtgtacagtggtcattacagatcatgaaaaactggaccaaattagacaaagagaatcagattatcaccaaggagagaattcagaagatcctggcaactggtgccaacgttattctaaccactggtggaattgatgatatgtgtctgaagtattttgtggaggcaggtgctatggcagttagaagagttttaaaggcattgctaaagcttctggagcaactattctgtcaaccctggccaattcggaaggctcatacatctgcatcgattatcttacgtggggcaaatgatatcatgtgtggtgagatggagcgctctttacatgatgcactttgtgtagtgaagagagttttggagtcaaaatccatggttccaggcgggggtgctgtagaagcagccctttccatataccttgaaaactatgcaaccagcatggggtctcagaaagagcttgctattgcagagtttgcaagatcacttcttgttattcctaatacactggcagttaatgctgcccaggactccacagatctggtcacaaaattcagagcttttcataatgaggctcaggttaacccagaacataaaaatctgaaatggattggtcttgatttgagcaatggtgaacgtggagacaacaaacaagcagggatgtttgaaccaaccatagttaaagttaagagtttgaaatttgcaacagaagctgcaattaccattcttcgaattgatgatcttactaaattacatccagaaagtaaagatgataaacatggaggttatgaagatgctgttcactctggagcccttaatgattga

SEQ ID NO: 123676 - DNA, 2040 bp, Homo sapiens
gaattcttgtgaccctgttacacacactggagagaatgggcagaagtcgtggtgttgcagccctgtgccattgggggtgggatgggaatagcaatgtgtgttcgagagagaatgaattgcttaaactttgaacaacctcaatttctttttaaacttaataaagtactaggttgcaatatgtgaaatcagaggaccaaagtacagatggaaaccatttcctacatcacaaaaacccaagtttaacagcttgtactttactttaatgtgtaatactcaactcacggtacaagacaattgcatttaacatttgttataaataaaaggaacatcagatcaatcattaagggctccagagtgaacagcatcttcataacttcccatgtttatcatctttactttctcggatgtaatttaataagatcatcaattcgaagaatgggtgattgcagcttctgttgcaaatttcaaactcttaactttaactatgggttgggttcaaacaccccttggttgtttgtggcctcgagggtttaccatttgctcaaatcaagaccaatccatttttaggatttttacggttctggggttaacccgggggcctcattatggaaaaggctctttaatttttgccaaccagatctgctggagcccctgggcagcattaactgcctagtgtattggggaataacaagaagtgatcttgcaaactctgcaaatcgcaagctgttcccgagaccccatgctggttggcatagttttcaagggtatatggaaagggctgcttctacagcacccccaacggggaaccacagatttttgactccagaactgctcttcactacagcaaagtgcatcatggtaaagagcgctccatctcatcacacatggaatcaattggcacacgtgagatgatcgatgcagacgtacgaagccttagtacttttgattaagatcagctcatcatcacaaattctctcctgtaccacttcttctggcctgtcccaacattgcagcttcaaaagtttcttcaccttccaaattgggccaggggttgacagaatagttgctccagaagctttggcaatgcgtttaaggtccctttttaaaactcttctaactgccatagcaccagcctccacaaaatacttcagacacatatcatcaattcccaccagtggttagaataacattggcaccagttgccaggatcttctgaattctctccttggtgatatctgattctctctgtctaatttggtccagtttttcagggtctgtaatgaccacctgtacaccaagcttcatttttgttttttgcaggctgaagtcaaggcaagcaatttttgcatttacgattctcttgggcatgccctgggatcccaccacacagttgagtgcatagccactgatgagcatactctccatttgacttctcccatgggctttcaaaatattaacagagttgactggatagcgtggctggcctcttatgtctgtgtatttaatagcaagtacagcatctactaccatgttagcaaagaaatcaccatttatcccaatgattttggaagacatggatgtcttagcagcattaatcaggcaatctcttcccagttcatctgtgttaacaattaggttttcattgatataacgcactgcttccttgcaagcaagtcgatagccactaataactgatgtgggatgaattttctgtttgactaattcatctgcattttttaggagttctgctgcaataataaccactgaagtagttccatctccaacttctttgtcttgcagatcagccagctcacaaagaactttagctgcaggatgttctacctccagtaacttcaggatggttgcaccatcgttagtaatggttacatcaccaatatcatccaccaacattttatccaagccaactggaccaagagaactttttacaatattggcaatcgaagctgcagccataacgttttgggagcggatcgtttccccagtgctgcggtcaccgaacacggacaaaggcccctccat

SEQ ID NO: 123677 - DNA, 402 bp, Homo sapiens
cccggcctagctcggtggtgaacagctggcacgtctctgggttgtggacggtaaaggccacgtagacctcaggagcctgctggtgctcccggcaggcagccagcctccgcaggatcctgaccagcgacacgatggcttctgggcaatacagcacgtctttttgatgagttctgagagaaagcaccgggctttcttgactgacggcgggtgcttcacacacacacaggatgcttcacagtcttctgcaaaatatcccgcagcagctcagaatctgatgagtctcttaactttgcttctaagctgtggcaggagcgccgggggtttcagcacggagacccatcccgtctgcccctggactcccgcgagccccgcgggcctctccgctcgcccgccgccacgaaa

SEQ ID NO: 123678 - DNA, 654 bp, Homo sapiens
ctccagtgtggtggaattcgccgggcttccgcccggtctgccggcaacgctgcggccccgcccacgtcatggcgcccgaggagaacgcggggaccgaactcttgctgcagagtttcgagcgccgcttcctggcggcacgcacactgcgctccttcccctggcagagcttataagcaaagttaagagactcatcagattctgagctgctgcgggatattttgcacaagactgtgaagcatcctgtgtgtgtgaagcacccgccgtccgtcaaatatgcccggtgctttctctcagaactcatcaaaaagcacgaggctgtccacacagagcctttggacgagctgtatgaagcgctggcggataccctgatggccaaggagtccacccagggccaccggagctatttgctgccctcgggaggctcggtcacactctccgagagcacggccatcatctcctacggtaccacaggcctggtcacatgggacgccgccctctaccttgcagaatgggccatcgagaacccggcagtcttcactaacaggactgtcctagagcttggcagtggtgctggcctcacaggcctggccatctgcaagatgtgccgcccccgggcatacatcttcagcgactgtcacagccgggtccttgagc

SEQ ID NO: 123679 - DNA, 1506 bp, Homo sapiens
atgcacaaattcaccaccaacaacacagaaattaccgtctccctctattctaaggaattatttttcattttgccatctctgaagttggaatacaccttacaatcactgggcaacaaagcagcatcatcccactattccaggggaggtgctaaatacgagggtgaggctgtcaagcagtccctggtggagtcctacactcacccaaacagcaacgagacagagcggagtgcgaacatcgatactgtcatgaactggttcaccaaggaagactttgactttgtgactctgtgttacagagagccagataacgtgggacatcgattcaggccagaggcagagaataggaagttgatgattcagcaaatcgacaggaccatcagaccatgggatgaccaccgtgaagaagagacccaatgtcaacaagatcccttgtccaactacatcaagtttatggacttggtcaagtttgatattgtgggctacggtggctttgggatgcccctgcccaaattggggcaagaggaagccctttaccaggcactgaagaatgcgtaccctcacctccacatctacaagaaggaggggtttccagaacacttccatctcgctaaacatgaccgggttctgccaatcgtgatgtatgccaactttggttacagtatcaatgggatatcgctattgtacttttatactcatttgtgtgataagtacttcaatgtccacttcttccacgagcccctgagcctctggagggcccagaccacacctagtctttctcaccgttacatctcccttgtcaggcacatggacgccaccaacctggacgcttctgaagcccagcttccaggatcgccctatcctgactccgccccaggacccgccaacctggactctacccaggacctgccccaacgacgcttatcctggccctaccccaggcctcgccctcctaacgctcatcctggccccgccctacagcccgcccccaggaccctcctcctgaccctacccccaggccccgccccctctctgccgccgcgcactgccctgggcccaccccctcttcagtccaggcccggcttccgcccggtctcccggcaacgctgcggccccgcccatttcatggcgcccgaggagaacgcggggaccgaactcttgctgcagagtttcgagcgccgcttcctggcggcgcgcacgctgcgctccttcccctggcaggggggcggcgggcgagcggagaggcccgcggggctcgcgggagtccaggggcagacgggatgggtctccgtgctgaaacccccggcgctcctgccacgtgagttcctgggctctccccggtcagggccgcgagacccggtccccgtccctggggcctggccaaagtcgctcgcacccctcctgccccgcgagctggcggcggaagatgagggcgtctccaccgccttgggggggcagacgcgtgctcggtgtggggtacagttcacgatcattttcacgactttttaa

SEQ ID NO: 123680 - DNA, 1182 bp, Homo sapiens
atggcgcctgaggagaacgcgggtaccaaactcttgctgcagagtttcgagcgccgcttcctagcggcgcgcacactgcgctccttcccctggcaggtgggcggcggggcgagcggagaggcctgcggggcttgcggaagtccaggggcagacgggatgggtctccctgctgaaacccccggcgctcctgccacggagggatcacatagcgctttgccaacacattctattgcgtgttttaatgttcctgtgaatgcgcccttgagatttctctctctcccgtccacacggagcttagaagcaaaattaagagactcatcagattctgagctgctgcgggatattttgcagaagcacgaggctgtccacacagagcctttggacgagctgtacgaggtgctgacggagaccctgatggccaaggagtccacccagggccaccggagctatttgctgcccagatacccttcctgcacagacaaagtgaaaacccctcggaaggctcggtcacactctccgagcacagccatcatctcccacggtaccacaggcctggtcacatgggacgctgcccgctaccttgcagaatgggccatcaagaacctggcagccttcactaacaggactgtcctagagcttggcagtggcgccggccttacaggcctgtccatctgcaagatgtgccacccccggacatacatcttcagcgactgtcacagccgggtcctcgagcagctccgagggaatgtccttctcaatggcctctcattagaggcagacatcactgccaacttagatagccccagggtgacagtggcccagctggactgggacgtagcgacggtccatcagctctctgccttccagccagatgttgtcattacagcagacgtgctgtattgcccagaagccatcgtgtccctggtcggggtcctgcggaggctggctgcctgctgggagcaccagtgggctcctgaggtctacatggcctttaccgtccgcaacccagagacttgccagctgttcaccaccgagctatgctggactgggatcagatgggaagcggaagctcatcatgaccagaaactgtttccctacagagagcacttggagatggcaaagctgaacctcacactgtaggactcacacatgactccaacgggattgtgagaattaagtcac

SEQ ID NO: 123681 - DNA, 361 bp, Homo sapiens
cggcacgaggacaagaaagctcagctggtggtgattgcacacgacgtggatcccacctgtccttcgagcaggaagacctgcaccactgtcgccttcacacaggtgaactcggaagacaaaggcgctttggctaagctggtggaagctatcaggaccaattacaatgacagatacgatgagatccgccgtcactggggtggcaatgtcctgggtcctaagtctgtggctcgtatcgccaagctcgaaaaggcaaaggctaaagaacctgccactaaactgggttaaatgtacactgttgagttttctgtacataaaaataattgaaataatacaaattttccttcaaaaaaaaaaaaaaaaa

SEQ ID NO: 123682 - DNA, 711 bp, Homo sapiens
atgccgaaaggaaaggaggccaaggggaagaagttggctctggcccctgcttttgtgaagaagcaggaggccaagaaagtggtgaatcccctgtttgagaaaaggcctaagaattttggcattggacaggacatccagcccaaaagagacctcacctgctttgtgaaatggccccgctatatcaggttgcaatggcagagatccatactctataagcagctgaaaaccagagacaaagcaagagaagaagtggaggctgttggcccaggcagagttgtgggcaaaggggacctccccatgaagagactacctgtctttcgagcaggagttaacaccgtcaccacctttgtggataacaagaaagctccgctggtggtgactacacacgacatggatcccattgagctgactgttttcctgcctgtcctgtgtcataaaatgggggccacttgctgcattatcaaggggaaggcaagactgggatgtctagttcacaggaagacctacaccactgtcgacttcacacaggttaactcagaagacaaaggagctttggctaagctggtggaagctatcgggaccaattacaatgccagatacgatgagacccactgtcactgggacggcaatgtcctgggtcccaagtctgtggctcacattgccaagctcgaaaaggcaaaggctaaagaacttgccactaaactgggttaa

SEQ ID NO: 123683 - DNA, 1097 bp, Homo sapiens
  misc_feature (1)...(1097): n = a,t,c or g
ggcacgaggcccaagatgccgaaaggaaagaaggccaagggaaagaaggtggctccggccccagctgtcgtgaagaagcaggaggctaagaaagtggtgaatcccctgtttgagaaaagggcctaagaattttggcattggacaggacatccagcccaaaagagacctcacccgctttgtgaaatggccccgctatatcaggttgcatgcggcagagagccatcctctataagcggctgaaagagcctcctgcgattaaccatgttcacccaggccctgggaccgccaaacagctactcagctgcttaagctggcccacaaagtacagacccagagacaaagcaagagaaggaagcagagactgtttggcccgggccgagaagaaggctgcttggcaaaggggacgtcccaacgaagagaccacctgttcctttcgtgcaggagttaaacaaccgtcaccacccttggtggaggaacaaggaaagctttagcttggtggtgatttcacacggacgtggatcccatcgagctggttgtcttcttgccttgccctgtgtcgtaaaatgggggtcccttactgcattatcaagggaaaggcaagactgggacgtctcagtcaacaagaagacctgcaccactgtcgccttcacacaggtgaactcggaagacaaaggcgctttggctaagctggtggaagctatcaggaccaattacaatgacagatacgatgagatccgccgtcactggggtggcaatgtcctgggtcctaagtctgtggctcgtatcgccaagctcgaaaaggcaaaggctaaagaacttgccactaaactgggttaaatgtacactgttgagttttctgtacataaaaataattgaaataatacaaattttccttcnnnnnnnnnnnnnggggggcccctttaaaaagaaaaaattttaatacccgggggtgggaaaggaaaacttttttttagggggccccaaaataaatttccggggccgggttttaaaaacgggggagggggaaaaacccgggggtacccaaattaaaaccccttggaaaaaaaanngnnnnggcccaccgaggatggagaacc

SEQ ID NO: 123684 - DNA, 426 bp, Homo sapiens
ctgcaggcatggtgtggtatagcatcctcaaggacaccaaaatcacgtgtgaggagaagatggtgtcaatggcccgaaacacatattatttgactctatcaaaagtctctcctttttaaaccttttcttatggatggctgtcaatcccgaggcagaagttttcaggtggagaccaagcggcctttgctcttcttccttcttcctgccacactctgctttcttcctgccatggacccctggaggagacctatggagggacagttttgacctgacccctagaggagacagttttgacctcttcagcaccaggaaggaagctctgaggatggttgcagtgaggaagcatgggtctttaaggacttctctctcttttttgctggacattattgagtttgtgggaccctgcctcttcctgctacctgtggg

SEQ ID NO: 123685 - DNA, 711 bp, Homo sapiens
atgaaaaacttctgctctatgaaagacaatgtcaagataatgagaatacaagccaaagactgggagaaagtatttgcaaaagacacatccaataaaggactgttatccaaaatatataaagagctcttaaaactcaacaataagaaaatagcccaaataaaaaaatgggctgaagactttaatatacatgtcaccaaggaagatagacatatggcaaataagcatatgaaaagatgctgcaaatcaagtgctgacaatgattcagagccacaggaattcttgttcattgctgagaccacagagctgggcagcaagaaggagctcaagtccatgcccttcatcacctacctctcaggtttgctgacagcccagatgctgtcagatgaccagctcatttcaggtgtggagattcgctgtgaggagaaggggcgctgtccatctacctgtcacctttgccgccggccaggcaaggagcagctgagccccacaccagtgctgctggaaatcaaccgtgtggtgccactttataccctcatccaagacaatggcacaaaggagttattaccagtacctaccatcactacaaccatgaccactaccgccaccactatgctacaccactactatcactaccagcatcaccctcgctatagccccatcactgtgattatcttgcattggttgcctactgtgtgccagatactgtgttag

SEQ ID NO: 123686 - DNA, 942 bp, Homo sapiens
ccagcaggtttgattgttgctttgaactcaggcgaccctgtgcagcctttgtctaatatctcagagccccagccaccaaccggctccctttgccccatgaagataagcctttctggtcgactggacacatcagccttagaaaccttgagttaccagaatgggagcaactggctggctggtgaacttgctgtttgcggggagggtgggaagcgggcttttgaatcaaggacgcatagtggaagagtgatagagctggtacttaatcaactgctggtccagggctccttatgctgcattcaccttgactttgaagacaaaactgttccccctcttgcagaaaaatctctactctcagatacccaagaggatcggggcagatgggtgcttgaatctagtaccagagagcagcaggtaggctataacggaggcattgttcagatgcttggccttccccttgcaagtcaactctttcctgcagcaatgaagctcattcatcccaccaactccctggaagcttccccatactcctcatggagcccaacttggatgatgaggtcctcgcctgcctccatagccccaaatctcctactttccctggccttccacattccagttacactctctgctgcagcgttgtctctcgtcccccagcctgctcacagaaagaaaaacaggaaaagaatgttagagacttggacgaacttgggcgaggcagaagcagcagcctgggttctaggagggttctaccataagcccctaacaaggtaccagggaggacggagcagaggcctcccaggagaattcctgagttttgctgatgacttactctctggcctgggcacatcttgtgtagcagctggtcgaagccatggagaggtccctgaagtcagtatctactcagtcatcttcaagtgtctggagcccgacggtctctacaagtaa

SEQ ID NO: 123687 - DNA, 591 bp, Homo sapiens
atgaagaatgactccctaaagacagtaacattggaatggagcattgatagaagagatgtggagaggcagaggggaaaagcagcacagaagaccacagagctgggcagcaagaaggagctcaagtccatgcccttcatcacctacctctcaggtttgctgacagcccagatgctgtcagatgaccagctcatttcaggtgtggagattcgctgtgaggagaaggggcgctgtccatctacctgtcacctttgccgccggccaggcaaggagcagctgagccccacaccagtgctgctggaaatcaaccgtgtggtgccactttataccctcatccaagacaatggcacaaaggaggaagccagagaaacagtaggtaggaagggatccctgaagccagacaaagagaaatggcactgttccaggtcttacgagaagtcccaagcattggggaccgctgaaaagcccctgaacaagccccccaagacaaatggccagctttataaagatgccaggaccagagaccgcaaagccagctgggtgaccttggaacaagaccttaacctctctaagcctccatttcctcatctgtaa

SEQ ID NO: 123688 - DNA, 1029 bp, Homo sapiens
atgagagtgcctcgggaagagcagggatggaggagacaacctgagtcttctgatccaaaggagaaaagcagcaaacctgcgtcctcaggtgctctcctcttagctcccccaccccaggatgcagccaaagaaaaccaaagcactctgttttctaagccggagccaggagcgattcccgaagccaggatgtggagccaggagagaaggggcattcaaagggcctgggagacccttggtgaaaacaatcagttggtttcaacatcccagagagattctcaatcagggtttttatcttctttgcgatgggttcgaacttcctcctttagctcggagaagtttggttttctgaagccttcttctctcaactcctcaaagtctttctccgtccagctttgttctgttgctggtgaggagctgcgttcctttggaggtggagagaatagtctgactcaagaccccatgctcgtagactctcagatacccaagaggatcggggcagatgggtgcttgaatctagtaccagagagcagcaggttcactctgtatgctgtggatacacgagggaggcactcagagctaagcacggtgaccctgaggacggcctgtccactggtagatgacaacaaggcagaagaaatagctgacaagatctacaatctgtacaatgggtacacaagtggaaaggagcagcagatggcctacaacacactgatggagaggaactcggcctacactttggtaaacactgtgtttggagccactgaagaatttctgtgtagtggcagcaaagtgtgtgacagcaggagtggccagtgtcccccagagcctggttcttacgaccacaggttactgcaaacagctgctcaaagaagacgcactgacacccagctgtccccagacataaggaaggcccacctgattctacggcgactggagagggtgagtagccactgctccagcatcctgcggagtgcctacatccagagccgcgtggaaacagtgccctatcttttctgccgcagcgaggag

SEQ ID NO: 123689 - DNA, 1164 bp, Homo sapiens
atggctgatcagaaggaagctagacacagtgcatctcagtggaaatgctttgtaggatttctgtcatttagaggtcatatgcaggtagcctgggaggctgatcgatgcaaaggccccgggcgccctctgctggcagaggccttgcaggacttgtggccatcgcccaggcggtcgcaaagggacccagtacccgagagaccatgccgtcgtcctcagcagtctccacttcctcgatttggcagtctctctgctcctctccacagggagaacaacttcatcaaggactttccccagctggccgatgggctgttggtgatcccgctgccggtggaggagcagtgccggggggtcctctccgagccccttccagacctccaactgctcactggagatatcaggtatgatgaggccatgggttaccccatggtgcagcagtggcgggtccggagcaacctctaccgtgtgaagctcagcaccatcaccctcgcagcaggcttcactaatgttctcaagatcctgaccaaggagagcagtcgggaggagctgctgtccttcatccagcactatggctcccactacatcgcagaggccctctatggctcagagctcacctgcatcatccactttcccagcaagaaggtccagcagcagctgtggctccagtatcagaaaggcttcttgggagaacccaagaagatcttgggttcttctctcccaagaagaactcaattcctttggaaaaacaatcacctcataaccaagcagacggtttccattctgtcctgtggtgaggcttttatcctcaggaagggccagcagatttcattttcctctgactctcagctattatcagaattggaattcctcagaccaggtgctggagaccagtctctgcccactcaccttgtgaaagtgattccttttccacctcaattttctcttcctgtgaaatgggtacgttcatcctcttctgcaacattaattgtgcctggggaagggggaggggagagaggtactcacaatcctgttgaaatagacatgggaactggcctactcttgaaggtgctctctgcaagagaagagcgcagagtaggaaggatcactcagcctttcacggaaagaggtgttcaaagaagactcctggaggagttggcggactcctga

SEQ ID NO: 123690 - DNA, 4672 bp, Homo sapiens
  misc_feature (1)...(4672): n = a,t,c or g
ggttcgcttcggcgtccgccgtctccgcagctgcctcctcttcctccttcgccaccgccgccaccgccgccgccgcccgcagcaccgcagcccctcccgccatggccgccgccggcgcccggctcagccccggccccggctcggggctccgggggcggccgaggctctgcttccacccggggccgccgccactgctgccgctgctgctgctgttcctgctcctgctgccgccgccgccgctgctggccggcgccaccgccgctgcctcgcgggagcccgacagcccgtgccggctgaagaccgtcacggtgtccacactgcccgccctgcgggagagcgacatcggctggagcggcgcccgcgccggggccggggctgggaccggggccggagccgccgccgccgccgcgtccccgggctctcctggctctgccggcaccgccgccgagtcgcgcctcctgctctttgtgcgtaacgagctgccggggcgcatcgcggtgcaggacgacctggacaacaccgagctgcccttcttcaccctggagatgtctggcacagcggcggacatctcgctggtgcactggagacagcagtggctggagaatggcaccttgtacttccacgtctccatgagcagctccgggcagctggcccaagccaccgcccccactctccaggagccctcggagattgttgaggagcagatgcacatcctccacatttctgtgatgggtggcctcatcgcgctgctgctgctgctgctggtgttcaccgtggcgctgtacgcccagcgacgttggcagaagcgtcgccgcatcccccagaagagcgcaagcacagaagccactcatgagatccactacatcccatctgtgctgctgggtccccaggcgcgggagagcttccgttcatcccggctgcaaacccacaattccgtcattggcgtgcccatccgggagactcccatcctggatgactatgactgtgaggaggatgaggagccacctaggcgggccaaccatgtctcccgcgaggacgagtttggcagccaggtgacccacactctggacagtctgggacatccaggggaagagaaggtggactttgagaagaaaggaggaatcagctttgggagagccaaggggacgtcgggctcagaggcagacgatgaaactcagctgacattctacacggagcagtaccgcagtcgccgccgcagcaaaggtttgctgaaaagcccagtgaacaagacagccctgacactgattgctgtgagttcctgcatcctggccatggtgtgtggcagccagatgtcttgtccactcactgtgaaggtgactctgcatgtgcccgagcacttcatagcagatggaagcagcttcgtggtgagtgaagggagctacctggacatctccgactggttaaacccggccaagctttccctgtattaccagatcaatgccacctccccatgggtgagggacctctgtggacaaaggacgacagatgcctgtgagcagctctgcgacccagaaaccggagagtgcagctgtcatgaaggctatgcccctgaccctgttcacagacacctgtgtgtgcgcagtgactggggacagagtgaaggaccttggccctacacgacacttgagaggggctatgatctggtgacaggggagcaagcccctgaaaagattctcaggtctactttcagcttgggccaaggcctctggcttcctgtcagcaaaagctttgtggttccgcctgtggagctgtccatcaaccccctgggccagctgcaagaccgatgtgctcgtcacggaagaccctgcagatgtcagggaagaagcgatgctgtccacatactttgaaaccatcaatgacctgctgtcttccttcgggccagttcgtgactgctctcggaacaatgggggctgcactcgcaacttcaagtgtgtgtctgaccggcaggtggattcctcgggatgtgtgtgccctgaggagctgaaacccatgaaggatggctctggctgctacgaccactccaaaggcattgactgctctgatggctttaatggcggctgtgagcagctgtgcctgcagcagacgctgcccctgccctacgatgccacttcgagcaccatcttcatgttctgcggttgcgtggaggagtacaaactggctcctgatggaaaatcctgcttaatgctctcagatgtctgcgagggccccaagtgcctcaaacctgactccaaattcaatgataccctctttggagagatgctacatggttacaacaaccggacccagcttgtgaaccatggccaagtcttccagatgacctttagggagaacaacttcatcaaggactttccccagctggccgatgggctgttggtgatcccgctgccggtggaggagcagtgccggggggtcctctccgagccccttccggacctccaactgctcactggagatatcaggtatgatgaggccatgggttaccccatggtgcagcagtggcgggtccggagcaacctctaccgtgtgaagctcagcaccatcaccctcgcagcaggcttcactaatgttctcaagatcctgaccaaggagagcagtcgggaggagctgctgtccttcatccagcactatggctcccactacatcgcagaggccctctatggctcagagctcacctgcatcatccactttcccagcaagaaagggtccagcaggcagctgtgggctccagtatcagaaagagaccacagagctgggcagcaagaaggagctcaagtccatgcccttcatcaccttacctcttcaggtttggttgacagcccagatgctgttcagatggaccagctcattttcaggtgtggagattcgctgtgaggagaaggggcgctgtccatctacctgtcacctttgccgccggccaggcaaggagcagctgagccccacaccagtgctgctggaaatcaaccgtgtggtgccactttataccctcatccaagacaatggcacaaaggaggccttcaagagtgcactgatgagttcctactggtgctcagggaaaggggatgtgatcgatgactggtgcaggtgtgacctcagcgcctttgatgccaatgggctccccaactgcagcccccttctgcagccggtgctgcggctgttccccaacagtgggagccctccagtactgtggtctccttgggagtgggtgggatgtttcagccagctatttggggaccaaggtcttccgattattatttttgcagcataagaaagtggatgaatacacagacactgacctgtacacaggagaattcctgagttttgctgatgacttactctctggcctgggcacatcttgtgtagcagctggtcgaagccatggagaggtccctgaagtcagtatctactcagtcatcttcaagtgtctggagcccgacggtctctacaagttcactctgtatgctgtggatacacgagggaggcactcagagctaagcacggtgaccctgaggacggccttttccactggtagatgacaacaaggcagaagaaatagctgacaagatctacaatctgtacaatgggtacacaagtggaaaggagcagcagatggcctacaacacactgatggaggtctcagcctcgatgctgttccgagtccagcaccactacaactctcactatgaaaagtttggcgacttcgtctggagaagtgaggatgagctggggcccaggaaggcccacctgattctacggcgactggagagggtgagtagccactgctccagcctcctgcggagtgcctacatccagagccgcgttggaaacagtgccctatcttttctgccgcagcgaggaggtccggcctgcaggcatggtgtggtatagcatcctcaaggacaccaaaatcacgtgtgaggagaagatggtgtcaatggcccgaaacacgtaccgggagttccaagggcccgtgaagggagggtattgccctcccgtgagcacagagactctccatgggagggggagcattattctcctggatccctggggcctgggtgggctgggggacagctgaggatgggcctagcagatgaagcttgccagcaaggccaatagcaaacggtttctcctgtggatagtggacagagacctttgtaaccaatggaattatcaattttcctctatctttaattttctcaaagatattatttgactctatcaaaaagtctcctccctttttaaaaccttttccttaatggaatggctgtcaaatccccgaggccagaaagttttccaggtggaagacccaagcggcctttgcctccttccttcccttccttcctgccacagctctgctttcttcctgcccatggacccctggaggagtacctatggagggacagttttgacctgtatcccctagaggagacagttttgacctcttcagcaccaggaaggaagctctgaggatggttgcagtgaggaagcatgggtctttaaggacttctctctcttttttgctggacattattgagtttgtgggaccctgcctcttcctgctacctgtgggtctgcccgaggagtccctgcaggcctgtccnggtgcagttaaaaattcctattgtctctcaaaaaaaaaaaaaaaaaaagattt

SEQ ID NO: 123691 - DNA, 398 bp, Homo sapiens
gagtgatgcgcgcgtcgacgctcttaataagatcaaaatttgggaaaggataaaaaagcatctagaaggacactctacaaacttgtctttggatattgcaaaattgaaagaacagatatttgaagcatcccaggcacacctgaccttaatgccaggaactggagtgcttgaaggagctgcagacagattatcagctagtaacccattaaaatggataaaaacacttggaagctctgtgatttcaatgatgattgtgcttttaatctgtgttgtttgtctttgtgtagtctgcagatgcagatcctgactcctgcgagaagtagctcaccgtgataaagctgcctttgcttttattgctttgcaaatcaaagaaggggaacatgttgggaacagcaccc

SEQ ID NO: 123692 - DNA, 495 bp, Homo sapiens
ctatttctctctgcaaacatttcccacacctaagctaggtggctgaagcaccggcactggcataggaaccagtgctgtgttgccatctccactctccatagatggtttactggtttctgacggattgttcattcttgagtccagtgtggaaaaccgcttaaggtgttcctggggacagatcaagaagctgtcacagatgatggaagaaaaccttaatgccaggaactggagtgcttgaaggagctgcaaatgattagcagctattaacccattaaaatggataaaaactcttggagactctgtgatttcaatgatgatcgtgcttttaatctgtgttgtctgtgtatagtctgcagatgcagatcccgactcctgcgagaagtagctcactgtgataaagccacctttgcttttatcataagtgagaaaatgtggtattttggtttctgtttctgcaataactcgcttagggtaatagcctccagctgtatccat

SEQ ID NO: 123693 - DNA, 759 bp, Homo sapiens
atggcatctacatcctacatcagaagaagacctgggagaagttcgctgctggcagcttgtgccattgttgccattgaaaaccctgctgatgtcagtgtcatatcctccaggaaaactggccagaaagccacgccgttgtttgctgctgtcactggagccactcttgttgctggctgctttactcctagaacattctctaaccagatctcagcagccttccgggagccacagcttctggtggttactgatcccagggctgaccaccagcccctcacagaggcatcttacattaacctacctaccattgctctgtgtcacagattctcctctgcactatgtgggccttgccatccaatgcaacaacaagggagctcactcagggggtttgacatgcaacctcagctactaagtcatcctgctgatgtactgcgtttagcatttagtatcagagtccctccttctgcaatactgcaagctccccaaaggcaggcagctttatctgttttgtcctctgtcctatcccaggttgaatttggactttcgagtgcccatggacaagcaaaacttctcagttgtctcgtgacggcacaccagtgggactatgctcagtttctgcagtgtcagccctctgtctgttctgtggtgtcaatagccttattgctcaccaaaaaacgagcagaaattttaaaactgaaagtgtggatgctattggcaagacttgtagttcttgttaacttcttacaattgagacgaagatag

SEQ ID NO: 123694 - DNA, 438 bp, Homo sapiens
accagatccaggcagccttccgggagccacggcttcttgtggttactgaccccagggctgaccaccagcctctcacggaggcatcttatgttaacctacctaccattgcgctgtgtaacacagattctcctctgcgctatgtggacattgccatcccatgcaacaacaagggagctcactcagtgggtttgatgtggtggatgctggctcgggaagttctgcgcatgcgtggcaccatttcccgtgaacacccatgggaggtcatgcctgatctgtacttctacagagatcctgaagagattgaaaaagaagagcaggctgctgctgagaaggcagtgaccaaggaggaatttcagggtgaatggactgctcccgctcctgagttcactgctactcagcctgaggttgcagactggtctgaaggtgtacaggtgccct

SEQ ID NO: 123695 - DNA, 489 bp, Homo sapiens
ctgttgagcttgagtgaccatctctttatagatagtatccaggctgacatttgataaagcagttaacgctgatacaattgtttctgcttgtgttttgtcaaatcctttatgcataggagttgatccattatcagcacgctcattaatattgattactccatcttccactaatttcttaagcatccccaaatcacccttaaaggcagccacatgacctggaaatgctaaaggcgcttgggtcgggggagatggagtcgcatttagccgcacagcagcctggaacctgaagttttcggccgctgagcgttctgggtgattgcgtagtgcgagggccaacgaaaccttctgggaagtgtagtccagcaagccgctcacttttcgtgaggcgtcacatcctgctgcttcaccctcaggggcttcataaccttgatcaaaataaggcaacgcctccaccacaacctctccggccaccaaacttgtgcctgccat

SEQ ID NO: 123696 - DNA, 411 bp, Homo sapiens
cggacgcgtgggctctgaggacatgaatagtcgccaggcttggcggctcttgctctcccaaggcagaggagatcgttgggtttcaaggccccgcgggcatttctcgccggccctgcggagagagttcttcactaccacaaccaaggagggatatgataggcggccagtggatataactcctttagaacaaaggaaattaacttttgatacccatgcattggttcaggacttggaaactcatggatttgacaaaacacaagcagaaacaattgtatcagcgttaactgctttatcaaatgtcagcctggatactatctataaagagatggtcactcaagctcaacaggaaataacagtacaacagctaatggctcatttggatgctatcaggaaagacatggtccatcctag

SEQ ID NO: 123697 - DNA, 1092 bp, Homo sapiens
tcaccatccaccactgctgtttgctgccctcccagaccctccattgacttccactcctccggatccagcagggtgtctgctgcgctcctgatccagcgaggttcccattgccgctctggatcgggctaaaggctcgccattgttcctgtggtttaaggcaaaggcaggtctcctggcaggaaaccgaagaagatgggaaagctggttgacaatctcaatttcacgtttttcagtgcagaaaccatgagttgagggcagatttttcatactgctgatgcctggtgtaatgcagggaagaggcctcatggatgtagaatctggttctcctaccatctgctcagaatgtttccacttctctgtacctacaggaactgtctcatcctcatacaggatctctgggttgctgctggtgaagatcttgctgctgtgtatttctttttggtttgatgacagaattagtgttagacatgtctcctcctctccttctctagctcccacagtaacattgtcagaggcgttggaacgaagtgactctgtcttaactgagggcatgtttttcctgatagagtccaaatgagccattagctgttgtactgttattttctgttgagcttgagtgaccgtctctttataggtagtatccgggctgacatttgataaagtagttaatgctgatactgttgtttctgcttgtgttttgtcaaatccaagagtttccaagtccaaggaagtagctataatccattgcagagggcatccaaaaggagactctagtgtggctaagggaaactcctttgcagatgcaggagctaaggcagctgcattaaagcagccagttggacttgtaggcatgttagtgccctctgccctggtaatgacagaaccaagatatattccttcaccctgtgaccaccacctcaaataggcttgtgtcccacttcctgccataacacgttctataggagactgcgtggtacttgcaacttcttggcaatttggtgtgaaaagcacaattttcacatctacttgatctaagatggagacccagacaatgtccatggagttggcctgaggaccaatgacaaggaccat

SEQ ID NO: 123698 - DNA, 1171 bp, Homo sapiens
catcagagggagctgagggaggcctgacctgaggccggcacccggagctggcgggagccagacccagaggacctccgccgcttcttgctgtcagcagcctgccggagcttcccacagtggctgcctggaggtggtggcggccaagtctccagctgctcagatactgatgtcccctacctgctgttggccgtcaagtcagaaccagggcgctttgcagaacgacaggccgtgagagagacccggcgcaaaccaacatccagggatccggctgctcttcctgctagggtctccggtgggtgaggcggggcctgacctaaactcactagtggcatgggagagccgtcgctacagtgacctgctgctctgggacttcctcgacgtcccattcaaccagacgcttaaagaaccctgttgtggttgcctggctgggccggcccctgccccaccgggagttttgtcttgcgagctcaggacgatgcctttgtacacacccctgccctgctggctcacctgcgggccctgccacctgcctcggcccgaagcctctacctgggtgaggtctttacccaggccatgcctctccggaagccaggaggacccttctatgtgcccgagtccttcttcgaaggtggctacccagcctatgcaagcgggggtggctacgtcattgccgggcgcctggcaccctggctgctgcgggcggcagcccgtgtggcacccttcccctttgaggacgtctacactggcctttgcatccgagccctgggcctggtgccccaggcccacccaggcttcctcacagcctggccagcagaccgcactgcggaccactgtgctttccgcaacctgctgctggtacggcccctgggcccccaggccagcattcggctctggaaacaactgcaagacccaaggctccagtgctgactctcattggggaggggcggaggtgctgacctggccccggccctggcctgggcctctggggccggcccctggctcagcccctccttccaggtcttgatgggagggaggagggcccagaagctggacaacttaagccactccttggcctcccccagccaggggcctgggcaggaaagatggggtggtgcactgtttttgcctactttttgtttttaaaaaacatgcactccccactctgaaacga

SEQ ID NO: 123699 - DNA, 1900 bp, Homo sapiens
atgatatttgtggttataattctaatggttgttctctccccagagggtggttctgggctggactccagccccttcctgtcggaggccaatgccgagcggattgtgcagaccttatgtacagttcgaggggccgccctcaagccctacccaccaacaggccccaacttcagatactcacacggggtccctcctcacctcttcgcttacttcccccctggttccactgtctcccaagacaacagcttcatcagccctcagctgcagcacatctttgagcgggtccgccagagcgccgacttcatgccccgctggcagatgctgagagttcttgaagaggagctcggcagggactggcaggccaaggtggcctccttggaggaggtgccctttgccgctgcctcaattgggcaggtgcaccagggcctgctgagggacgggacggaggtggccgtgaagatccagtaccccggcatagcccagagcattcagagcgatgtccagaacctgctggcggtactcaagatgagcgcggccctgcccgcgggcctgtttgccgagcagagcctgcaggccttgcagcaggagctggcttgggagtgtgactaccgtcgtgaggcggcttgtgcccagaatttcaggcagctgctggcaaatgaccccttcttccgggtcccagccgtggttaaggagctgtgcacgacacgggtgctgggcatggagctggctggaggggtccccctggaccagtgccagggcctaagccaggacctgcggaaccagatttgcttccagctcctgacgctgtgtctgcgggagctgtttgagttccgattcatgcagactgaccccaactgggccaacttcctgtatgatgcctccagccaccaggtgaccctgctggactttggtgcaagccgggagtttgggacagagttcacagaccattacatcgaggtggtgaaggctgcagctgatggagacagagactgtgtcctgcagaagtccagggacctcaaattcctcacaggctttgaaaccaaggcattctccgacgcccacgtggaggcagtgatgatcctgggggagcctttcgccacccagggcccttatgactttgggtcgggggaaacggcccgccgcattacaggacctcatcccggtgctgctgcggcaccggcttgtgtcccccacccgagggagacctatggccctggcaccgcaagctgggcaggggctttcctggcctgtgcccacctccgagaccacatcgcctgcagggaccataaaccaggacacctaccaccgctactgggccagtcgccagccagacgcagccactgccggcagcctccccaccaaagggggactcctgggtggatccctcatgacagcctccatgggggattcagtccccagagcaggccgtaccctgctgtagtgcctcttatcccttccccgtctgccctgggtcagaggagcccccttgggcttcccagtcttgcctggctctcctccttggcccaggagctcaggatccctggggctggggaactcccaacttcgtgccctagatcctgcacctccccactcgaaagtgaggtatccgaaaactaagccaggggaagcggttaacttatctttgccaaaattttgagggagccttgggccgctgcatgtcgttatgcagatcagactcatcagggggaagccctcacctctgcctcaagcctcccgtggaaggcgaagatggtcctggaggcagtcctcacctcttgcctccctcgctcctccaacaagctggcttctcccgggttccagcctctcagtgtgttggaaaggtatgggtgcggggtgggggggagctgaatcttcaatcggaataaaagcagccctccccttc

SEQ ID NO: 123700 - DNA, 1139 bp, Homo sapiens
atggtcgtggttatcgacgtgccgatagaccccgccagcgttcgcgtaaagttagagaggctcgatgccgccgccagtcgttccggtggcaaaccagacagcgtaatggtggttagcggcataaagaagcaggccaccgcgaactcttgggacgttagagatgccccttgtaccacggacgaactggcgcacgaatgtattctcgatattcgcccgctgaaagaagaaaccggcatcagcgagctggatattgccaagcgcctgatcgactacggtttccacgcgccgacgatgtcgttcccggtggcgggtacgctgatggttgaaccgactgaatctgaaagcaaagtggaactggatcgctttatcgacgcgatgctggctatccgcgcagaaattgaccaggtgaaagccggtgtctggccgctggaagataacccgctggtgaacgcgccgcacattcagagcgaactggtcgccgagtgggcgcatccgtacagccgtgaagttgcggtattcccggcaggtgtggcagacaaatactggccgacagtgaaacgtctggatgatgtttacggcgaccgtaacctgttctgctcctgcatacgtcaacgaattaatttttctcggaaaaacaaatgggactctagaaagcttgatcaagcgggcgtcagcgaactggcaacgaatcaaaaattgattctggtgtgcggtcgctacgaaggtatagatgagcgcgtgatccaaaccgaaattgacgaagaatggtcaatcggcgattacgttctcagtggtggtgagttaccagcaatgacgctgattgactccgtttcccggtttattccgggagtactgggacatgaagcctcggcaacggaagattcctttgctgaaggattgctggattgcccgcactatacgcggcctgaggtgttagaagggatggaagttccgccagtgttactgtcgggcaaccatgccgagatacgtcgctggcgtttgaaacagtcgctgggccgtacctggcttagaagacctgaacttctggaaaacctggctctgactgaagagcaagcaaggttgctggcggagttcaaaacggaacacgcacaacagcaacataaacatgatgggatggc

SEQ ID NO: 123701 - DNA, 1346 bp, Homo sapiens
atgcaagtggtggttgtggcgtgtgataaaaacggcaacatcgatctgactgatctgcgcgcgaaagcggaacaggcgggcgataacctctcctgtatcatggtgacttatccttctacccacggcgtgtatgaagaaacgatccgtgaagtgtgtgaagtcgtgcatcagttcggcggtcaggtttaccttgatggcgcgaacatgaacgcccaggttggcatcacctcgccgggctttattggtgcggacgtttcacaccttaacctacataaaactttctgcattccgcacggcggtggtggtccgggtatgggaccgatcggcgtgaaaacgcatttggcaccgtttgtaccgggtcatagcgtggtgcaaatcgaaagcatgttaacccgtcaaggcgcggtttctgcggcaccgttcggtagcgcctctatcctgccaatcaactggatgtacattcgcatgatgggcgcagaagggcttgaaaaagcaagccaggtggcaatcctcaacgccaactatattgccagccgcctgcaggatgccttcccggtgctgtataccggtcgcgacggtcgcgtggcgcacgaatgtattctcgatattcgcccgctgaaagaagaaaccggcatcagcgagctggatattgccaagcgcctgatcgactacggtttccacgcgccgacgatgtcgttcccggtggcgggtacgctgatggttgaaccgactgaatctgaaagcaaagtggaactggatcgctttatcgacgcgatggctggctatccgggcagaaattgaccaggtgaaagccggtgtctggccgctggaagataacccgctggtgaacgcgccgcacattcagagcgaactggtcgccgagtgggcgcatccgtacagccgtgaaattgcggtattcccggcagcgggcctgacgttgttcaccggttggtcatgggtgaccattgctgaaaaactcggcggctggattttaaacattctcaccttcgccagtaatcgtacccgtcgcgatgatacctgggtcgatgaagatgagtatgaagacgacgaagagtatgaagatgaaaatcacggcaaacagcatgaatcacgccgtgcccgtattcttcgcggcgcgctagcgcgtcgtaaacggttggcggaaaaattcattaatccgatggggcggcaaacagacgctgcgttgttctccggtaagcggatggatgatgacgaagagattacctacactgcacgcggtgtggctgccgacccggacgacgtcctattttcgggcaatcgtgcaacgcagccagaatatgacgaatacgatccattattaaacg

SEQ ID NO: 123702 - DNA, 1860 bp, Homo sapiens; identical to SEQ ID NO: 114720

SEQ ID NO: 123703 - DNA, 730 bp, Homo sapiens
ttttttttacagaatcaaccaaaacatttattttttctcttttttcaagaaaaactgtcgagcttctttccccaggccctgcctgaggaaaatctgttagccagctcaagatagtcttgggaaaccaaggcatttccctttgggttggtaaggctggttttccgcttgacctggagtctgtgccaaatcctgaatgaaaggggccagtaaaacacagctcatctcttgctccagaatgatcttgttctgatggttgttgtaacaagctgcgataaagtgaggggaacagtactttgatcagccgtgggtcactgaaatactggaagggcaactggcagagctttttgcagcactgtggggtggcggccggactgcacgatcaccctggttatctgggtggttgacagtgaagtagcccacacagacgatgacctcatgaaggaggctttcacaggagacttggctgcagtggcccagcagggagctggccatgtgccggaatgcaagggacaagccctctgcccctacaatagactgaaaagcaggcagatgaagagctgcaaagctgttgaagaaacgtaaactctgaatggccacttggatggtattttgagtgtaattctccttgggactggcagtgctggggtccaagatggtgccatggaagaggacacagtagagcatatgaagaactccagccaggtcggttgcctgaagagcagctgtcagc

SEQ ID NO: 123704 - DNA, 439 bp, Homo sapiens; identical to SEQ ID NO: 122039

SEQ ID NO: 123705 - DNA, 269 bp, Homo sapiens; identical to SEQ ID NO: 122040
  misc_feature (1)...(269): n = a,t,c or g

SEQ ID NO: 123706 - DNA, 1126 bp, Homo sapiens
atgggcggcctcttctggcgctccgcgctgcgggggctgcgctgcggcccgcgggccccgggcccgagcctgctagtgcgccacggctcggggactatcatgggggtgtttgtggctgtgggcaccatccctgtcccttccagagtgccctgcatagaggcagacaccctgaagcctggagggccctcctggacccgggagcggaccctggtggcggtgaagcccgatggcgtgcaacggcggctcgttggggacgtgatccagcgctttgagaggcggggcttcacgctgggtggggatgaagatgctgcaggcaccagagagcgtccttgccgagcactaccagtgacctgcggaggaagccctttccaccctgcccttcatcccgctacatgagctctgggcctgtggtggccatggtctgggaagggtacaatgtcgtccgcgcctcgagggccatgattggacacaccgactcgggctgaggctgccccagggaaccattaagggggttgacttcagcgtccacatcagcaggaatgtcatccacgccagcgactccgtgggagggggcccagcgggagattccagctgtggtttccagagcagtgagctggtgagctgggcaagaccgggggccagcacagcagcattcacccaggcttgaggctcagagctgcccttaccaccccatcccccacgcaggacccaacctaccctccgttagcaagaaccccaagccccacatccaaacctgccctgtccccaaacccacttacttcccctgtttcacctctggccccaccccaggcccagagggagttttgagcccacccaacttcagtgccctttctgtacccccaagcccaggcacaagatttggaccaatccttttttgcaccaaagtgccgggacaaccttttgtggtgggggggggtcttcacaattatcataacctctcctcttaaggggaggcattaaaattccactgtgccccagcacatgggtggtacactaattatgacttcccccgagctctgaggtagaaatgacgcctttatgcaagttgtaaggagttgaacagtaaagaggaagttttgcacacccaaaaaaaaaaaaaaaaaaa

SEQ ID NO: 123707 - DNA, 1653 bp, Homo sapiens
atgtccacaccacagacagcctttggagtgatgtccactccggaaatcaaagccacagactctggagaggcatccacctctcacattaacatcacagcctctggatcaaagcccacatcgcacatgactgccacaactcctgaaactgcgaaaccaccaccaaaggaagtgccatccttcggaatgttgaccccagcactctgctacctcttagaagagcaggaagcagcccggggctcatgctctgtggaggaagagatggagattgatgaggagaagcaaatgaaggggtttttggacgattcagagagaatggcatttctggtatctcttcatctgggagcagcagagaggtggttcatcttgcaaatggaggtaggagaacctctctcacatgaaaataaatctttcctgagaagatcccagggcatatatgactccctatctgagatagacatcctcagtgctgttctttgccatcccaaacagggccaaaagtcagtcaggcagtatgccactgacttcctgctgctggcccgacatttgtcttggtctgatgccattctacggaccaggtttctggaaggactctcagaagctgttaccaccaaaatgggtcggatcttcctgaaggtggctggcagcctaaaggagctgatagacaggtctctgtacaccgagtgccagctggctgaagagaaggattccccaggcaactcaagccaggttctgccaacagcctgtaagcggaataatgaggaggccatggggaatgaactgagctctcagcagcagactgaggagcaccagcatgtttccaaacgctgttactacctgaaagagcatggagacccccaagaaggtcttcatgatcaccttggacagagcacaggccatcatcagaaggcccataccaacaacgtcgccgctacgaagaaagtggttcaacagctccagctggaggccgggctcaacagcgtaaaagtttcccaggcagctacagaacctcaaacgattatatctccaccgaatgctctacaggaaccctctggcattgaatgggagcaatttccaaaggcacaaatcccttcagaaccccaggaaaatctgtgtccttttgttagtacaatgaattctatcaaaggattacatgaggattaccaaggaaatgcaggcaaagtacttagcacagtgccaggtaggcggtatgccctccaaaatctgggcactgctattgttcagggagaggagaggaaacagtctagcctctgccctggtgaagagggaaaaagacatgagttgaggtctgggagtcacagcctggtgatgaagcatgcaatggtcctctttaatgtgggctttgagacaaaagatcagattcatctccccactaggttagggatggcagaagtggagaccctctgtatctatgccaagcagctgccccacaaactcattgcaaagctgagacttcttaaaggtaccagacctttgtctctgaacaatgaacacattttaacacacccaggtttggaaggatggttacatactgagttcttcagaatcctatcaatcaataacaaataccacctgagtgcctatttagtacaaagcattgtgctccacgtcatgggctttcatagaaaaacttga

SEQ ID NO: 123708 - DNA, 457 bp, Homo sapiens
  misc_feature (1)...(457): n = a,t,c or g
nnnnnttgtgtttgaaaggtcaactcccccaacactggagacagttcgttccaaacaggagtgggagacgagactgaatggagttcggataatgaaaaagaatgttcgtgaccaatttaatagtcatatccagttagtgaggaacggagccaagctgagcagccttcctcaaatccctactcccactttacctccacccccatcagagacttcatgcttcaggtgtttcaacccagtccctctctggctcctcggatgcccttctccattgggcagacaaactggagaagatcctggagaagctgctgacccggttcccacagtgcaataaggcccagatgaccaacattcttcagcagatcaagacagcacgtaccaccatggcaggcctgaccatggaggaacttatccagttggttgctgcacgactggcagaacatgagcgggtggcagcaac

SEQ ID NO: 123709 - DNA, 389 bp, Homo sapiens
  misc_feature (1)...(389): n = a,t,c or g
tctgcgtttatttaccaacgtaattaatattatcaaaactgttcttggaacacagcttaatccctcagcttttgtttttgatgctaggatgattagctctagaagaaaaaaattatacgccaagctgagcagccttcctcaaatccctactcccactttacctccacccccatcagagacagacttcatgcttcaggtgtttcaacccagtccctctctggctcctcggatgcccttctccattgggcaggcttgggcggtgttaaggcttctgctgaaaactccccggccccaaccagtaggacaaactgggaggaaggatccggggagnaaggctggctgnacccggttcccacagtgncaatnaagggcccaggatggaccaacat

SEQ ID NO: 123710 - DNA, 376 bp, Homo sapiens
gcaagtggagaatcagctccaagtgcaattaaagcagcttcagcaaaggagagaagaggaaatgaagaatcaccaggagatattaaaggctattcaggatgtgacaataaagcgggaagaaacaaagaagaagatagagaaagagaagaaggagtttttgcagaaggagcaggatctgaaagctgaaattgagaagctttgtgagaagggcagaagagaggtgtgggaaatggaactggatagactcaagaatcaggatggcgaaataaataggaacattatggaagagactgaacgggcctggaaggcagagatcttatcactagagagccggaaagagttactggtactgaaactagaagaagcagaaaaagag

SEQ ID NO: 123711 - DNA, 942 bp, Homo sapiens
atggctcactacagccttgacctcctgtgctcaagtgacccttccacatcagcctctgtagatgagactacagttggtttttcagcagacctgcagagggcacaggggaagtgttcctttggcccctgcagcaccacaggaccccaggtcctgtctgtggtcgtggtggtaacgggtgccagcctggaccagtcctgcatcgtggagcttcactctggacattctaaggggcagactgtggctggggcgtccagcacataccgggacctccggaagggtgtgtatgtgccctacacccagggcaagtgggaaggggagctgggcaccgacctggtaagcatcccccatggccccaacgtcactgtgcgtgccaacattgctgccatcactgaatcagacaagttcttcatcaacggctccaactgggaaggcatcctggggctggcctatgctgagattgccagggagccggcgagatttcaaacggaggaactgtcgcctggcagtccgattttcacttcttccctcagtccccgcccacactcgagcgcatcacgctcgttggctcgagagcgtgcctcgggtcccccgccacgctcgctcccttccccgccgcccaacccctccctcgatgaggtcctcaactatcccccaccccggaaggctccgggcgaggctccgggcgaggctctgggcgaggcgcagctcccccagcgccacccaacacccacccgctcccccagcttccagggacgccggggtgttgccctgcagcgcgcaacaaacacttccggaaaaggaccccagttcccaccaactctccccatggcagctcccatgctgcagcctgatgaagcaggtcgcctgggaaactgctgccacacacagacctgctcagagcacctccccaacctgcagagcagttggccacaccaaatgtga

SEQ ID NO: 123712 - DNA, 614 bp, Homo sapiens
ggaattcagtgcaataaggcccagatgaccaacattcttcagcagatcaagacagcacgtaccaccatggcaggcctgaccattgtagtttcttatccagttggttgctgcacgactggcagaacatgagcgggtggcagcaagtactcaaccacttggtcgcatccgggccttgttccctgctccactggccccaaatccggtcccccaatgttcttgccttctgccccaagtttcatatcctggaaggtcttcacatgctccagccacctgtaagctatgtctaaattgtgccagaaactcgtccagcccagtgagctgcatccaatggcgtgtacccatgtattgcacaaagagtgtattcaaattctggcccaaaaccaacacaaatgacaactttgtcctttttgttccacactctaaaatgacggacctgactggggaggaagaagaagagaaactgatgtgaacaggaagcgcgggttcaagatttctaaaactctatatttatacagtgacatatactcatgccatgtacatttttattatataggtaatgtgtgtatagaaagtctgtattccaatgttcgtaaatgaaactatgtatattatgc

SEQ ID NO: 123713 - DNA, 720 bp, Homo sapiens
atggagagtggtgaggaggagcacttcatgaagaaaagcgtgaactgtgaaattcttgaatttgcccgggagattggtattgatcccatcaaggaaccagaactgatgtggctggcgcgagagggcatcgtggccccactgcctggagagtggaaaccatgcaccacaggaccccaggtcctgtctgtggtcgtggtggtaacgggtgccagcctggaccagtcctgcatcgtggagcttcactctggacattctaaggggcagactgtggctggggcgtccagcacataccgggacctccggaagggtgtgtatgtgccctacacccagggcaagtgggaaggggagctgggcaccgacctggtaagcatcccccatggccccaacgtcactgtgcgtgccaacattgctgccatcactgaatcagacaagttcttcatcaacggctccaactgggaaggcatcctggggctggcctatgctgagattgccaggctttgtggtgctggcttccccctcaaccagtctgaagtgctggcctctgtcggagggagcatgatcattggaggtatcgaccactcgctgtacacaggcagtctctggtatacacccatccggcgggagtggtattatgaggtgatcattgtgcgggtggagatcaatggacaggatctgaaaatggactgcaaggagattcttatgtatgttaaattagaatag

SEQ ID NO: 123714 - DNA, 1172 bp, Homo sapiens
tcagtgccttaagatggtctttcccaaggagcatcccccaagccttcaaatttgccttccagtttagacaggaagctggcctctgcctttagggccgtatgaggactcactccttgtctctttctgccaaagcctgacgactccctggagcctttctttgactctctggtaaagcagacccacgttcccaacctcttctccctgcagctttgtggtgctggcttccccctcaaccagtctgaagtgctggcctctgtcggagggagcatggtgagtaggtcctcagagaggggaggtcctggcattgagggagagatgggtgccatcctcttcccctttcctgaaagctacaccacagtttttggctcccgataattaagaatcagggaggaacctctttatattccctacccttactttatttttccattcttttcttttttgcgttattccagaaaggaatcaaggcacctatggtaaacttggaaaggaaggcaattaggaaaatttcaaaggaaatgaaaataagacctgttgaattaaaattattcagtttgatggtcagaaggcagagatataagaagtttgtctatttattaattaattagaacaatggtgaatggttctccaataagcagagaaaataaaacttataatataaacaaataaccattcattcaacatttattgtggcagtttagatttaaataactttatatcaagggctgtatgattctgaaacaaataattaaaaatcccggaaagtcttttctcctgaacacatttaagaaactagaaatcactttgggtatgatttgtttagaagcaggaagatgaaaagggtagcctgtagaagaccttgccaccccaagaaatcactgatcttattgcttggtccttgggggactcactctccttctgtgccaggacacgggtacctgcctctttttttccctagatcattggaggtatcgaccactcgctgtacacaggcagtctctggtatacacccatccggcgggagtggtattatgaggtcatcattgtgcgggtggagatcaatggacaggatctgaaaatggactgcaaggaggtaataaaaccaagggagagcctgggaacataagggggtaggcagtacaatgtgaaggaagaactctggttatcatgtt

SEQ ID NO: 123715 - DNA, 2454 bp, Homo sapiens
atgggcctggcagggacaggtgggcctgatggccagggcacaggggggccgagctgggctgtgcacctggaaagcctggaaggtgacggggaggaagagactctggagcagcaggcggatgccttggcccaggcagcagggctggtgaatgctggacgcatcggagagcttcaggggcactacctctttgtccagcctgctgggcacaggccggccctggaggtggaggccatccggcagcaggtggaggctgtgttggctgggcatgaagctgtgcgctggcactcagagcagaggctgctaaggcgggccaagcgcagcgtccacttcaacgaccccaagtacccgcagcaatggcacctgagccctgagggtagctatgacctcaactctaatgaccctgaccccatgccccacccggatgtggagaatggcaaccaccatggcacgcgatgtgcaggagagatcgcggctgtgcccaacaacagcttctgtgccgtgggcgtggcctacgggagccgcatcgcagaaggggtggagagggtgactgatgtggctgccttacaacatggggtgattgctggtcgccagggctttgggagcatctttgtggtagccagtggcaacggaggccaacacaacgacaactgcaactacgatggctacgccaactccatctacaccgtcaccataggagctgtggatgaggagggacgcatgcctttctatgcagaagaatgtgcctccatgctggcagtcaccttcagtggtggggacaagatgcttcggagcattgtgaccactgactgggaccttcagaagggcactggctgcactgagggccacacagggacctcagctgcagcgcctctggcagctggcatgatagccttaatgctgcaggtgcggccctgcctcacgtggcgtgacgtccagcacatcattgtcttcacagccacccggtatgaggatcgccgtgcagagtgggtcaccaacgaggcaggcttcagccatagccaccagcacggtttcggcctcctcaacgcctggaggctcgtgaatgcagccaagatctggacatctgtcccttacttagcatcctacgtcagtcccgtgttaaaagaaaacaaggcgattccgcagtccccccgttccctggaggtcctgtggaatggcattgaggcatctggcaactgcttgcttgtcactaaaaaagaggtgtgggaaatggaactggatagactcaagaatcaggatggcgaaataaataggaacattatggaagagactgaacgggcctggaaggcagaggtgagaagaggagctgatatcttgaaagtcttagtttcaggcttccagatggtatctacttttggcattgtaataggagagccaatcttatcactagagagccggaaagagttactggtactgaaactagaagaagcagaaaaagaggcagaattgcaccttacttacctcaagtcaactcccccaacactggagacagttcgttccaaacaggagtgggagacgagactgaatggagttcggataatgaaaaagaatgttcgtgaccaatttaatagtcatatccagttagtgaggaacggagccaagctgagcagccttcctcaaatccctactcccactttacctccacccccatcagagacagacttcatgcttcaggtgtttcaacccagtccctctctggctcctcggatgcccttctccattgggcaggtcacaatgcccatggttatgcccagtgcagatccccgctccttgtctttcccaatcctgaaccctgccctttcccagcccagccagccttcctcaccccttcctggctcccatggcagaaatagccctggcttgggttcccttgtcagcccccacggtccacacatgccccctgccgcctccatcccacctcccccaggcttgggcggtgttaaggcttctgctgaaactccccggccccaaccagtagacaaactggagaagatcctggagaagctgctgacccggttcccacagtgcaataaggcccagatgaccaacattcttcagcagatcaagacagcacgtaccaccatggcaggcctgaccatggaggaacttatccagttggttgctgcacgactggcagaacatgagcgggtggcagcaagtactcagccacttggtcgcatccgggccttgttccctgctccactggcccaaatcagtaccccaatgttcttgccttctgcccaagtttcatatcctggaaggtcttcacatgtaagactctttttctttgaacactgtgatatggagaagctggagcccaagaaccagcctgggtacccacgtaccattaggagcggggaggggaagaacaggataggggaaaaagatgaccttcatcaaggagctcttgtggtggaggacataaggaagccctga

SEQ ID NO: 123716 - DNA, 2914 bp, Homo sapiens
atggcccaagccctgccctggctcctgctgtggatgggcgcgggagtgctgcctgcccacggcacccagcacggcatccggctgcccctgcgcagcggcctggggggcgcccccctggggctgcggctgccccgggagaccgacgaagagcccgaggagcccggccggaggggcagctttgtggagatggtggacaacctgaggggcaagtcggggcagggctactacgtggagatgaccgtgggcagccccccgcagacgctcaacatcctggtggatacaggcagcagtaactttgcagtgggtgctgccccccaccccttcctgcatcgctactaccagaggcagctgtccagcacataccgggacctccggaagggtgtgtatgtgccctacacccagggcaagtgggaaggggagctgggcaccgacctggtaagcatcccccatggccccaacgtcactgtgcgtgccaacattgctgccatcactgaatcagacaagttcttcatcaacggctccaactgggaaggcatcctggggctggcctatgctgagattgccaggcctgacgactccctggagcctttctttgactctctggtaaagcagacccacgttcccaacctcttctccctgcagctttgtggtgctggcttccccctcaaccagtctgaagtgctggcctctgtcggagggagcatgatcattggaggtatcgaccactcgctgtacacaggcagtctctgggtatacacccatccgtcgggagtcgtattatgaggtcatcattgtgcgggtggagatcaatggacaggatctgaaaatggactgcaaggagtacaactatgacaagagcattgtggacagtggcaccaccaaccttcgtttgcccaagaaagtgtttgaagctgcagtcaaatccatcaaggcagcctcctccacggagaagttccctgatggtttctggctaggagagcagctggtgtgctggcaagcaggcaccaccccttggaacattttcccagtcatctcactctacctaatgggtgagggtaccaaccaatgctttccgcatcaccatccttccgcagcaatacctgcggccagtggaagatgtggccacgtcccaagacgactgttacaagtttgccatctcacagtcatccacgggcactgttatgggagctgttatcatggagggcttctaccgttgtctttgatcgggcccgaaaacgaattggcttgcttgtcagcgcttgccatgtgcacgatgagttcaggacggcagcggtggaaggcccttttgtcaccttggacatggaagactgtggctacaacattccacagacagatgagtcaaccctcatgaccatagcctatgtcatggctgccatctgcgccctcttcatgctgccactctgcctcatggtgtgtcagatggcgctgcctccgctgcctgcgccagcagcatggaatgactttgcctgatgacatctccctgctgaaagaggtgtgggaaatggaactggatagactcaagaatcaggatggcgaaataaataggaacattatggaagagactgaacgggcctggaaggcagaggtgagaagaggagctgatatcttgaaagtcttagtttcaggcttccagatggtatctacttttggcattgtaataggagagccaatcttatcactagagagccggaaagagttactggtactgaaactagaagaagcagaaaaagaggcagaattgcaccttacttacctcaagtcaactcccccaacactggagacagttcgttcccaacaggagtgggagacgagactgaatggagttcggataatgaaaaagaatgttcgtgaccaatttaatagtcatatccagttagtgaggaacggagccaagctgagcagccttcctcaaatccctactcccactttacctccacccccatcagagacagacttcatgcttcaggtgtttcaacccagtccctctctggctcctcggatgcccttctccattgggcaggtcacaatgcccatggttatgcccagcttgggcggtgttaaggcttctgctgaaactccccggccccaaccagtagacaaactggagaagatcctggagaagctgctgacccggttcccacagtgcaataaggcccagatgaccaacattcttcagcagatcaagacagcacgtaccaccatggcaggcctgaccatggaggaacttatccagttggttgctgcacgactggcagaacatgagcgggtggcagcaagtactcagccacttggtcgcatccgggccttgttccctgctccactggcccaaatcagtaccccaatgttcttgccttctgcccaagtttcatatcctggaaggtcttcacatgtaagactctttttctttgaacactgtgatatggagaagctggagctcaacatcctggtggatacaggcagcagtaactttgcagtgggtgctgccccccaccccttcctgcatcgctactaccagaggcagctgtccagcacataccgggacctccggaagggtgtgtatgtgccctacacccagggcaagtgggaaggggagctgggcaccgacctggtaagcatcccccatggccccaacgtcactgtgcgtgccaacattgctgccatcactgaatcagacaagttcttcatcaacggctccaactgggaaggcatcctggggctggcctatgctgagattgccaggtgcagccagtgcccttctgaaggtcccagtcagtggtcacctggaagtgaaacaggaaaaggaagtaggttagagactgagttcaagctggggacagtggtgtgcacctatagtcccggctacctgggaggcccaggcaggaggattgcttga

SEQ ID NO: 123717 - DNA, 947 bp, Homo sapiens
atgtctgctaaagagaaaggaaaatttgaaaatatggcaaaggcggacaaggtccattatgttagagaaatgaaaacctatattcctcctaaacaggagacaaaaaagaagttcaaggatcccaatgcacccaagaggcctcccttcagcctgagtactgcccaaaaatcaaagggagaacatcctggccagtctactggtgatgttgcaaagaaactgggagagatgcggactaacagtgctgcagatgacaaatggccttatgaaaagaaggctgcaaagctgaaggaaaaatacagaaaggatactgctgtatatcgagctaaaggaaagcctgatgcagcgaaaaagggagatgtcaaggctgaaaaaagcaagaaaaggaagaatgagaaagatgaagaggatgaggaagaggatgaggaggaagatgaagaggatgacgataatgaatatgctgataatgaatgcactggttttagtggttttgtctataaaacatttaactcccctgtacacaactcactctttttaaatgtagaaatccatgctttaggattcgacgaactcttggaaagcattttctgcatcctgctagttgtggaagtgttttccctgcaaaaaggtgtcgcaatgcttgaagaagtcgtagtcaatggagagaggtcagggagaagtttaccatggctgcctgcggccccttcacttccggtgccggtgccgctagggctgcgccatccccccagtcaatcggacaaccatagcctccaactgacctttctgacagctctgagactcctccggccacgactaggtgctgtcctggaggaaacggtggaggacggccgcacaaaaaccaatctacctgatgaaaactccgttcccttctcgccagaaacataaaatgccgatggagctacggccaccgctgccgagacaaaatggcg

SEQ ID NO: 123718 - DNA, 733 bp, Homo sapiens
tttcgtgcggagagagtgaggaggctgcgtctggctcccgctctcacagccattgcagtacattgagctccatagagacagcgccggggcaagtgagagccggacgggcacctgggcgactctgtgcctcgctgaggaaaaataactaaacatgggcaaaggagatcctaagaagccgagaggcaaaatgtcatcatatgcattttttgtgcaaacttgtcgggaggagcataagaagaagcacccagatgcttcagtcaacttctcagagttttctaagaagtgctcagagaggtggaagaccatgtctgctaaagagaaaggaaaatttgaagatatggcaaaagcggacaaggcccgttatgaaagagaaatgaaaacctatatccctcccaaaggggaggacaaaaaaagaagttcaaggatcccaattgcacccaagaggcctccttcggccttcttcctcttctggctctgagtatccgccccaaaaatcaaaggagaacatcctgggcctgtccattgggtgatgttgcggaggaaactggggaggagatgtgggaataacactgctgcagatgacaagcagccttatgaaaagaaggctgcgaagctgaaggaaaaatacgaaaaggatattgctgcatatcgagctaaaggaaagcctgatgcagcaaaaaagggagttgtcaaggctgaaaaaaggtcgacgcggccgcgaattccagatcta

SEQ ID NO: 123719 - DNA, 507 bp, Homo sapiens; identical to SEQ ID NO: 117656
  misc_feature (1)...(507): n = a,t,c or g

SEQ ID NO: 123720 - DNA, 594 bp, Homo sapiens
ctgctgtcggcagatctgagctttcttcttggacaccttacacccacagtcctccaggtgccaatgtagggcatctgttcccttggcacacccgactgccgtggggtgtcccagcagaaggtcatcaacctactggagcaacacgcagcctaggtctctgctgggaaacttctggaggtctcgagcccacgcctccccgaagatggtgggggagttcttgaacccttgtggaagcccggtccaagtgtactgagtagtgacacctgactccggatcttcccactgaaaggcaaacagcttctgcctctctggggctaatctgataggaaagaaagcgtctttcgggtccaagcaggtgaacccgctgtccttagctggcagcaaacccaacaatgtggtcgggttaggtactgttggatggaaagtcagtgtagcttgatgaagcaagcgcaaatcctgtacctgactgtagtccttggtccgtggcttgggaaaaggcaggaggagagtgttgcatggagactgacaaggaacaataattccaaaagttcttaggtgcttgagacggacctggataccttgaagggcttctct

SEQ ID NO: 123721 - DNA, 1821 bp, Homo sapiens; identical to SEQ ID NO: 117658

SEQ ID NO: 123722 - DNA, 1711 bp, Homo sapiens
atggtgttggagaaacttgatttccacatgcagaagaatgaaggtggactctatgtcacaccagcccctggagattatattcggatcaatatcaccggctgggtttacaactactgcgatattggacgtaatatcatgctctctccctccctggacattaggagcaatatcacagctcctttacggcccaaaacggggatacaaatgtccccgagagaacagcggtatactgggatagatgaggatggtcacgtggtggagaggcgtgtttttggctaccagcccttcacctccgtcgaccttctcaactggaaaagcaatacaccgccctataccgaaaagccacaagccctaattgatttgctccaaactgttatccagacccacaaccacacctgggctgattggcaccagttgctcatgttcctctttaacagcgaagaaaggcggagagtcctccaagcagcaactaagtggctggaggaacatgcaccagctgattaccaaaacccccaagagtatgttgatgaccttctgctgggacaccccacggcagtcgggtgcaccaagggaacagatgccctacaccggcacctggaggactgtgggtataaggtgtccaagaagaaagctcagatctgccgacagcagccttgggcatcagtagactgggaactatacgtggatgggaacagcttcttcaacccccaaggagagagaggtgcagggtgtgcagtggtaaccctggacactgttgttgaagccagatcgttgccccaggccactgcagcccagaaagctgaactcattgctttcattggggccttagaactcagtgaagatctgattcctagatttcgactgcccttacggatcggctcacataacgggcctgcgtttttggctgccatggtacagaagacggcaaaggaaatgactaacaaggtcacgggggagtgtactccccctgcaatactggcagtaatctcgtcctccccaaacctggatgtgagcgacaagatcacagagggggtgtacacaccctgcgacattggaagtaatatgatcctctccccacctggatattgggaaagatatcacagcgcggaggatccagaactgcagcccatcctcgctgggctgtccctgtccatgtatctggtcacggtgctgaggaacctcctcatcagcctggctgtcagctctgactcccacctccacaccccaatgtgcttcttcctctccaacctgtgctgggctgacatcggtttcacctcggccacggttcccaagatgattgtggacatgcggtcgcatagcggagtcatctcttatgcggactgcctgacacggatgtctttcttggtcctttttgcatgtgtagaagacatgctcctgactgtgatggcctatgactgttttgtagccatctgtcgccctctgcactacccagtcatcgtgaatcctcacctctgtgtcttcttagtttcggtgtccttttccttagcctgcattggcgtgtacctgacttcagctgtggcaccacccctcaggaatggtgtggtggcgtcagtgacgtatgctgtggtcacccccatgctgaaccctttcatctacagcctgagaaacagggacattcaaagcgccctgtggaggctgcgcagcagaacagtcaaatctcatgatctgttccatcctttttcttgtgtgg

SEQ ID NO: 123723 - DNA, 575 bp, Homo sapiens
tagcttatatattacatatgcctataagtattggttgaataaatgaatgaatgaatgaattcagagagtccatgtgtttagaagcaggccacacagcatctaaaggtagaaaaacctctggatcaacaggatggcaaatctgtggtaaccatgcctgtgttcccactcctgcacccagggcagacatcactaatcaatcccagcattgtttccaatgagcagcactcagagtccttgctccccgctgaagatctgtatctagagaggagcatgccatggtccctggcaacacccctgatctcagcccttccctgtaacttcccacagcctcaatcctggtcctctggatgctccaaggctcccaggcagctctctacatccagaagattccagagcagcctcaaaagaaccaggaccttctcctgtcagtccagggtgtcccagacaccttccaggacttcaactggtacctgggggaggagacgtacggaggcacgaggctatttacctacatccctgggatacaacggcctcagagggatggcagtgccatgggacagcgagacatcgtgggg

SEQ ID NO: 123724 - DNA, 1218 bp, Homo sapiens
atgaataattgtcttgccaaaaatgtcaatgccagttgtgtctgctcagctgacgatcacatccatccctccctgggccgtcgagggggcaacgtcaccctgtctgtccaggggatccctcagaatctcatctcctacaattggctccgaggagcaaccaccaatcaggttacccggatcctcaattttaacttcttcagccatggctacaccctaggaccagcccacactggcagggaaacaggcagagctgatggctccctgatcattattgatgtgcgtgcatctgacaatggcatctacaccctgcatctcatctcttctggtgaaaacagttgccatcatgctatgctacttgtctctgctcgtggccccttggcatttccacaagacgccaagatggagattcccatggggacccagggctgcttctcaaagagcctcctgctctcagcctcaatcctggtcctctggatgctccaaggctcccaggcagctctctacatccagaagattccagagcagcctcaaaagaaccaggaccttctcctgtcagtccagggtgtcccagacaccttccaggacttcaactggtacctgggggaggagacgtacggaggcacgaggctatttacctacatccctgggatacaacggcctcagagggatggcagtgccatgggacagcgagacatcgtgggcttccccaatggttccatgctgctgcgccgcgcccagcctacagacagtggcacctaccaagtagccattaccatcaactctgaatggactatgaaggccaagactgaggtccaggtagctgaaaagaataaggagctgcccagtacacacctgcccaccaacgctgggatcctggcggccaccatcattggatctcttgctgccggggcccttctcatcagctgcattgcctatctcctggtgacaaggaactggaggggccagagccacaggatggcgaccacagagaagccagaattgggccctgctcatgatgctggtgacaacaacatctatgaagtgatgccctctccagtcctcctggtgtcccccatcagtgacacaaggtccataaacccagcccggcccctgcccacacccccacacctgcaggcggagccagagaaccaccagtaccagcaggacctgctaaaccccgaccctgccccctactgccagctggtgccaacttcctga

SEQ ID NO: 123725 - DNA, 698 bp, Homo sapiens
gagggtggcctgcggactccttcaaacccatatcatgttgatatttcccagacaaaaccctgccattgaaccaatcactgcattcaaaaagagtattcaaagaactacgggaagtatgaagaaggaaatgaaatgttcttcaaggagttcaatcagtacctaacaagtgctttgaacattaccctagaaagtagtatcttactacaaatcaaacatataataaggaactgcctcctgagcgtggagcctgccattagcaccaagcacctcccttagccagagcttccagctcttcggctttgacttcatggtcgatgaggagctgaaggtgtggctcattgaggtcaacggtgcccctgcatgtgctcagtaagcctgcacgtcattgtgtttttacaagtgggaagttggttctgcagttgggatagtctgtgggtacaagtgtagtcactttgactgctgtgagggaggatgccacagtgataggagacccttgggaggactctatctggcagggggctttgctgagtcacttcctttcctatttccccgtgtataggccagataggcccagtgtggtagctcatgcttgtaatcccagcactttgggaggccaagacaggtagactgtcaggtagactgtctgagcccaggagttcaagaccagcctgggcagcctggcaaaaccccatctctac

SEQ ID NO: 123726 - DNA, 534 bp, Homo sapiens
atggtgggagtggacgtcactttcaaggtgatcagccgtgaagagcggcaaacacagcgtcttggctcgagttcccccaaacggtgccccctggaacaagaatttgagcacgagtacagtagtttttttgggaggaactgcctcctgagcgtggagcctgccattagcaccaagcacctcccttaccagagcttccagctcttcggctttgacttcatggtcgatgaggagctgaaggtgtggctcattgaggtcaacggtgcccctgcatgtgctcagtccccagccaagtccttattgccacctccagcagcctctttctgtccccacccccttggacctgtcagcagcattcgaggcaaccgacagcacttgctgagctgctctcctgtcatggctggacacgtggtgctgggcaggcttgcctgtgggcctttgtgctttctgttacctgtgtgtggaatccccaccaccattaccaccaccaccaccagccttaccgtggctggcttcttctttaccaaaacatcttga

SEQ ID NO: 123727 - DNA, 906 bp, Homo sapiens
atggaccctcgtcctgagtcgagcgcctccaccagggccctcagagctgccctgatcctgacagctgtcactggtgacagtctcccgatcaacaccagtggcctctttattgacaaaaaaggtctaacctgggctctacctacttctgagtctctttgccctgacccaaaatctaccctccctggtcctctttctggccaaaccatgtcaatcaattgccaggagccttgtactccacagcgctgtcatttctctgcaaactcccagatgatgtgggaaactgcaaaatcctctcatcaaattctctttaccagcatacacaaagattccatcacttgtgatcgacgtcttagtcactattcttccatacggagggactcttgtgaccagactgtcctggggcagtgcctggtgccatggctcaaggcacagttctgctggggctggtgctgctgccatccaggggtgagaaatgtgacccagccacctgagatccatgtccagaagagctgcaatcaggtgacctggaaatctgacttgcaccgtatcatgggccggaagccctctggctacagatgtgtgagtgaaaagcaggagggcttctggccccggttctcacctgatcagggggccatcctgggcactggcttccccccaaccccatggcctcacctggagctactactccagtgggggaaggagactccagtatgcatccctcagcttccagatggtgaagccttgggactcgcggggacaggaggccactgacaccgagtgctcggagatcaagatccacagatgagaaactgcagagactcaccctgattgagggatcacagcccctccaggcaagggagaagtcagaggctgattcttgtagaattaacagccctcaacgtatga

SEQ ID NO: 123728 - DNA, 1141 bp, Homo sapiens
  misc_feature (1)...(1141): n = a,t,c or g
atggaaaatagacgcaaagtaaaaggtgagtggatcgcagtaccccagccagtaaaggagctgcgaggcgttctcaacgccgcgactaccttgagtaaaacgagggagatcttgcggggaaagtgttttcagctcacttctcctacagggaatgagccctctcacctatcgtggacaccgaggaaacgcagcagagatgggcacccaggctgcccagatcctctggcagcctcgggtgctcgtccacttcgctcctcctccgcctttgctgccgcagccgcagattcagggagtacagtgcaggtttgggacaagggtgtattgcgtgttgctgatgtctggagtacgattgaacccgtcacccatgtgaatcttggttgggcggcaaaagtgggtccaatcattagtcatgggagcgctgtgatctcagctttctctaaagaaggaatgtttagaattttttccgaacgaaagacgcttctggcgaaactccgagactttcaaaatacacagttgagaaaattattttcagagatggaaaaagccgctggtcgctctcaaagcggtgtcagttttggacaaaaaggactgggcgacagagcgtgtgaggagatgagtgaaaacccccaaaaaggaaggaaaaagccaaaagccccccaggaggtttccttcagggagaatgggaattggaagaccccattctatcttcttttctcccaaaaccccaaggaaaaagaaatctttttcccaaggaggagttgatgagttagcgatccttgaagagacccgctggcaagcaccaagtattcccaagaggaagaagtctacacccaaggaggaaacagttaatgaccccttggaaggcaggccacaaaaagtggctccaagaaaaagaggaaattctccaaaggaggagccggtcaagcagtgggcctgaagaggcggctggcaagagcagctccaagaagaagaaaaagttccataaagcatcccaggaagattagaatgcaaatggacattctctgggaggtggggcataccatagcccaaggtgctcatttcccaccctgtgccgtggtccccaataaaaacaaatttcccagaaaaaaaagaaaaaaccccgnggggggccggtaccatt

SEQ ID NO: 123729 - DNA, 2745 bp, Homo sapiens
atgcttctggaaacacaagatcaagttgtctcctcgccaaagagaaaaacataccaagaaatgcctggtgttatcctctacactaagctggattcatgccgtaagtcgggcaaacgcccacctgaagactatgcaggcaatcaggacatgacacagagccgggagaggcctgctcttcggctctgccttgaacttcattcggcagctgaaatattcggattgacctctgcggaagccagtaaggatatacggcaggcattgaagagtttcgcggggaaggaagtggttttttatcgccctgaagaggatgccggcgatgaaaaaggctatgaatcttttccttggtttatcaaacgtgcgcacagtccatccagagggctttacagtgtacatatcaacccatatctcattcccttctttatcgggttacagaaccggtttacgcagtttcggcttagtgaaacaaaagaaatcaccaatccgtatgccatgcgtttatacgaatccctgtgtcagtatcgtaagccggatggctcaggcatcgtctctctgaaaatcgactggatcatagagcgttaccagctgcctcaaagttaccagcgtatgcctgacttccgccgccgcttcctgcagcacgccatagtgactggcgatgctgtcggaatggacgatatcccgcaagaggcccggcagtaccggcataaccaagcctatgcctacagcatccagggtgacggtgccgaggatgacgatgagcgcattgttagatttcatacacgggtcaccgtcgacagcgacacacttgcatcggatgcagcccggttaacgtgccggcacggcctgggtaaccaggtattttgtccacataaccgtgcgcaaaaggtggggatcctctacatccttaaggggggggcagccggccgctgccaaaacgcccaaggaacagtagctgaaaacaacggctatcacgttgtgtttgctccggcgggaagcccgaaagacgctgatgccacatcaatctacatgttttatcaaaaggtcggcgacaactcaatcgacagctggaaaaacgcgggccgtgtctttaaagacagcgataagttcgacgccaacgatccgatcctgaaagatcagacgcaagaatggtccggttctgcaacctttacatctgacggaaaaatccgtttattctacactgactattccggtaaacattacggcaaacaaagcctgacaacagcgcaggtaaatgtgtcaaaatctgatgacacactcaaaatcaacggagtggaagatcacaaaacgatttttgacggagacggaaaaacatatcagaacgttcagcagtttatcgatgaaggcaattatacatccggcgacaaccatacgctgagagaccctcactacgttgaagacaaaggccataaataccttgtattcgaagccaacacgggaacagaaaacggataccaaggcgaagaatctttatttaacaaagcgtactacggcggcggcacgaacttcttccgtaaagaaagccagaagcttcagcagagcgctaaaaaacgcgatgctgagttagcgaacggcgccctcggtatcatagagttaaataatgattacacattgaaaaaagtaatgaagccgctgatcacttcaaacacggtaactgatgaaatcgagcgcgcgaatgttttcaaaatgaacggcaaatggtacttgttcactgattcacgcggttcaaaaatgacgatcgatggtattaactcaaacgatatttacatgcttggttatgtatcaaactctttaaccggcccttacaagccgctgaacaaaacagggcttgtgctgcaaatgggtcttgatacaaacgatgtgacattcacttactctcacttcgcagtgccgcaagccaaaggcaacaatgtggttatcacaagctacatgacaaacagaggcttcttcgaggataaaaaggcaacatttgcgccaagcttcttaatgaacatcaaaggcaataaaacatccgttgtcaaaaacagcatcctggagcaagggctgctgacacccgcagttggtgaacgtctgtcagagtcgcggcctatcgaacgtggggcgcagctcacggccttcgcactgctgcaggcccagctgcggggccaggacgcggccggccgcctgcaggacctcgcggctgggcccgtgggctccctgtgccgccgcgctgagcgatttagagacgccttcacccaggagctacgccgcggcctccgaggccgctcggggccaccaccagaaaatctagaagaaacggataaattcctggacacatacaccttcccaagactaaatcaggaagaagtggaatgtctgaatagaccaataacaaattctgaaattgaggcagtaattaatagcctaccaaccacaaaaagcccaggaccagatggattcacagccaaattctaccagaggtacaaagaggagctggatctgtcatggcggaaacagcggttatcaatacacaagaaacgtaaaaatagcccgcgaatcgtccagtcaaacgacctcactgaggcggcatatagtctctcccgggatcaaaaacgtatgctgtatctgttcgttgaccagatcagaaaatctgatggcaccctacaggaacatgacggtatctgcgagatccatgttgctaaatatgctgaaatattcggagtgacctctgcgaaagccagtaatgagtaa

SEQ ID NO: 123730 - DNA, 2242 bp, Homo sapiens
atggcagatatcccgcaagaggcccggcagtaccggcataagcaagcgtatgcttacagcatccagggtgaaggtgttgaggatgacgatgagcgcattgttagatttcatacacgctggccgctgcaaaacgctgacggaacagtagctgaatacaacggctatcacgttgtgtttgctcttgcgggaagcccgaaagacgctgatgacacatcaatctacatgttttatcaaaaggtcggcgacaactcaatcgacagctggaaaaacgcgggccgtggcttaaagacagcgataagttcgacgccaacgatccgatcctcaaagatcagacgcaagaatggtcaggttctgcaacctttacaggttctgtttttcttgccttcggatgttactcaaaatagtgaacaacctgccccagaagaaaatgatcaattacaatttgtgcttcaagaagagttttccagtgatgattcaacaacaaatgcacaatctgttatctttggaggctatgctttcttcaagttaacactctctaggagtcctttagtctcccaaccaggtaataaaggtagagaatttgtgccagatgaacaaaagcaaagtatccttccatctcccaaattttcagaggaagaaattgaacctttgcctcccacactagagaaaaagccctcagaaaatatgtccattcaagctagactctacatttaaacaaatgaaagatgaagatctacaatctgctattgtacaaccttctcaaatgcaaaccaagcttctgcaggaccaagctgcgtcactccaagtttttccatcccattctgcactaaacactcgaagatatatcacctgaagacttgccatcccaagctctaccagtagaaggcctgtcagaacaaaccatgccatctaagtctacatcatcccatgtcaaacagtcttctaatctgacagctaatgacctgccccctcaaggcatactatcccaagacacatcatctcaagatatgctgtttcatgacatgatttcttttagatatgcaatccctagatatgctatctgaagacacaccatcccacgccatgccacctcaagacataccttcccaagatatgctatcccaagctctatcagcgcatgccatattacctgaagcctcaacatcccatattgtgcagttccctgaaatacaacacctacttcagcagcccccagatcttcaaccagaaaacactgaacctcaaaaccagcaaattttacaaatgtcatatcaagatattagatcagaagttatgggaagagaccaaaggaatgggaaatctgaggagggaactccattaggaaggaaaatcctcaagacggcattccttaaaccagcaaaccaaaggccttgcaatacttaaggagacattctttagacgtgcaagccaaaggctagaaatcctcaaagaggcattccttagatcagcaaagcaaaggctggcaatctccaaagcagaaatccttagaccagcaaatcaaagactggctatccccaaagaggcactccggctggagaaacaaagattataaagcacgagaatggcaatttgaaatgaagcactggcaaacacaggatctattagagaaagaagccctaaagcagaaagctctataccaagaagtccaaacccagcacgcaacagcccaacataacctagaatgtcaagacactcaagataaagaccaacaagaccttcaatccagagttacacaaaaaggagatatgtacactagagacatcaaaccaggggacatgaaatgtatagggcaaacctcaggggacctgcaatcagaagacgtgaaggcagattttcattcttcttctggcccaaagcctcagtacaagacacatgtttagccctatttgtcccaatcctagattcaggaacaagatgtgcaacccagacacttcagcttcctcaaattcatataaagaagatgtgaatttaacctcctacttcatgtgatccaaaagatcaacagcaatctgaagactctgactaacatgcagaatctacccaataccacactgcccccattaatggaattaaattgggaaaaacaatattgcctcctccaatctgtgttctcaactgtggttgccacctcattaacttacaaaaaaatgaagggcatgctgagcactcaaacaatttgttcttacttaaaataaaatgacaacaaaccaaaaaaaaaaaa

SEQ ID NO: 123731 - DNA, 642 bp, Homo sapiens
gcggcaaggggctatttgatgatgaggacgaggagagtgacctcttcatggaagccccccaggatcggcaagctggagcctctgttaaggaggagtcttcatcatccaaacctggaaagaaaatcccagcaggagctgtttctgtatttttaggagacacggatgtgtttggtgctgcctccgttccatcactgaaggagccacagaagcctgagcagcccactccaaggaaaagcccctatggtccccctcccactggcctcttctttttctcggcaccccacagcaaaccttctaaaacacgcaaagtccaatccactgccgatatctttggtgacgaagaaggagatctgttcaaagaaaaagccgtagcatcgccagaagccactgtgagtcagacagatgaaaataaagcaagagcagaaaaaaaggttaccttatcttacagcaaaaatctcaagccctcatcagaaacaaaagactcaaaaaggcttattttcagatgaggaggactctgaggatttgttttcttctcaaagtgcgagtaacttaaaaggtgcatctctgctgcctggcaagctccccacgtcggtttcctggtttgatgatgaagatgaagaggataatcttttgggggtacag

SEQ ID NO: 123732 - DNA, 1422 bp, Homo sapiens
catgtagtcagggaagccggtcctcttacatactggctcagggctgtaggggagagtcctcagagagagcccgatggaggccatgtcgccttctgtgttccagccttggaagtcaacggtggtccttttccttcatttgttggtcaagatggtcacaatggcccatccaggtttatggggagaggccataggctccccttcttgatgggtgtctggggctcaccccctttgttcccaactcccttcggcggcattcaggctccaagtactgataccgctcggtataataagtataacagaacgagatcaccttacgcacgcacaaccctgactgtcagtaggattgaccagtgtttttcatcaacgccaacagcggtgcgtctccacctgagcagcaatctatctgcgatagagcgctcgaaaaaagagactgtctctgaggcaccacctttgctgttcagcgatgaagaagagaaggaggcacaacttggagtgaagtctgtggataagaaggttgagagtgccaaggagtcattaaaatttgggagaactgatgtggctgagtcagaaaaggaaggacttttgactagatctgctcaggaaacagtcaagcattctgatttattttcttcatcatccccatgggacaaaggaaccaagcctagaaccaaaactgttcttagcttgtttgatgaggaagaggataaaatggaagatcaaaacattatccaggctccacagaaagaagtaggaaagggctgcgatcctgatgcccaccccaagagcacaggtgtcttccaggatgaagagctgcttttcagccacaagctccaaaaggacaatgacccagatgttgacctttttgctggcaccaaaaaaaccaaggtacaagagaaaaagagagtagtgaaaaaagaccactctgttaactctttcaaaaaccagaaacatcctgaatccattcaaggtagtaaagaaaaaggcatatggaagccggaaacacctcaggcaaatttagcgatcaacccagcggccttgctgcccacagcggcttcccagatctctgaagtaaagcctgttttgccagaattggcttttccttcatctgaacacagaaggagccacggtctggaaagtgtgcctgtccttcccgggagtggggaggccggtgtgagttttgatcttccagctcaggcagacaccttacacagtgcaaacaaggcacaccaggtgccactccctgaacacacatggtctgttctgctgctgcccaaggctcctgctgcctcctcaccaggaatgcccctctctgtccacagctgtgcttccacatccccacttctgtcactgtgccctgcactccctgcaccaagttcccacagcagcgacactgtttcatgggatctcctcaatggactgtga

SEQ ID NO: 123733 - DNA, 3099 bp, Homo sapiens
atggttacccatcagcagcctgcagctagaaagccaaacatgacatctaagaaacctaaacccatgggacctaaagcccatgggatcttttcaggaactagaaaaaacaatcttgaaatttatatggaccaaacaagaaccggcatagccaaaacaaaactaagcaaaaacaacaaatctggaggcatgacattacctgatttcaaactatactataaggccatagtcgccaaaatagcatgtggtggttctatgtataattcagatacagatgaggatgaagaaactgagccttcttcttctgggcaacagataattgaaaattcaataactatgaataagatgaagctgctgaaggctaagatgaagaacatgaatctcagcaaaaagcacatcacacaagtgagtgatgaggaagaggatgatgatggctgtgacctttttgctgactctgagaaggaggagaaagatattgaggacattgaagaaaatactagacctaaaagaagcagacctacatcgtttgcagatgagctggctgcccgcatcaagggggatgccgtgggccgagtggacgaggagccgacaactgtgagttatgaggatgacagacgtggaaagaaccaggatgcgtatactgagggaggacttagtactattaaaactgtgaactgttcttcaagccttaccctcaggagaagcaaaacttcggaagacactcaagagaagaaggaaaggagaactccttcggacgatgaagaggataacttattcgcaccccccaagctgaccgacgaggacttctcgccatttggctctggaggtggcctgttcagtgggggcaaggggctctttgatgatgaggacgaggaggacatagaagaatcctctaaccctctctggagtggttacagcctgcgatgggcacgggagcccccgcagcagccagaaactcacactgttgtctccacgaatgagaaaccagaacaatggctgaaaggagagaactgggggtctgtctccactcctttacagaaaagaagcagacctacatcgtttgcagatgagctggctgcccgcatcaagggggatgccatgggtcgagtggacgaggagccgacaaatgaagaggataacttattcgcaccccccaagctgaccgacgaggacttctcgccatttggctctggaggtggcctgttcagtggcggcaaggggctatttgatgatgaggacgaggagagtgacctcttcacggaagccccccaggatcggcaagctggagcctctgttaaggagggtaagctggggctgggcagctgcgtctccgtgtgcagagttccaaaactgtctttctcactaggagatggaaccctgaggagacacggatgtgctgcctccgttccatcactgaaggagccacagaagcctgagcagcccactccaaggaaaagcccctatggtccccctcccactggcctgtttgatgatgatgatggtgatgatgataacgactttttctcgacaccccacagcaaaccttccaaaacaggcactgagaagccttttaggaaaatcgggatggattgtgaccttggagatacctcatcatatcacacaaaggtttccaccgtgcacattacgaagaacagaaatggaggtgggagtttaaataactattcctcctccattccatcgactcccagcaccagccaggaggaccctcagttcagtgttcctcccactgccaacacacccacccccgtttgcaagcggtccatgcgctggtccaacctgtttacatctgagaaagggagtgacccagacaaagagaggaaagccccggagaatcatgctgacaccatcgggagcggcagagccatccccattaaacagggcatgctcttaaagcgaagtgggaaatggctgaagacatggaaaaagaaatacgtcaccctgtgttccaatggcgtgctcacctattattcaagcttaggtgattatatgaagaatattcataaaaaagagattgaccttcagacatctaccatcaaagtcccaggaaagtggccatccctagccacatcggcctgcgcacccatctccagctctaaaagcaatgacctatccaaggacatggacaccgggctgggtgactccatatgcttcagccccagtatctccagcaccaccggccccaagctcaacccgcccccctctcctcatgccaataaaaagaaacacctaaagaagaaaagcaccaacaactttatgattgtgtctgccactggccaaacgtggcactttgaagccacgacatatgaggagcgggatgcctgggtccaagccatccagagccagatcctggccagcctgcagtcatgcgagagcagtaaaagcaagtcccagctgaccagccagagcgaggccatggccctgcagtcgatccaaaacatgcgtgggaacgcccactgtgtggactgtgagacccagaatcctaagtgggccagtttgaacttgggagtcctcatgtgtattgaatgctcaggtatccaccgcagtcttggcacccgcctttcccgtgtgcgatctctggagctggatgactggccagttgagctcaggaaggttatgtcatctattggcaatgacctagccaacagcatctgggaagggagcagccagggacagacaaaaccctcagaaaagtccacgagggaagaaaaggaacggtggatcctttccaaatatgaggagaagctctttctggccccactaccctgcactgatctgtccctgggccagcagctgctgcgggccaccgctgatgaggacctgcagacagccatcctgctgctggcacatggctcccgtgaggaggtgaacgagacctgtggggagggagacggctgcacggcgctccatctggcctgccgcaaggggaatgtggtcctggcgcagctcctgatctggtacggggtggacgtcatggcccgagatgcccacgggaacacagcgctgacctacgcccggcaggcctccagccaggagtgcatcaacgtgcttctgcagtacggctgccccgacgagtgcgtgtag

SEQ ID NO: 123734 - DNA, 2928 bp, Homo sapiens
atgaaggcagaaataaagatgttctttgaaaccaatgagaacaaagacacaacgcaccagaatctctgggacacatttaaagcagtgtgtacagggaaatttatagcactaaatgcccacaagagaaagcaggaaagatctaaaattgacaccctaaaatcacaattaaaagaactagagaagcaagagcaaacaaattcaaaagctagcaggaggcaagaaataactaagatcagagcagaactgaaggaaatagagacacaaaaatcccttcaaaaaatcaatgaatctgagagctggttttttgaaaagatcaacaaaattgatagattgttagtaagactaaagaatcaaatagatgcaataaaaaaagataaaggggatatcaccagcgatcccacagaaatacaaactaccatcagagaataccataaacacctctacacaaataaactggaaaatctagaagaaattgataaattcctggacacatataccttcccaggactaaaccaggaagaagtggaatctctgaagaaaccaataacaggctctgaaattgaggcaataattaatagcctaccaacaaaaaaagtccaggtccagatggattcacagccaaattctaccagggaaaaagagggaatcctccctaactcattttatgaggccagcatcatcctgataccaaagcctggcagacacacaacaaaaaaagagaattttagaccagtatccctgatgaacatctatgcgaaaatcctcaataaaatactggcacaccgaatccagcagcacatcaaaaagcttatccactatgatcaagtcggcctcatccctgggatgcaaggctggttcaatacaggcaaatcaataaatataatccatcacataaacagagccaatgacaaaaaccacatgattatcttaatagatgcagaaaaggcctttgacaaaatccaacagctcttcatgctaaaaactcttaataaactaggtattgatggaacgtatctcaaaataataagagctatttatgacaaactcacagccaatatcatagtgaatgggcaaaaactggaagcattccctttgaaaaccggcacaagacagggatgccctctctcaccactcctatttaacacagtgttggaagttctggccagagcaatcagacaggagacagaaataaaggatattcaattaggaaaagaggaagtcaaattgtccctgtttgcagatgacatgattatacatttagaaaaccccatcgtcccaacccaaaatctccttaagctgataaacaacttaagcaaagtctcaggacccaccggcctgaatctggaggacagcagtccgcgtgacaacagcgactcggagatcagcacccgtcgggaaagccgcgtacccgttgaagctggcgtcacgcccaaaggaacaaacgccagagcgtgtgtcctgggcaaaggcggcccgccgctccggtccccgggcagcagcggccggcgtcaggccgcaaggcgaggggcggggacaggactctacccggcagcccagcgccgagcgcccgcgccactccggccttgcgccattccggccccacgacggccggcggcggcagcgcggctgggctcagcggctcgcagcccgggcgccccccctgccggccgctcgctagctcagcctcacccgcagtcttgtccgctggctcgctcgcccgcctacaggtcgacagggcccaacgacccggcgagcaacttcacggaaggcactggccgacaacgctccgctgccgccgcgccccgcccctttgtgacaccacctaccaatcgctggacggcgctttcgctgccctccaatcagcgcgggcgggggcaggcctggcccccggacgtgggcggttgccggggcgccagggccctggggccttcttggcattcgctggaggttcgtgtatatgatgaagaagtggaggagccagtactcaaggctgaggcagaaaaaacagagcaggagaagacacgagagcagaaagaagtagatctcattcctaaagtccaggaggctgtgaactatggcttacaagtattggacagtgcctttgagcaacttgatatcaaagcaggaaactcagactccgaggaagatgatgctaatgggcgggtggaactgatccttgaaccaaaggatctatacattgatcgtcctttaccatatctcattgggtcaaagctgttcatggaacaagaagatgtaggtcttggagagctgtccagtgaagaaggctctgtaggcagtgatcgtggcagtattgtggacactgaggaagagaaagaagaggagagtgacctcttcacggaagcctcccaggatcggcaagctggagcctctgttaaggagggagacacggatgtgtttggtgctgcctccgttccatcactgaaggagccacagaagcctgagcagcccactccaaggaaaagcccctatggtccccctcccactggcctctttgatgatgatgatggtgatgatgatgacgactttttctcggcaccccacagcaaaccttctaaaacacgcaaagtccaatccactgccgatatctttggtgacgaagaaggagatctgttcaaagaaaaagccgtagcatcgccagaagccactgtgagtcagacagatgaaaataaagcaagagcagaaaaaaagcatgtagtcagggaagccggtcctcttacatactggctcagggctgtaggggagagtcctcagagagagcccgatggaggccatgtcgccttctgtgttccagccttggaagtcaacggtggtccttttccttcatttgttggtcaagatggtcacaatggcccatccaggtttatggggagaggccataggctccccttcttgatggtgggagtgtaa

SEQ ID NO: 123735 - DNA, 688 bp, Homo sapiens
acccaccggcctgaatctggaggacagcagtccgcgtgacaacagcgactcggagatcagcacccgtcgggaaagccgcgtacccgttgaagctggcgtcacgcccaaaggaacaaacgccagagcgtgtgtcctgggcaaaggcggcccgccgctccggtccccgggcagcagcggccggcgtcaggccgcaaggcgaggggcggggacaggactctacccggcagcccagcgccgagcgcccgcgccactccggccttgcgccattccggccccacgacggccggcggcggcagcgcggctgggctcagcggctcgcagcccgggcgccccccctgccggccgctcgctagctcagcctcacccgcagtcttgtccgctggctcgctcgcccgcctacaggtcgacagggcccaacgacccggcgagcaacttcacggaaggcactggccgacaacgctccgctgccgccgcgccccgcccctttgtgacaccacctaccaatcgctggacggcgctttcgctgccctccaatcagcgcgggcgggggcaggcctggcccccggacgtgggcggttgccggggcgccagggccctggggccttcttggcattcgctggaggttcgtgtatatgatgaagaagtggaggagccagtactcaaggctgaggcagaaaaaacagagcag

SEQ ID NO: 123736 - DNA, 1008 bp, Homo sapiens
atggccagaccagcgctcggcagctcctccaaccgcatgggcggcctcgtagtcgccgtctgcgaggcgccgtccgagtgccgaatcgatggtcccccgcgaaccgctgtgataccgcccctctgccgcgaccagcgccgcgacgcctgcgatctcacctgcacgcgccttgggcgccggggcaccttgccctctgttccggcgacgcagtgggcctttcgggcgcaccagcgcgatacggcctccttcctccgcgggcaaggcggttctttttcccccccacgggcggcccgtttggccacaactttaatttcaatccaacaggatttgttttcttctcaaagtgcgagtaacttaaaaggtgcatctctgctgcctggcaagctccccacgtcggtttccctgtttgatgatgaagatgaagaggataatctttttgggggtacagctgctaagaagcagacattgtctctacaagctcagagagaagagaaagcaaaagcctccgagctctccaaaaagaaagcatctgccctgttgttcagcagtgatgaggaggaccagtggaatattcctgcttcacagacccacttagcatctgacagcaggtctaaaggagaacccagggattctgggaccctccagagccaggaggccaaggctgtgaaaaagaccagtctctttgaggaagacaaagaagatgatctttttgccattgccaaggacagccaaaagaagacccagagagtgtcactcctctttgaagacgatgttgatagcggaggctctctgtttggctctcctcccacatctgttcctcctgcaacaaaggtacttgaagaaacagaagctcaacatttatatcagtccatcttgcctgatatggtgaaaattgcactctgtctgccaaatatttgcacccaggtcctaaacattcatataaaggcttccaatgtgattagcatcgatgcttctgagtttgcatggaaactagatggtcagagataa

SEQ ID NO: 123737 - DNA, 607 bp, Homo sapiens
atggggtatcgccatgttggcgcggctggtcttgaactcctgacctcaggcaaagtccaatccactgctgatatctttggtgatgaagaaggagatctgttcaaagaaaaagccgtagcatcgccagaagccacgctggtccctcctctttctacagtttgtctcatcatgtcatgtcctggctgtgaaaccctgactttctcctgccgaccccctaaggcccagcattcagaacctgataatgctgatggctgtgctgtcatcaaggaatattgtcgaacacaagctgtattgttgactgaaacgcacagtagatacctgaaggggaagggaagtagctcagtggccttggacttttttgtgtttgagcgacctggagacacggatgtgtttggtgctgcctccgttccatcactgaaggagccacagaagcctgagcagcccactccaaggaaaagcccctatggtccccctcccactggcctctttgatgatgatgatggtgatgatgatgacgactttttctcggcaccccacagcaaaccttctaaaacacgcaaagtccaatccactgtcatattttgttaataaaattttattggaacac

SEQ ID NO: 123738 - DNA, 2766 bp, Homo sapiens
atggccacagctccatcaccccccaagctgactctggctcctgcctggctctgcccggccaccacaacccctcgggaccattcagaggcatcactggaggcgcttcctggggatccacccgctcatcctgcagccgccgcaactgcagccgccgtcatcccggccctggagcccccacacacccctgtgtatgcaatatttgttaaccattcccttttggatctatacattgatcgtcctttaccatatctcattgggtcaaagctgttcatggaacaagaagatgtaggtcttggagagctgtccagtgaagaaggaaatgctgatgaacagagcagcggcttagaaggtgcgtgcaaagtgaatctggagttgctactcactaatgctgacaaagggttgaaagctccagagcagcatctcaagcatgttgcaggagtgctgaatggggaatcagtagagacttcagttcttaactaccgggaattaagtcctcacaagaatagactcttgtcacctcttcgctgttctgcaccaatgtcgctacataattctctggtgaaaccagagagacagtccaaatgttttgagtttgggaagctacagccttcttcttctcagtcactggatgttcaaaacataactgattcttctttctctaggactacttgctttcaaggtgttaaagttgattcacttgggaaaagatctgatgttatttccaaagttgaggctcgggatatcacagaaatgactaacaaggcttccaaagagcctgttggttgtgtaaataatatcagttttcttgcctcactggccgggagcacaagcagaaatagattacagagcacacgtggggcaggcaggcttcagaactctggaactgggctgtctacaaacctccagcattttcaggaagaaaactttaggaaaagttctccccagttagaacatacaggagtttttttggcctcctgcaagagacggcagaccgtccaggacttgaaagctagtgttttagaaagagtcgccatttgtcttcaccacggggctgaaagggtccgcgaaccccgacgcgtacttccaccccgtggactgttgatagctatggtccaacagatgattgaattaaaggtaactcttataagggctcagaaagaaaagaggagagccagagagaaagcctccatattcttacagaatacatatatcatcatcaacagaatgttcgtgggcatgatggactttaaaggcccgtctggtgaagtcttaggtagaaatgcagaacaggtttccaccgtgcacattacgaagaacagaaatggaggtgggagtttaaataactattcctcctccattccatcgactcccagcaccagccaggaggaccctcagttcagtgttcctcccactgccaacacacccacccccgtttgcaagcggtccatgcgctggtccaacctgtttacatctgagaaagggagtgacccagacaaagagaggaaagccccggagaatcatgctgacaccatcgggagcggcagagccatccccattaaacagggcatgctcttaaagcgaagtgggaaatggctgaagacatggaaaaagaaatacgtcaccctgtgttccaatggcgtgctcacctattattcaagcttaggtgattatatgaagaatattcataaaaaagagattgaccttcagacatctaccatcaaagtcccaggaaagtggccatccctagccacatcggcctgcgcacccatctccagctctaaaagcaatgacctatccaaggacatggacaccgggctgggtgactccatatgcttcagccccagtatctccagcaccaccggccccaagctcaacccgcccccctctcctcatgccaataaaaagaaacacctaaagaagaaaagcaccaacaactttatgattgtgtctgccactggccaaacgtggcactttgaagccacgacatatgaggagcgggatgcctgggtccaagccatccagagccagatcctggccagcctgcagtcatgcgagagcagtaaaagcaagtcccagctgaccagccagagcgaggccatggccctgcagtcgatccaaaacatgcgtgggaacgcccactgtgtggactgtgagacccagaatcctaagtgggccagtttgaacttgggagtcctcatgtgtattgaatgctcaggtatccaccgcagtcttggcacccgcctttcccgtgtgcgatctctggagctggatgactggccagttgagctcaggaaggttatgtcatctattggcaatgacctagccaacagcatctgggaagggagcagccagggacagacaaaaccctcagaaaagtccacgagggaagaaaaggaacggtggatcctttccaaatatgaggagaagctctttctggccccactaccctgcactgatctgtccctgggccagcagctgctgcgggccaccgctgatgaggacctgcagacagccatcctgctgctggcacatggctcccgtgaggaggtgaacgagacctgtggggagggagacggctgcacggcgctccatctggcctgccgcaaggggaatgtggtcctggcgcagctcctgatctggtacggggtggacgtcatggcccgagatgcccacgggaacacagcgctgacctacgcccggcaggcctccagccaggagtgcatcaacgtgcttctgcagtacggctgccccgacgagtgcgtgtag

SEQ ID NO: 123739 - DNA, 2256 bp, Homo sapiens
  misc_feature (1)...(2256): n = a,t,c or g
gaattcggatgaagagctgcttttcagccacaagctccaaaaggacaatgacccagatgttgacctttttgctggcaccaaaaaaaccaagctgttagagccaagtgttgggagcctgtttggggatgatgaagatgatgatcttttcagctctgccaagtcccagcctttggtacaagagaaaaagagagtagtgaaaaaagaccactctgttgactctttcaaaaaccagaaacatcctgaatccattcaaggtagtaaagaaaaaggcatatggaagccggaaacacctcaggactcatcaggtctcgctccatttaaaaccaaacgaaccatccactcggatcgggaagatacaagcaaatttagcgatcaacccagcggccttgctgcccacaagcggcttcccagatctcttgaagtaaagcctgttttgccaagaattggctttttccttcatctgaacacagaaggagccacggtctgggaaagtgtgcctgtccttcccgggagtggggaggccggtgtgagttttgatcttccagctcaggcagacaccttacacagtgcaaacaagagccgtgtcaagatgagagggaagcgtagaccgcagacccgtgcagctaggcggctggctgctcaggagtccagcgaggctgaggacatgagcgtccccagaggacccattgcacagtgggctgatggcgccatttccccaaatggccatcgnaccacagctcagagcagccagtggagaagacagcactgaggaggccctggcagctgccgctgcaccttgggaaggtgggcctgtgcctggagtggacacaagcccctttgcaaagtctctgggtcattccagaggggaggctgacctttatgactctggggacattttttcacgggcacctggatctcagccgtggagagaccaaacccacggcagagaagcagagatctgccaccaccagggtggaagcaaagaccaagatcaggcaagcagccacggaaaagaccctcgccctaacaaccgaaacaccctctcccgaaagggcgtacttccagcccgtggtgaagagtccaagagtggttacagcctgcgatgggcacgggagcccccgcagcagccagaaactcacactgttgtctccacaaatgagaaaccagaacaatggctgaaaggagagaactgggggtctgtctccactcctttacaggcatctcccggtcacgaacgtggtgcatgtggaggtcctcaccaacttcaacagtcacctcagcaggctgcacagcagcagccatgggcgctcctgccatcctgtccccagctactgcctcatagatctcagattcagagggacacaccgacccctgttgctggtcaaactcgaggctgacgcttctccatctcaactccttcagtaaaatctgtaaaatgacattgtttctgagggttaaatgagcatagcacagtgtcaggcacacactacttgccagatgtcgagtattcatctttattgaaataggactgtggtaagccactttatggctctcgattttgtatgagaaaatcatgcttagtgccttgttagtaaaagaaagaaaacctgaaagtccaggtctagtattttcttcaatgtcctcaatatcttcctcctccttctcagagtcagcaaaaaggtcacagccatcatcatcctcttcctcatcactcatttgtgtggtgtgcgtggcttctggcgatgctacggctttttctttgaacagatctccttcttcatcaccaaagatatcagcagtggattggactttgccttcattcactgtcatcttcaccgagacctgcatgcattctgcatccgtttgcactctttctagattaactaggctatcgttttccctcgtgctttggcttccatccttactttctacacctaacattcccaaaaacttatctactgataccttactgttaaccagaagcctcatgggtaacacaaacagttgattaacctgtaaaggagtggagacagacccccagttctctcctttcagccattgttctggtttctcatttgtggagacaacagtgtgagtttctggctgctgcgggggctcccgtgcccatcgcaggctgtaaccactcagctctagttcagtcttcagtgctggttcacgtctcactgctcttctgaaactgctattgccgtggtcactgacaatctccataatttcaaatccattggatgcctccat

SEQ ID NO: 123740 - DNA, 4689 bp, Homo sapiens
gtcacgccccgggcagcttggctggggctaggcttccggggctctgcggtcctcggcctgtgctggcagcctcggagcccaccgagccgggcggctgggatgatgaaccggacgacccccgaccaggagctggtgccggcgtcggagcccgtgtgggagcggccgtggtcggtggaggagatccgcaggagcagccagagctggtcgctggcggccgacgcgggcctactacagtttctacaggaattctcacagcaaactatctctaggacccatgaaatcaagaaacaagtggacggactaatccgggaaaccaaagccacagattgtcgcctgcataatgtcttcaatgacttccttatgctctctaatacccagttcatagagaatcgtgtatatgatgaagaagtggaggagccagtactcaaggctgaggcagaaaaaacagagcaggagaagacacgagagcagaaagaagtagatctcattcctaaagtccaggaggctgtgaactatggcttacaagtattggacagtgcctttgagcaacttgatatcaaagcaggaaactcagactccgaggaagatgatgctaatgggcgggtggaactgatccttgaaccaaaggatctatacattgatcgtcctttaccatatctcattgggtcaaagctgttcatggaacaagaagatgtaggtcttggagagctgtccagtgaagaaggctctgtaggcagtgatcgtggcagtattgtggacactgaggaagagaaagaagaggaggagtcagatgaagattttgcccatcacagtgacaatgaacaaaaccagcacaccacacaaatgagtgatgaggaagaggatgatgatggctgtgacctttttgctgactctgagaaggaggaggaagatattgaggacattgaagaaaatactagacctaaaagaagcagacctacatcgtttgcagatgagctggctgcccgcatcaagggggatgccatgggtcgagtggacgaggagccgacaaccttaccctcaggagaagcaaaacctcggaagacactcaaagagaagaaggaaaggagaactccttcagacgatgaagaggataacttattcgcaccccccaagctgaccgacgaggacttctcgccatttggctctggaggtggcctgttcagtggcggcaaggggctatttgatgatgaggacgaggagagtgacctcttcacggaagcctcccaggatcggcaagctggagcctctgttaaggaggagtcttcatcatccaaacctggaaagaaaatcccagcaggagctgtttctgtatttttaggagacacggatgtgtttggtgctgcctccgttccatcactgaaggagccacagaagcctgagcagcccactccaaggaaaagcccctatggtccccctcccactggcctctttgatgatgatgatggtgatgatgatgacgactttttctcggcaccccacagcaaaccttctaaaacacgcaaagtccaatccactgccgatatctttggtgacgaagaaggagatctgttcaaagaaaaagccgtagcatcgccagaagccactgtgagtcagacagatgaaaataaagcaagagcagaaaaaaaggttaccttatcttccagcaagaatctcaagccctcatcagaaacaaagactcaaaaaggcttattttcagatgaggaggactctgaggatttgttttcttctcaaagtgcgagtaacttaaaaggtgcatctctgctgcctggcaagctccccacgtcggtttccctgtttgatgatgaagacgatggaggatcctctttttgtgggctcggctgctaagaagcagacattgtgtctacaagctcagagagaagagaaagcaaaagcctccgagctctccaaaaagaaagcatctgccctgttgttcagcagtgatgaggaggaccagtggaatattcctgcttcacagacccacttagcatctgacagcaggtctaaaggagaacccagggattctgggaccctccagagccaggaggccaaggctgtgaaaaagaccagtctctttgaggaagacgaagaagatgatctttttgccattgccaaggacagccaaaagaagacccagagagtgtcactcctctttgaagacgatgttgatagccgaggctctctgtttggctctcctcccacatctgttcctcctgcaacaaagaaaaaagagactgtctctgaggcaccacctttgctgttcagcgatgaagaagagaaggaggcacaacttggagtgaagtctgtggataagaaggttgagagtgccaaggagtcattaaaatttgggagaactgatgtggctgagtcagaaaaggaaggacttttgactagatctgctcaggaaacagtcaagcattctgatttattttcttcatcatccccatgggacaaaggaaccaagcctaagaaccaaaactgttcttagcttgtttgatgaggaagaggataaaattggaagattcaaaaccattatcccaggctccacagaaaagaagtaggaaagggctgcgattcctgatgcccaccccaagagcacaggtgtcttccaggatgaagagctgcttttcagccacaagctccaaaaggacaatgacccagatgttgacctttttgcgtggcaccaaaaaaaccaagctgttagagccaatagtcgggagcctgtttggggatgatgaagatgatgatcttttcagctctgccaagtcccagcctttggtacaagagaaaaagagagtagtgaaaaaagaccactctgttgactctttcaaaaaccagaaacatcctgaatccattcaaggtagtaaagaaaaagggcatatgggaagccagaaacacctcaggcaaatttagcgatcaacccagcggccttgctgcccacagcggcttcccagatctctgaagtaaagcctgttttgccagaattggcttttccttcatctgaacacagaaggagccacggtctggaaagtgtgcctgtccttcccgggagtggggaggccggtgtgagttttgatcttccagctcaggcagacaccttacacagtgcaaacaagagccgtgtcaagatgagagggaagcgtagaccgcagacccgtgcagctaggcggctggctgctcaggagtccagcgagactgaggacatgagcgtccccagaggacccattgcacagtgggctgatggcgccatttccccaaatggccatcggccacagctcagagcagccagtggagaagacagcactgaggaggccctggcagctgccgctgcaccttgggaaggtggtcctgtgcctggagtggacagaagcccctttgcaaagtctctgggtcattccagaggggaggctgacctttttgattctggggacatcttttccacgggcactggatctcagtctgtggagagaacaaaacccaaggcaaagatagcagagaatcctgccaacccaccagtgggtggtcaaagcaaagagccccatgtttcctgctctaggcgaggccagcagtgatgatgatctctttcagtctgctaaaccaaaaccagcaaagaaaacaaatccctttcctctcctggaagatgaggatgacctctttacagatcagaaagtcaagaagaatgagacaaaatccagtagtcagcacggatgtcatattaacaacacaacgatatttttgagggatgatatatttgctacggaagcaattaaaccctctcagaaaaccagagagaaggagaaaacattgggaatctaatttatttgatgataccttggataccttggctgaacttacctgtaaaaccaaaagaaaagtcccgaaaaagaaagtggaagccaagtctatatttgatgatgatatggatgacatccttcctccctctgggtatccaggctaagacaacccaaaccaaaaagccgatctgcacaggccgcacctggaaccaagatttggaacacaaggtgtcccaacatctttgatgatcccctgaatgcctttggaggccagtagagcacacagggtatcccacaggttaccctgcagcctacattgttgagttagtgatgatgttgtatatgctccatggtcttaactggattacaaaaagcaaatacttagaaccagctagctcatctttttaccccaatgtacttgggtatttttcctgcactggtttaatcatgctttaatactaccaaaaccaaaaattaatattttccccagtggttggtttggttttgtttttaaacccacagtttgatttaggttagccttgctggggccataatatgcttcaggggtgtggtaaaagaagaaatctctttgtggctttccatgggcaggggaatctcagagatagccaattgccacctgaccagaagtcttttgttatatggatgggaaccctaaccttttagggcttgggcaggggaaagagaaagaagatgagagattatacttcatgagtcttagcaatatgggagcaggttttcactgaattctgagggtgcctctgcatgtcctccaaggcaaagtttggcaaactgtggccccccccactgtcatattttgttaataaaattttattggaacacaatcacaaaaaaaaaa

SEQ ID NO: 123741 - DNA, 5976 bp, Homo sapiens; identical to SEQ ID NO: 119514
  misc_feature (1)...(5976): n = a,t,c or g

SEQ ID NO: 123742 - DNA, 3657 bp, Homo sapiens; identical to SEQ ID NO: 120146

SEQ ID NO: 123743 - DNA, 5130 bp, Homo sapiens; identical to SEQ ID NO: 116418

SEQ ID NO: 123744 - DNA, 3666 bp, Homo sapiens; identical to SEQ ID NO: 116259

SEQ ID NO: 123745 - DNA, 3213 bp, Homo sapiens; identical to SEQ ID NO: 116408

SEQ ID NO: 123746 - DNA, 3492 bp, Homo sapiens; identical to SEQ ID NO: 120151

SEQ ID NO: 123747 - DNA, 3235 bp, Homo sapiens; identical to SEQ ID NO: 116409

SEQ ID NO: 123748 - DNA, 3300 bp, Homo sapiens; identical to SEQ ID NO: 118070

SEQ ID NO: 123749 - DNA, 4989 bp, Homo sapiens; identical to SEQ ID NO: 120155

SEQ ID NO: 123750 - DNA, 3420 bp, Homo sapiens; identical to SEQ ID NO: 120156
  misc_feature (1)...(3420): n = a,t,c or g

SEQ ID NO: 123751 - DNA, 3579 bp, Homo sapiens; identical to SEQ ID NO: 120157

SEQ ID NO: 123752 - DNA, 4374 bp, Homo sapiens; identical to SEQ ID NO: 116411

SEQ ID NO: 123753 - DNA, 4830 bp, Homo sapiens; identical to SEQ ID NO: 120159

SEQ ID NO: 123754 - DNA, 4452 bp, Homo sapiens; identical to SEQ ID NO: 120160

SEQ ID NO: 123755 - DNA, 3693 bp, Homo sapiens; identical to SEQ ID NO: 118073

SEQ ID NO: 123756 - DNA, 3300 bp, Homo sapiens; identical to SEQ ID NO: 118076

SEQ ID NO: 123757 - DNA, 3357 bp, Homo sapiens; identical to SEQ ID NO: 120163

SEQ ID NO: 123758 - DNA, 3316 bp, Homo sapiens; identical to SEQ ID NO: 120164

SEQ ID NO: 123759 - DNA, 3457 bp, Homo sapiens; identical to SEQ ID NO: 120165

SEQ ID NO: 123760 - DNA, 4797 bp, Homo sapiens; identical to SEQ ID NO: 120167

SEQ ID NO: 123761 - DNA, 3384 bp, Homo sapiens; identical to SEQ ID NO: 120168

SEQ ID NO: 123762 - DNA, 3348 bp, Homo sapiens; identical to SEQ ID NO: 120169

SEQ ID NO: 123763 - DNA, 3783 bp, Homo sapiens; identical to SEQ ID NO: 120170

SEQ ID NO: 123764 - DNA, 3723 bp, Homo sapiens; identical to SEQ ID NO: 120171

SEQ ID NO: 123765 - DNA, 3897 bp, Homo sapiens; identical to SEQ ID NO: 120172

SEQ ID NO: 123766 - DNA, 3726 bp, Homo sapiens; identical to SEQ ID NO: 120173

SEQ ID NO: 123767 - DNA, 3783 bp, Homo sapiens; identical to SEQ ID NO: 120174

SEQ ID NO: 123768 - DNA, 3855 bp, Homo sapiens; identical to SEQ ID NO: 120175

SEQ ID NO: 123769 - DNA, 3348 bp, Homo sapiens; identical to SEQ ID NO: 120176

SEQ ID NO: 123770 - DNA, 6136 bp, Homo sapiens; identical to SEQ ID NO: 120177

SEQ ID NO: 123771 - DNA, 3924 bp, Homo sapiens; identical to SEQ ID NO: 120178

SEQ ID NO: 123772 - DNA, 7383 bp, Homo sapiens
atgacaggatcaaattcacacataacaatattaactttaaatataaatggactaaattctgcaattaaaagacacagactggcaagttggataaagagtcaagacccatcagtgtgctgtattcaggaaacccatctcatgtgcagagacacacataggctcaaaataaaaggatggaggaagatctaccaagcaaatggaaaacaaaaaaaggcaggggttgcaatcctagtctctgataaaacagactttaaaccaacaaagatcaaaagagacaaagaaggccattacataatggtaaagggatcaattcaacaagaggagctaactatcctaaatatttatgcacccaatacaggagcacccagattcataaagcaagtcctgagtgacctacaaagagacttagactcccacacattaataatgggagactttaacaccccactgtcaatattagacagatcaacgagacagaaagtcaacaaggatacccaggaattgaactcagctctgcaccaagcagacctaatagacatctacagaactctccaccccaaatcaacagaatatacatttttttcagcaccacaccacacctattccaaaatcgaccacatagttggaagtaaagctctcctcagcaaatgtaaaagaacagaaattataacaaactatctctcagaccacagtgcaatcaaactagaactcaggattaagaatctcactcaaagccgctcaactacatggaaactgaacaacctgctcctgaatgactactgggtacataacgaaatgaaggcagaaataaagatgttctttgaaaccaacgagaacaaagacaccacataccagaatctctgggacgcattcaaagcagtgtgtagagggaaatttatagcactaaatgcctacaagagaaagcaggaaagatccaaaattgacaccctaacatcacaattaaaagaactagaaaagcaagagcaaacacattcaaaagctagcagaaggcaagaaataactaaaatcagagcagaactgaaggaaatagagacacaaaaaacccttcaaaaaatcaatgaatccaggagctggttttttgaaaggatcaacaaaattgatagaccgctagcaagactaataaagaaaaaaagagagaagaatcaaatagacacaataaaaaatgataaaggggatatcaccaccgatcccacagaaatacaaactaccatcagagaatactacaaacacctctacgcaaataaactagaaaatctagaagaaatggatacattcctcgacacatacactctcccaagactaaaacaggaagaagttgaatctctgaatggaccaataacaggctctgaaattgtggcaataatcaatagtttaccaaccaaaaagagtccaggaccagatggattcacagccgaattctaccagaggtacaaggaggaactggtaccattccttctgaaactattccaatcaatagaaaaagagggaatcctccctaactcattttatgaggccagcatcattctgataccaaagccgggcagagacacaaccaaaaaagagaattttagaccaatatccttgatgaacattgatgcaaaaatcctcaataaaatactggcaaaccgaatccagcagcacatcaaaaagcttatccaccatgatcaagtgggcttcatccctgggatgcaaggctggttcaatatacgcaaatcaataaatgtaatccagcatataaacagagccaaagacaaaaaccacatgattatctcaatagatgcagaaaaagcctttgacaaaattcaacaacccttcatgctaaaaactctcaataaattaggtattgatgggacgtatttcaaaataataagagctatctatgacaaacccacagccaatatcatactgaatgggcaaaaactggaagcattccctttgaaaactggcacaagacagggatgccctctctcaccgctcctattcaacatagtgttggaagttctggccagggcaatcaggcaggagaaggaaataaagggtattcaattaggaaaagaggaagtcaaattgtccctgtttgcagacgacatgattgtttatctagaaaaccccattgtctcagcccaaaatctccttaagctgataagcaacttcagcaaagtctcaggatacaaaatcaatgtacaaaaatcacaagcattcttatacaccaacaacagacaaacagagagccaaatcatgggtgaactcccattcacaattgcttcaaagaggataaaatacctaggaatccaacttacaagggatgtgaaggacctcttcaaggagaactacaaaccactgctcaaggaaataaaagaggacacaaacaaatggaagaacattccatgctcatgggtaggaagaatcaatatcgtgaaaatggccatactgcccaaggtaatttacagattcaatgccatccccatcaagctaccaatgactttcttcacagaattggaaaaaactactttaaagttcatatggaaccaaaaaagagcccgcattgccaagtcaatcctaagccaaaagaacaaagcaagaataaagctggaggcatcactattcaaactatactacaaggctacagtaaccgaaacagcatggtactggtaccaaaacagagatatagatcaatggaacagaacagagccctcagaaataatgccgcatatctacaactatctgatctttgacaaacctgagaaaaacaagcaatggggaaaggattccctatttaataaatggtgctgggaaaactggctagccatatgtagaaagctgaaactggatcccttccttacaccttatacaaaaatcaattcaagatggattaaagacttaaatgttagacctaaagccataaaagtcctagaagaaaacctaggcaataccattcaggacataggcatgggcaaggacttcatgactaaaacaccaaaagcaatggcaacaaaagccaaaattgacaaatgggatataattaacctaaagagcttctgcacagcagaagaaactaccatcagagtgaacaggcaacctacagaatgggagaaaaattttgcaatctacccatctgacaaaggactaatatccagattctacaaagaactcaaacaaatttacaagaaaaaaacaaacaaccccatcaaaaagtgggcgaaagacatgaacagacacttctcaaaagaagacatttatgcagccaaaaaacacatgaaaaaatgctcatcatcactggccatcagagaaatgcaaatcaaaaccacaatgagataccatctcacaccagttagaatggcaatcatgaaaaaagtcaggaaacaacaggtgctggagaggatatggagaaataggaacacttttacactgttggtgggactgtaaactagttcaaccattgtggaagtcagtgtggcgatccctcagggatctggaactagaaataccatttgacccagccatcccattactgggtatacacccaaaggactataaatcatgctgctataaagacacatgtacacagctacgcggcggcggcggagcgcaggcctcgtgccgttacggccatcacggcggccgcagtggcgtcctggagccctcctcaggtagctcttcaacaagcaggcataaacacttctctgatgagggacgcgatggggaaaggctttgttctctgaaaactccctgtaggaactgcctttcttctgagtgtccacttgtgtccggaattggtgggttcttgatctcactgacttcaagaatgaagccgcagaccctcgcggtgagtgttacagttcttaaagatggtgtgtccggagtttgttccttcagatgttcagatgtgtctggagcttcttccttccagtgggttcgtggtcttgctgacttcaggagtaaagctgtgctcacaccacaaatgtaatcaaagggctgatcaactggtttctgagttagttcaactaatttgcatagtatctgcagagcaaccacataacttgttcctccatcttcaattatgaaaattgggattcctctccctttcaacccaggttctgttatcaatataattgcaataataatttctccctgaagagataaacggttgttcttctctgcatttttgtctttgctgatagcctgctcagttttagtaggcttttcctctttttctaagtgtctctttaaatcataatttaacttggggacaagtccaccaatattccacctgttgtttcctgactttttaatgattgccattctaactggtgtgagatgatatctcatagtggttttgatttgcatttctctgatggccagtgatgatgagcatttcttcatgtgttttttggctgcataaatgtcttcttttgagaagtgtctgttcatgtccttcgcccacgttttgatggggttatttgtttttttcttgtaaatttgtttgagttcattgtagattctggatattagccctttgtcagatgagtaggttgcgaaaattttctcccatgttgtaggttgcctgttcactctgatggtagtttcttttgctgtgcagaagctctttagtttaattagatcccatttgtcaattttggcttttgttgccattgcttttggtgttttggacatgaagtccttgcccacgcctatgtcctgaatggtaatgcctaggttttcttctagggtttttatggttttaggtctaacgtttaaatctttaatccatcttgaattgattttggtataaggtgtaaggaagggatccagtttcagctttctacatatggctagccagttttcccagcaccatttgttaaatagggaatcctttccccattgcttgtttttctcaggtttgtcaaagatcagacagttgtagatatgcggcattatttctgagggctctgttctgttccattgatctatatctctgttttggtaccagtaccatgctgttttggttactgtagccttgtagtatagtttgaagtcaggtagtgtgatgcctccagctttgttcttttggcttaggattgacttggcgatgcgggctctattttggttccatatgaactttaaagtagttttttccaattctgtgaagaaagtcattggtagcttgatggggatggcattgaatctgtaaattaccttgggcagtatggccattttcacgatattgattcttcctacccgtgagcatggaatgttcttccatttgtttgtgtcctcttttatttccttgagcagtggtttgtagttctccttgaagaggtccttcacatcccttgtaaattggattcctaggtattttattctctttgaagcaattgtgaatgggagttcactcatgatttggctctctgtttgtctgttgttggtgtataagaatgcttgtgatttttgtacattgattttgtatcctgagactttgctgaagttgcttatcagcttaaggagattttgggctgagacgatggggttttctagataaacaatcatgtcgtctgcaaacagggacaatttgacttcctcttttcctaattgaataccctttatttccttctcctgcctgattgccctggccagaacttccaacactatgttgaataggagtggtgagagagggcatccctgtcttgtgccagttttgaaagggaatgcttccagtttttgcccattcagtatgatattggctgtgggtttgtcatagatagctcttattattttgaaatacgtcccatcaatacctaatttattgagagtttttagcatgaagcgttgttgaattttgtcaaaggctttttctgcatctattgagataatcatgtggtttttgtctttggctctgtttatatgctggattacatttattgatttgcgtatattgaaccagccttgcatcccagggatgaagcccacttgatcatggtggataagcttttggatgtgctgctggattcggtttgccagtattttattgaggatttttgcatcaatgtttatcaaggatattggtctaaaattctcttttttggttgtgtctctgcccggctttggtatcagaatgatgctggcttcataaaatgagttagggaggattccctctttttctattgattggaatagtttcagaaggaatggtaccaattcctccttgtacctctggtagaattcggctgtgaatccttctggtcctggactctttttggttggtaagctattggttattgccacaatttcagagcctgttattggtctattcagagattcaacttcttcctggtttagtcttgggagagtgtatgtgtcgaggaatgtatccatttcttctagattttctagtttatttgtgtagaggtgtttgtagtattctctgatggtagtttgtatttctgtgggatcggtggtgatatcccctttatcattttttattgtgtctatttgattcttctctctttttttctttattagtctggctagcggtctatcaattttgttgatcctttcaaaaaaccagctactggattcattgattttttgaagggttttttgtgtctctatttccttcagttctgctctcattttagttatttcttgccttctgctaggttttgaatgtctttgctcttgcttttctagttcttttaattgtgatgttagggtgtcaattttggatctttcctcctttctcttgtaggcatttagtgctataaatttccctctacacactgctttgaatgcgtcccagagattctggtatgtggtgtctttgttctcgttggtttcaaagaacatctttatttctgtcttcatttcgttatgtacccagtagtcattcaggagcaggttgttcagtttccatgtagttgagcggctttgagtgagattcttaatcctgagttctagtttgattgcactgtggtctgagagatagtttgttataatttctattcttttacatttgctgaggagagctttacttccaagtatgtggtcaattttggaataggtgtggtgtggtgctgaaaaaaatgtatattctgttgatttggggtggagagttctgtagatgtctattaggtctgcttggtgcagagctgagttcaattcctgggtatccttgttgactttctgtctcgttgatctgtctaatgttgacagtggggtgttaaagtctcccattattaatgtgtgggagtctaagtctctttgtaggtcactcaggacttgctttatgaatctgggtgctcctgtattgggtgcataaatatttaggatagttagctcctcttgttgaattgatccctttaccat

SEQ ID NO: 123773 - DNA, 817 bp, Homo sapiens
atggtgctggcatctactcagcttctggtgagggcctcatggagcttttactcatggcagaagagttttggccgtgatccttatgaaggaccaagaagaactggaaaaagaaagcaaaaatctgcacgtggttgcattgtggatgccaatctgagcattctcaacttggttattgtaaaaaaaggagagaaggatattcctggactgactgatactatggtgccttgtcatctcgggcccaaaagagctagcagaatctgcaaacttttcagtctctctgaagatgatgatgtccaccagtgtgttgtaagaaaggctttaaacaaagaaggtaagaaacctaggaccaaagcacccacgactaagtatcttgttactccacatgttctgcagcacgaatggtggcatattgctctgaagaaacagagaattaaggaaaataaggaagtagctgcagaatatgctaaacttttggccaagagaatgaaggaggctaaagagaagcatcaagaacagattgccaagagacgcagactttcctctctgcgagcttctacttctaagtctgaatccagtcagaaataagattttttgagtaacaaataaataagatcagactctgagaaaaaacataaaacaaaaaaaaaatggggggggcggcttttagaggatccagtttttccccggggggggggggaagttttttttttttatggggggccccaaaaaaaaatagggggggggggtttttaacggcgggggggggggaaacccggggggtcccccaattaaagcgggggggagcaaaggaggctcc

SEQ ID NO: 123774 - DNA, 687 bp, Homo sapiens; identical to SEQ ID NO: 122805

SEQ ID NO: 123775 - DNA, 1335 bp, Homo sapiens
atgggcctgaaaggccagggagtggaaggggggcttctgaggcaatcaggcagtgtcagtcttcagccgctaagccgagaagatctgggaaggagtcagtcagagagccttgggccagagttccaggggctctgggagtggctgccagtggaaagagtggaacgagaaaacctttcagactattgtgttctgggccagcgtccaatgcatttaccaaatatgaaccagctggcatccctggggaaaaccaacgaacagtctcctcacagccaaattcaccacagtactccaatccgaaaccaagtgcccgcattacagcccatcatgagccctggtcttctttctccccagcttagtccacaacttgtaaggcaacaaatagccatggcccatctgataaaccaacagattgccgttagccggctcctggctcaccagcatcctcaagccatcaaccagcagttcctgaaccatccacccatccccagagcagttaagccagagccaaccaactcttccgtggaagtctctccagatatctaccagcaagtcagagatgagctgaagagggccagtgtgtcccaagctgtctttgcaagagtggcattcaaccgcacacaggaatctaaaaacctggaaaaaagattagacgaacagctaactagaataaacagtgtagagaggaccttaaatgacctgatggagctgaaaaccatggcacgagaactacgtgatgcacgcacaagcttcagtagccaattcaatcaagtggaagaaagggtatcagtgattgaagatcaaattaacgaaataaatgacagggagaatggaaccaagctggaaaacactcttcagaatattaaccaggagaacttccccaacctagcaaagcaggccaacattcaaattcaggaaatacagagaacaccacaaagatactcctcaagaagagccaccccaagacacataattgtcagattcaccaaggttgaaatgaaggaaaaaatgctaagggcagccagagagaaaggtcgggttaccaacaaagggaagcccatcagactaacagctgatctcttggcagaaactctacaagccagaagaaagtgggggccaatattcaacattcttaaagaaaagaattttcaatccagaatttcatatccagccaaattaagcttcataagtgaaggagaaataaaatcctttacagacaagcaaatgctgagagattttgtcaccaccaagcctgccttacaagagctcctgaaggaagcactaaacttggaaaggaacaactggtaccagccactgaaaaaacatgccaaattgtaa

SEQ ID NO: 123776 - DNA, 354 bp, Homo sapiens
  misc_feature (1)...(354): n = a,t,c or g
acttcanaacacntaagccacagtggccaggcattccttcaggacctcctcccccaggatcttgcttcaagtgctagaaatctggccactgggccaaggaatgcctgcagcccaggattcctcctaagccgtgtcccatctgtgcaggaccccactggaaatcggactgttcaactcacctggcagccactcccagagcccctggaactctggcccaaggctctctgactgactccttcccagatcttctcggcttagcggctgaaggctgatgctgcccgatcgcctcggaagccccgtagaccatcacggatgccgagctttaggtaactcttacagtggagggtaagtccg

SEQ ID NO: 123777 - DNA, 534 bp, Homo sapiens
aaaagccacagttcatggacttggtggtatcggaggtgccaagggctggaagccaaagttcagtttcctcttaagcagcaagttcttttgcgtaagtccaacctgctgacttgctccgtcctcttcacacggacacgtgtaacatttggtgccaaagacctgggacagaaggactccttcgggagaccggtcccctgtcttcgccctcactccgtgaggagatccacctatgacctcaggtcctcagaccagcccaaggaacatctcactgatttcaaatcgggatcttgcttcaagtgccggaaatctggccactggaccaaggaatgccagcagcccaggattcctcctaagccatgtcccatctgtgcaggtccccactggaaatcggactgtccatcttgcccagcagccactcccagagcccctggaactctggcccaagactctctgactgactccttccccaccgatcccaaaggctctctgattgactacttcccagatcttctctgcttagtggctgaagactga

SEQ ID NO: 123778 - DNA, 570 bp, Homo sapiens
atggccgcctacaaactggtgctgatccagcatggagagtgcatggaacctggagatccacttcagcagctgatgccattgatcagatgtggcccacctgtaatgaggacttggcgcctcaatgagcggcactatgggggtctgaccgatctcggtaaagcagaaactgctgcaaagcatggtgaggcccaggtgaagatctggagcaacatcagtaaggatcgtaggtatgcagacctcacagatgatcagctatcctcctgtgagagtctgaaggacactattgccagcgctctgcccttttggaataaagaaatagttccccagatcaaggaagggaaatgggtactgattgcagcccatggcaacagcctccggggcattgtcaagcatctggaaggtctctctgaagaggctatcatggagctgaacctgctgactggtattcccattgtctgtaaattggacaagagctcgaagcccatcaggtgcatggagttcctgggggatgaagggaccctgtgtaaagccatggaagctgtggctgcccagggcaaggccaagaagtga

SEQ ID NO: 123779 - DNA, 1715 bp, Homo sapiens
gggcggggtgccgcatccccagcccgccgccatggccgcctacaaactggtgctgatccggcacggcgagagcgcatggaacctggagaaccgcttcagcggctggtacgacgccgacctgagcccggcgggccacgaggaggcgaagcgcggcgggcaggcgctacgagatgctggctatgagtttgacatctgcttcacctcagtgcatttatatagcgatccggaccctctggacagtgctagaaatgccattgatcagaaatgtggctgccagtggtgaggacttggcgcctcaatgagcggcactatgggggtctaaccggtctcaataaagcagaaactgctgcaaagaatggtgaggcccaggtgaagatctggaggcgctcctatgatgtcccaccacctccgatggagcccgaccatcctttctacagcaacatcagtaaggatcgcaggtatgcagacctcacagaagatcagctaccctcctgtgatagactgaaggatactattgccacagctctgcccttctggaatgaagaaatagttccccagatcaaggaggggaaacgtgtactgattgcagcccatggcaacagcctccggggcattgtcaagcatctggagggtctctctgaagaggctatcatggagcttgaacctgccgactggtattcccattgtctatgaattggacaagaacttgaagcctatcaagcccatgcagtttctgggggatgaagagacggtgcgcaaagccatggaagctgtggctgcccagggcaaggccaagaagtgaaggccggcggggaggatactgtccccaggagcaccctccctgcccgtcttgtccctctgcccctcccacctgcacatgtcacactgaccacatctgtagacatcttgagttgtagctgcagacggggaccagtggctcccattttcattttagccattttgtcgcctgcacccactcccttcatacaatctagtcagaatagcagttctagagcacaggttctcagtctaagctatggaaaagctccccttatccaacagagtttaaaagtagtgacttgggtttttgcgagtgctttgtttactaaggactttggggaggaaccatgctaagccatgaccagtgaggagaagcaacagagcctgtctgtccccatgagcggagtctgtcctctgctcttctgcagtcaggtcactgcctactgcctgggggctctagtcattccagtggaagacgaatgtaacctgcgtggtgatgtgacaactgtttcctccctgaccccagaggatctggctctaggttgggatcaatcctgaatttcgttatgtgttaatttacttttattaaaaaagtatagtatatataatacaaaacaataacccttctggggtttcttgtggcggttgaaatagtcccacatgtggtcatcagaaatagcattcctcataccaatataggatcagctccttgacctctgaggggtcaggagtgcttcctggtgtgtgtattagaatcccttcctgccttgtttcatggcagtgaaatgcctcttggtcctgtccagtgtatctttcactgatttctgaatcatgttctagttgcttgaccctgccacatgggtccagtgttcatctgagcataactgtactaaatcctttttccatatcagtataataaaggagtgatgtgcaat

SEQ ID NO: 123780 - DNA, 576 bp, Homo sapiens
atgttgcgcctgttgtacaagtatggaaagaaatgcataagcttttgccattctcaccggattcagtcagtcactcatggtgatatctcaattgatagcggtatttttgatcaggataaattaataggtcgtatagatgttggacgtgtcggaatcgcatgtggatgtcaggatgttgccatcgtatggaactatctcgctgcgtgctccgttgatcgcaatacctgcaggataatgcgccctaattgccgacctgaggtggaggagacccctggtctgaaggaagagaaggaactctcccaacccaaagagggggaggccacagacctgaagaaagaggtggagaaaatctcctcatccgaggaagaggagactgtgaacctgaaggaagaggtggagaaaatccccccacctgaggaggagactatggacctgaaggaagagaaggaggagatccccccacctgagctgagggaccagaagttaatgcacgtgctcaaagacttagagcctgtgagtgctgtaccccataaggacagtctgtttcatggacagctgacaacagtacccgtgtaa

SEQ ID NO: 123781 - DNA, 1234 bp, Homo sapiens
gaccctctactgccgcgtcttcctgctcgacgggaccgaagtgagcgtggacctgccgaaacatgccaaaggccaggatttgtttgatcagattgtgtaccacttggaccttgtggaaacagattactttggcctccagttcctcgactctgcccaggttgcgcactggctggatcatgccaaacccataaaaaagcagatgaaaattggacctgcttatgctttacactttcgagttaaatactattcttcagaaccaaacaaccttcgtgaggagtttacaaggcctaaaattaccaaaatggattttaaaaagagcaaattgacactcgtggtggtcgaggatgatgatcagggacgtgagcaagagcacacgtttgtgttccggttagacagtgccaggacctgcaaacacctttggaagtgtgcagttgagcaccacgcgttcttccgactgcggacgccaggaaacagcaaatccaatagatccgactttatcaggctgggctctcgcttcagattcagctgctttagtggagggaaaatgcccacagcacaggaaatagtcctgcccttcgagagaggccaggggatgggagcgtgtccagagaagggcgatgggttgatgaagggtggccacagcgcccgggaggaaggggccagaacgctctctgttctgttccatgaggaggattatgctgcaagcaacccagtgatagcagcccagctctggaatgggactagtgcctttatgaaagacattgaagccagcagccttgcctctgctgctgcgagaggatgcagcaacagggtgccatccacaagtacctcaccagtcactgaatctactggctctgtgatcttggatatccaggccccagaacctcccatgttacagatgccagttcctgcacctaaagtgcagcaaaacaactatgccagagctctggccaccaagagtcaactttcaacatccccagagaagcaagaagagatggcagagtctcagaggggcaaagaggctcgctggatgtcgctcataagcgctggggggctacgtgcaggaagctacacttgttacacccttgttactgctcatttgccacgcacacagcttggcacattggagacgcccaataactgtggtctggactggactgaggtgccacagcacggtcacactgagggtgttattgtgttccagacaatttcagaacacaagcatcctaactag

SEQ ID NO: 123782 - DNA, 561 bp, Homo sapiens
atgtcaaagttcggccgggccacccggggcctcaggaagcccgaggtcggcgatgtgatccggaccatcgtgcgggcaggcctggccatgcccgggcccccactaggcccagtgctgggtcagagaagggcttccatcaaccaattttgcaaggagttcaatgagaggacaaaggacatcaaggaaggcattcctctgcttaccaagatttttctgaagcctgacgggacatttgaaatcaagattggacaacccactgtttcctacttcgtgaaggcagcagctgggattgaaaagggggcccggccaacagcctcagttcagaagagtttgcagctttccagaaggaacaagccatcttcctggctgctcagaagaaggcagatttggccacccaggaggaagctgccaagaagtgaccctttcccccaactcctagatttcaaaggaggcagctgggaaggggccagttgcaaaggctgtgcccaaggggaggaaggaggtcacaccaatatgatgatggttttcgtgactttgaatgatatatttttgtacatctag

SEQ ID NO: 123783 - DNA, 890 bp, Homo sapiens
aaagtattcgatgtcactagtacagcgcggaggaattcctggcccagatggtggcgcccagagcttcgctcttgctgctcccctgaggtgaactgaagccagctgccccgcatcatgtcaaagctcggccgggccgcccggggcctcaggaagcccgaggtcggcggtgtgatccgggcgatcgtgcgggcaggcctggccatgcccgggcccccactaggcatacgtgctgggtcagagaggcgtttccatcaaccagttttgcaaggagttcaatgagaggacaaaggacatcaaggaatggcattcctctgcctaccaagattttaagtgaagcctgacaaggacatttgaaattaagattggacagcccactgtttcctacttcctgaaggcagcagctgggattgaaaaggggggcccggcaaacagggaaagaggtggcaggcctggtgaccttgaagcatgtgtatgagattgcccgcatcaaagcttcaggattgagggcatttgccctgcaggatgtacccctgtcgtctgtttgtccgctccatcatcgggtctgcccgttctctgggcacttcgcgtggtgaaaggacctcaagttcagaagagcttgcagctttccagaaggaacgagccatcttccttggctgctcagaaaggaggcagattttggcttgcccaagaaagaagctgccaaagaaattgaccctttgccccaccaactcccagattttcaaaaggaagtaagtttgcaaaagctgtgcccaaggggaggaaggaggtcacaccaatatgatgatggttttcatgactttgaatgatatatttttgtacatctagctgtatcgaggcatcaggcctgaataaacatcctttcttaccca

SEQ ID NO: 123784 - DNA, 447 bp, Homo sapiens
ggtcacagtgagtgaaggaacatggctctgaatcatgcctgtctgtgtccccaggtctgtgcttaaaaccacgaagttcaagatggaaactgaagggaagagtgtcaaggggatgggagagaggacttgtccatgactttggcagcataaggaaaaaataccccagggacaagtggcgactttggaaactccattcctctgcaaaatgacatcacgaggagagtggtggggcctgcggatgaaaagatctggcttctcctcccaactctgctatgaggaagcgctggatggccctgtcggccgcggtcatcgccgcctcggcccgggagctcagcattgcagccgcacccggagccttgaaaccgtctcctccgctaccgccgccgccgccgccgccgccggaccgagggatacgacggttcccgagacagcggaacctgcggccgc

SEQ ID NO: 123785 - DNA, 2033 bp, Homo sapiens
agcggccgcaggttccgctgtctcgggaaccgtcgtatccctcggtccggcggcggcggcggcggtagcggaggagacggtttcaggcctccggtgcggctgcaatgctgagctcccgggccgaggcggcgatgaccgcggccgacagggccatccagcgcttcctgcggaccggggcggccgtcagatataaagtcatgaagaactggggagttataggtggaattgctgctgctcttgcagcaggaatatatgttatttggggtcccattacagaaagaaagaagcgtagaaaagggcttgtgcctggccttgttaatttagggaacacctgcttcatgaactccctgctacaaggcctgtctgcctgtcctgctttcatcaggtggctggaagagttcacctcccagtactccagggatcagaaggagcccccctcacaccagtatttatccttaacactcttgcaccttctgaaagccttgtcctgccaagaagttactgatgatgaggtcttagatgcaagctgcttgttggatgtcttaagaatgtacagatggcagatctcatcatttgaagaacagccacacttccaagatggccttgtccagcttcgtgtaggcgttgtctgccgccactatccagagaaatgggaggcggcatcttggacctcccaaaactgtggggccgacgatgctcacgaattattccatgtcattacctcgtcattggaagatgagcgagaccgccagcctcgggtcacacatttgtttgatgtgcattccctggagggtcacccattgaccctggaccactgccttcaccacttcatctcagtcagaatcagtgcgggatgttgtgtgtgacaactgtacaaagattgaagccaagggaacgttgaacggggaaaaggtggaacaccagaggaccacttttgttaaacagttaaaactagggaagctccctcagtgtctctgcatccacctacagcggctgagcatggtccagccacggcacgcctctgaagcggcatgagcacgtgcagttcaatgagttcctgatgatggacatttacaagtaccacctccttggacataaacctagtcaacacaaccctaaactgaacaagaacccagggcctacactggagctgcaggatgggccgggagcccccacaccagttctgaatcagccaggggcccccaaaacacagatttttatgaatggcgcctgctccccatctttattgccaacgctgtcagcgccgatgcccttccctctcccagttgttcccgactacagctcctccacatacctcttccggctgatgggcagttgtcgtccaccatgggagacatggcactctgggacactttgttcatttaccgacggtccccaccttctgccaggaaccctctctcaactagcaatcagtggctgtgggtctccgatgacactgtccgcaaggccagcctgcaggaggtcctgtcctccagcgcctacctgctgttctacgagcgcgtcctttccaggatgcagcaccagagccaggagtgcaaagtctgaaagaatgactgtgcccctccctgcaaaggctaagagctgatggcactgtctgcactgcccccaggaaaaaagtaaaactgtactgttgcgtgtgcaagcggccccactagagccttccagtcttctgtgtgtgttctaagagcaggctccaccctgggagccagccccagttcacaccaaaccaggctccctgaacagtcctgttcatgtgtgtaggtggttctgttgtgttaagaaagcattcattatgtccggagtgtctttttactcatctgatacaggtaattaaaagaactcagattcttgaagccaccgttttcatattgtaatgttaggtgttctcagaggggaggtacctttgtctaatcaacgtttccacttagatcttttatttttaataagcaggcccataaaaattgttgacaagaattaatgaaattattaaaggcaacaatttagaagaaaaa

SEQ ID NO: 123786 - DNA, 1394 bp, Homo sapiens
ccactccaactccagccacgtcatataggggcccagatacagcttgggccactgctccagagagtgcaagccataagacttggcagcttccacatggtgttaagcctgtgggaatgcagagtgcaagagttgagattttggagcctccacctagacttcagaggatgtatggaaaagcctggaggatctcactctgtccacaaggcttaagtacagtgatgcgatcagagctcactgcatcctcaacccctcaggttcaagaaatcctcccacctcagtctcctgagtacctgggaccaaaggggattactgagaggatccacaagataatgcacgtgaaagggcttgcgaaattgcccgcaaaccggaaccagccctcgccgggggtttctgggaaaaggcttgtgaactgcgtttctgcgtctgccgtggacagcgaacctgctgcggttcctgaaccggatgtttgcgccggaattgtgataaagaagcagtgctttccggtgatagctaggtgcaataaaaccaaacaagtagattccatacctcatcgtgcatatgcaaagcctagcccattctttcctgcagtagttgtagtaactagtgaatcaaaggatccccgagttaagcaaaatccaactcatccactcctagctgaaggttctaatgctgctcatttccataaaacaaagatttcccagagcctgaagtggcttcctgttggctacttaaacagcacaacatatgaatatcgtgacttgaccaaaggcttgagtcttctttgctccctcctgctaggtgtggaagcagatatcccctccatggctggactccacgtacggcatctcatgcaggtgccacagcagccctgcatagcatttgctgtatcatccccattgcaccagggagggaaggaaacagaggatgcctggtcttttcatataccatccacgatacaccgatggcccacctctccttctgtccagctttcaagcctaagggccagcacacagctcctgtgtttgcacatcaaccttgcaaagtgcttcatctggggaattcttgcacaggttctgtcttgtcatcatcaccgcattacgcagtttgtgggcatgttgacttttgtgtgcgctggtgattccagcaagctttcccctgatatacgaacactggtcagacgtctgacttcatatctggtgtctgcatcagtgcttctaaaaagcaagcagatggctctttgctctgcttccaggatcctggatgtctcagtctccccaggtgatcatgtggcctcagaagccagagctagatgtgctcctgatcttgtagcccctcgtcctatgcctcatcaaaaccaggggtcattggaatggactgaagaaggagaaaactag

SEQ ID NO: 123787 - DNA, 1734 bp, Homo sapiens
ttaatcttttaaaaggccctgataggtctggcctcttccatagttctcttgcctcatcttgcatgatgctttcccttgtctcatcttgcatgatgctttcccttgttctctgtgttctgtaactggatctctggtcctcagtcgagttcctctacgaggaacacaccagaaatctgccatcgccacctccacaaaaattgctctcagcaatatgaaatcctcaaacatcatactgatgcttactttaagaagcagcagctgtttttcgatgtttcgaagaagtaaagtagggctgcttggtgacatttcaaaatcttgttccggtacaggatcttgacactcctggggaacctgaggattccctagaatgtttagtgaagctgcttggtctgcaaattgcatttgttttttcaaaatatcttttggaagctgacattcttctaggaccactatccccctggtccagaggggagcccactgtcctgaagggagagactcaggactggcagcattcaccaaaagctgactgaagaagccttgggcctttagtaaacattggccgtagacaggcagtacttgctgtggccctggggcagtggtggccatgggaagggactgctctacaactgtctgatcttcaacaaacactgccacattttttctaagggtatattcatccaaatcgtcatcagagctgctatcagttgcatcggaatccaaaccctcttcaacatgagacaacagccctgtagcagaaaatgcaaatctttggatttccgcagctgtacaccgtgcaaagccattttttgcatcatcccacaatttattctctgcagtcaatgtgttaacttctggcttaatttcagtgcatttaggtaaactattacccaaaattgtggtaggttcatgaaatgtcttcattttggggagttgatgtttcatagacaatttcatctgctgaccatagtgcttaacaacatgctttgccaggagcatctgcaaatgtttctgagttcttctagcctggctaagtaaaattttctgtttgcttacacaatgaagtaaacgagcatgtacttcctcctctttttcagcagctgaagaactaacaggcacatttgagtggccaggtacaattttcttttgagtacagtgcaataaaccctttttaatctcagcatcagtaactttatccaaaagtgcattctcttgataccatttacagttttgtagttgtactttatctacattagtgtctttggttatatttgaatccagaataatttgtacatctttcatgcactggctcgtggtatctgatagaggctcctttttgatgaactcttcagaatgagaaagacagattttactgagctgaatgttgctgccattatacagtatgtttttcagcttattgcaactgggctcccctaatttcttttgtttataattctcattgtgtttatttaatgtagaattagatctcattaaaaaaacagtctggtaatgttttgaagactgaggggagccaaaatgttttaaattcacaaaattagtattaagagtaggttcaggagttggaaatccaagcatctgagaaaaggtgtctccctttagcttttcatctacagttctgggactttccatgtagagcatcttgtcagactccatggtacttggcaaagatgaaaagctgataccctttgctgttgcctccctcagagctggggtcat

SEQ ID NO: 123788 - DNA, 601 bp, Homo sapiens
atgagcagcaagggcaaaggcccagtggtggcggggagccgcccgtgtgtcgaggacagtgaaaagggtgctgtgcgaggggtggagtgtcccctgaagagtgcctgtcctgatgtggacatgtactgggcagccctgcagaggctggccagcctgctgaaagcagatgggaacctggtcaccatggctgccctgcactcccactatatggtaggctccaagaagttctttgggctccacccagagaaggagacggtggagaaggccatgcaggaggctggctgccaggtgcagaggtgtgccccatcagctgctctgagacatgctccatcaacgacggcatctgctttgtggctgcctgcaagggccccagtgtctgaggccagcctggcagaagagggcctgaccgagaggggaagtcatgaccagagcatctacagtcttgccccacagctccccctaaaagcagtgcagcccaagagagaagcctcgagtgaagactcacaggtgctggctgtgggaagttcagccagcatgctgagggaatgggaagaggcagcaagagcatctgcaacagacatgaaatgtcctgttggctggg

SEQ ID NO: 123789 - DNA, 864 bp, Homo sapiens
atgcaggcacagcactcagcactgtgtgagtcacatggtcatagtcagtacaaggaagccaccagcattatagtcactatcatcaccacaaccacccccatcaccatcatcaaagtccatatctgcaccatcatcactatgactgtcatctccatcaccaccatcacaatgatcattaccaccgtcatatctcggtatatgacatctaatagaagattttgcagaattcttggatggtatcatctcaaccttttgacaacaatctgctcacccatgaaaaaagatgccagtattcttcaagtactacgagatattccaattgtcacaacttatagggggctgctacctgctactggcatctgttggctagaggtccgggatgctgctaaacatcctataatgcaaagaacacaggggcagggagagacaactctccaaccaaaatgtgacagacgtattccagggaagaaccccgatcgacttcataaaattgatggcaaatcattaggaaggctctcaggaggaaggcaggatttgagcagacaggagaagagtgcagtaggaggtcaaggtaacatacctgaagacatggatattgaagacaattgcaggcccaaacagaatgttcaaaggagaatcgatcacagaacaaggaatattaatgaatttaagggtgtagttccagaccttactggttgccttctgaaatatacatggcacatgggctccaacagggccagtactagtccatggcctgttaggatctgggccgcacagcaggagtccacggaaaaactgtcttccacaaaaccagtccctggtgtcgaaaaggttggggaccgctgggctataataactttctaa

SEQ ID NO: 123790 - DNA, 3434 bp, Homo sapiens
atgaaggagttctcatcaacagcacaaggcaatacagaagtgatccacacagggacattgcaaagacatgaacgtcatcacattggagatttttgcttccaggaaatggagaaagatattcatgattttgagtttcagtggaaagaagatgaaagaaatagccatgaagcacccatgacagaaatcaaacagttgacgggtagtacaaaccgacatgatcaaaggcatgctggaaacaagcctattaaagatcagcttggatcaagctttcattcgcatctgcctgaactccacatgtttcagaccgaagggaaaattggtaatcaagttgagaagtctatcaacagtgcttcgttggtttcaacatcccaaagaatttcttgtaggcctaaaacccacatttctaagaactatgggaataatttcctgaattcttcattactcacacaaaagcaggaagtacacatgagagaaaaatctttccaatgtaatgagagtggcaaagcctttaattatagctcagtcttaaggaaacatcagataatccatttaggagcgaaacaatataaatgtgatgtgtgtggcaaggtctttaatcaaaagcgatatcttgcatgtcatcgtagatgtcacactggcaagaaaccttacaagtgtaatgattgtggcaagaccttcagtcaggagttaacccttacatgccatcatagacttcatactggagagaaacattacaagtgcagtgagtgtggcaagaccttcagtcgaaattcagcccttgtaattcataaggcaattcatactggagagaaatcttacaagtgtaatgaatgtggcaagaccttcagtcaaacgtcataccttgtgtaccatcgtagacttcatactggagagaaaccttacaaatgtgaagaatgtgacaaagctttcagtttcaaatcaaaccttgaaagacataggaaaattcatactggagagaaaccttacaagtgtaatgaatgcagcaggacctttagtcggaagtcatcccttacacgccatcgtagacttcatactggagagaaaccttataagtgtaatgattgtggcaagaccttcagtcagatgtcatcccttgtataccatcgtagacttcatactggagagaaaccttacaaatgtgaagaatgtgatgaagctttcagtttcaaatcgaaccttgaaagacataggagaattcatactggagagaaaccttacaagtgtaatgattgtgagcaaagcctttacttcacattcacacctcattagacatcagagaatccatactggacagaaatcttacaaatgtgaagaatgtgatgaagctttcagtttcaaatcaaaccttgaaagacataggataattcatactggagagaaactttacaagtgtaatgaatgtggcaagacctttagtcggaagtcatcccttacacgccattgtagacttcatactggagagaaaccttaccagtgtaatgagtgtggcaaagcctttcgtgggcagtcagcacttatttaccatcaagcaatccatggtatagggaaactttacaaatgtaatgattgtcaccaagtctttagtaatgctacaaccattgcaaatcattggagaatccataatgaagagagatcgtacaagtgtaatagatgtggcaaatttttcagacatcgttcataccttgcagttcattggcgaactcatagtggagagaaaccttacaaatgtgaagaatgtgatgaagctttcagtttcaaatcaaaccttcaaagacataggagaattcatactggagagaaaccttacaggtgtaatgaatgtggcaagacctttagtcggaagtcataccttacatgccatcgtagacttcatactggagagaaaccttacaagtgtaatgagtgtggcaagaccttcggtcgaaattcagcccttataattcacaaggcaattcatactggagagaaaccttacaagtgtaatgagtgtggcaaggccttcagtcagaagtcatcccttacatgccatcttagacttcatactggagagaaaccttacaaatgtgaagaatgtgacaaagttttcagtcgcaaatcaagccttgaaaaacacaggagaattcatacttggaagagaaaccatacaaatgtaaggtttgtgacaaagcttttgggcgtgattcacacctgggcacaacatactagaattcacactggagagaaaccttacaagtgtaatgaatgtggcaagaacttccgtcacaattcagcccttgtaattcataaggcaattcatagtggagagaaaccttacaagtgtaatgagtgtggcaagaccttccgtcacaattcagcccttgaaattcataaggcaattcatactggagaaaaaccttacaagtgtagtgaatgtggcaaggtttttaatagaaaagcaaacctttcacgtcatcatagacttcatactggagagaaaccttacaagtgtaataaatgtggtaaggtttttaatcaacaagcacaccttgcatgtcatcatagaattcatactggagagaaaccttacaagtgtaatgagtgtggcaaaaccttccgtcacaattcagtccttgtaattcataagacaattcatactggagagaaaccttacaagtgtaatgaatgtggcaaggtttttaatcgaaaagcaaaacttgcacgtcatcatagaattcatactggaaagaaacattacaagtgtaatgagtgtggcaagacctactctcacaattcagtccttgtaattcataagacaattcacactggggagaaaccttacaagtgtaatgagtgtggcaaaaccttccatcacaattcagtccttgtaattcataaaacaattcatactggagagaaacaagctaatgctacaaccattgtaaatcactggagaagccataatgaagagagatcttacaaatgtaataattgtggcaaatttttcagacatcgttcatacattgccgttcattggcgaactcatgctggagagaaatcttacaatgtcatgattgtggcaaggtcttcagtcaagcttcatcttttgcaaaacaggagaattcatacaggagagaaacctcacaagtgtgatgatcgtggcaaagcctttacttcacattctcacctcattagacatcagagaatccatactggacagaaatcttacaaatgtcatcagtgtggcaaggtcttcagtccgacttcactccttgcagaatatcagaaaattcatttttcaggtaattgttcccaatgcaatgaatatagcaaaccatcaagcattgattgacattagagtcagttcagcattgacttgagtttgagttgacttaacattgagttcaagccttaaatgacattaaagtgcctatgtt

SEQ ID NO: 123791 - DNA, 1668 bp, Homo sapiens
atggcaggggcctgctggctgatggcattccagtactgggttctgaagttgctggtggtgaaatcagcatatggcctcgtcaaagctctctcaaatggaattggaatttcaaaggttgccaagacctggaaacctgggggaaaaaagagactagaaaattttatggctatcgaagaaatgaagaagcacagaagtactcatgtcggattcccagaaaacctgactaatggtgccactgctggcaatggtgatgatggattaattcctccaaggaagagcagaacacctgaaagccagcaatttcctgacactgagaatgaagagtatcacagggatttctccaagctctgtctgggttctgctgccaatggtgttgtccatgtagaagtcaaaatgtgtgtgtataatgggaaaggagagaggcaggaggagaagatgaagggattaatatccatgaaccttgtagttgaagaagaaatgaagaagcatgaaagtaataatgtgggattactagaaaacctgactaatggtgtcactgctggcaatggtgataatggattaattcctcaaaggaagagcagaacacctgaaaatcagcaatttcctgacaacgaaagtgaagagtatcacagcctgggcgacaagagtaagacttcatttcaaaacagcaacaacaacaacaacaaacaacaagaacaacaacaacaaaacccaacattttctaatacaaggaaactcactaagctttataaggcccccatccctccaagtattatcctttccggctgccccaacattaatgacagcaactggcaggaaattgagcatggaatgcagacggcaggcttgccaacaaggcctctttcccacggcctgcagcagaaaggggctgctttccgctgcttgggctgcaaatgctctgagcccttcaccggcagccttattttacagaaggcgaaaactaacacccagaaatggcaagctacttacccaaagtcacagaacgaacaacttgtaccgtcagtgggtaaaagctacaggtgctcaacaccagcccagcccatgaagacagccgtggggcataaaccctgcaaagccacaggtgcagagctgcccaaggccttgggagcccagcccttacatccctgtgccctggatgtgggacaaggtttcaaaaagggtaattttggagctgtaggattgaatggccttctgggtttggagtttcatggggtctcgggggtcttgttagtgggtcctggtgatgggggtctaatcagtgagggtgtggtcagggaagacctgatgtgtggggtctggtcagcaggaacctggtcagtggggactgctgagcgctgcttggagaagccaggtgcattgcacgttatcgagggccctctggacagctgggatggcccagtgatgcccaatggcccggtcaaaagtagacaaagcagttgtttggatggacctgggagatgttgctcagagattctgacaggacaaagccatggtaacaagaagccagccagagccagttcaaaatctagtcaatcgatcaatgaccgaccactggctgtgctcaccaaccaatatcagtgtgagcagcttgcttctgaaagacagccaagcagcaacagctgctccatcagaatagacagtgcctga

SEQ ID NO: 123792 - DNA, 889 bp, Homo sapiens
aggagaacagcaagaggtccccagcaaacatccacagatggccttggaacctcaccctgcaggaatgccagtgaacatactgctgacatcttggagctcagtaccctcatagtgtaacggcgtcagtagatctgcctgtgcttggacttcctgtactacccattcctgaggggcgatgcttctgcagggcctgtgacttggtgcacaacttcagacaccatcatcttgcagcagcaccgcaccctcactagccagggtgttgatgacttcctcaaggccaaggccacattcaaggcttcggactttattgatgcgcttgtgctgagcaaggtggcttctccaaggatcttaattcaaggaggtagaatgggagcttgagatcaagtgtctgatcaagcctcagtgtatgggcgctgttcatcctctggtgctgaagcagccaagagacccaagtctgcctggctgcctcttaggatatgacagcagagccagtggcctctactagatcctgtacaacctcacaaaacacccagacatcgggagtgctgccagcctgtgatgcaagagtcctaatcctgaagacattgaatgacctgtcattctgctgtttttaccaaaaaggatcatgaggatcagagaggaaaagtcacttgcccaaagtcacacagctgaacaagtggtggagttcaactttgaccatgggctgtctggccccaaggtgtatgcttgcttctctcccaagagactcctttcttatcaggctcaaatgaatgaaaggagggatgttaaagttcctagaagctttaattgaatgaaagttcctagtagatctggtacctactaaaaaaccacacttctggaagctacgtggcccaccagaagacacagc

SEQ ID NO: 123793 - DNA, 851 bp, Homo sapiens
atggtcattgttggcctggcagcgggggtcttgttagtgggtcctggtgatgggggtctaatcagtgagggtgtggtcagggaagacctgatgtgtggggtctggtcagcaggaacctggtcagtggggactgctgagcgctgcttggagaagccaggtgcattgcacgttatcgagggccctctggacagctgggatggcccagtgatgcccaatggcccggtcaaaaatcataaaggagaacagcaagaggtccccagcaaacatccacagatggccttggaaatctgcctgtgcttggacttcctgtactacccattcctgaggggcgatgcttctgcagggcctgtgacttggtgcacaacttcagacaccatcatcttgcagcagcaccgcaccctcactagccagggtgttgatgacttcctcaaggccaaggccacattcaaggcttcggactttattgatgcgcttgtgctgagcaaggtggcttctccgggatcttaattcaggaggtagaatggagcttgagatcaagtgtctgatcaaggtacttgaacttgatctggagggctctggggagccatggaagatgctggataaaggagtgacagtcagctatgttttcgagatgactgtaaaagcctgcctggaaggagtgaacaagagccaggagaccagggagggagcttgtggggcaggtctggagatggcgagggagggatcctgcttggatgaaaggtcttcagggactgtctcaagttacacacaggtgtcctcagagctagtgtgttcagggttcttgtctccaggatgaaaatgggaaggagttgtcagacgaggacatataa

SEQ ID NO: 123794 - DNA, 380 bp, Homo sapiens; identical to SEQ ID NO: 87575

SEQ ID NO: 123795 - DNA, 568 bp, Homo sapiens
  misc_feature (1)...(568): n = a,t,c or g
tggaattcggcaaaatcaataagaagcgaattgctttgacagataacgctttgattgctcgatctcttggtaaatacggcatcatctgcatggaggatttgattcatgagatctatactgttggaaaacgcttcaaagaggcaaataacttcctgtggcccttcaaattgtcttctccacgaggtggaatgaagaaaaagaccacccattttgtagaaggtggagatgctggcaacagggaggaccagatcaacaggcttattagaagaatgaactaaggtgtctaccatgattatttttctaagctggttggttaataaacagtacctgctctcaaattgggnnnnnnnnnnnnnnnnnnnnnnnnnnnnnnnnnnnnnnnnnnnnnncccctttnnnnnnnnnnnttttaannnnnnnnnnnnnnnnagnnnnnnnnnnnnnnnnggggcccctaaaataaaatccgggggcgggttttaaaaacnnnnnnnnnnnaaaaacccgggggttacccaaatttaaggggttgggaaaaaccccctttttnnnnnnnnnnaaaaaaaag

SEQ ID NO: 123796 - DNA, 400 bp, Homo sapiens
ttttaatgttaaaaatatttattttttttcctaaaagatcacacaaaagtcgggaagagaaggatgtcaattagactacatcaaaatctgggcagagggaggacaaagagctgcctaaagaaactggtagctggagcaaactgcagagatcaagatgaccctagtccacggaaccagcagcccaggtcagccacattcaggccttctcccaatcgctgccattgaattcctcagtgaccatactccgcacagtgccctcatccaggcagtggggggcaattccgaagcctccggggtttgatcgtggagtatagaagctctgaacgccacatctcttacagaaggtatgctgggctttgtgagtattgaacgtgtaagtcgttatgtgctcagctccctt

SEQ ID NO: 123797 - DNA, 1137 bp, Homo sapiens
atgcggcgatcgaggagctctgcggccgccaagctgcgcgggcagaagcggtccggggcctccgcggcccccgcggcctccgcggccgctgccttggcacccagcgccacccgcacacggcgctccgctagccaggccgggagcaagagccaggcggtcggagaagccgccgtcggagaagccgcggctgaggcgctcgtcgccgcgggcccaggaggagggcccgggggagccgccgccgcctgagctggcgttgctcccgccaccgccgccgccgccgccgactcccgcgaccccgacgtcctcggcgtccaacctggacctgggcgagcagcgggagcgctgggagacgttccagaagcggcagaagcttacctcgaaagggtgccgccaagctcctgctagacacctttgaataccaagggcctggtgaaagcacacaggaggctgccacttgtggaagcagttcgtttttgaaagttttgggcctcagcagactttgcatatatttgactgcaattgcagcattttgcaagaagaagcagaatagacacttcattgttccagcttctcgcttcaagctcctgaagggagctgagcacataacgacttacacgttcaatactcacaaagcccagcataccttctgtaagagaatgtggcgttcagagcttctatactccacgatcaaaccccggaggcttcggaattgccccccactgcctggatgagggcactgtgcggagtatggtcaactgagggaattccaatggcagcgattgggagaaggcccatgaaagagcacaagaccatcaagaacatgtctaaagagtgagcttctggcctctcctgccctgaaaaggaggaatgattggggccagcaactttgctctccctgccgtgcctcgggtggtgctcctgaatgtggctgacctgggctgctggttccgttgactagggtcatcttgatctctagcagtttgctccagctgaccagtttctttagggcagctctttgtcctccctctggcccagattttgatgtagtctaatttgacatccttctcttcccaacttttgttgttgatctttttagggaaaaaaaataaatattttttaacattaaagcaaaaaaaa

SEQ ID NO: 123798 - DNA, 663 bp, Homo sapiens
atggtgcaagccattggccctcagtgcagacctcaggccaggcgagacaaccgtagcaacagctcacagcaatccatagtcactgggctcacctgctgctgtcagagcggcctccaccccccaattgagggcccctcttatgacagctatggaagaggatccactactaagcctgtgccagggttggatgggccccccggaggctctggagcagcccgcaacaccagccacggagcaggggggaatcggtatcccatgggccagaacatggctgattacattatgagggcaggaggaaggcaacggcagttgcggcctccagcagataaactggccgctgttgctgccgaagtggaggtggagcgatctctctttgagtcggcatggaagaaggagaaggacatcgtttccaaggagatagagaagctccgcacgtccatccagaccctgtgcaagagcgcacttcccctggggaagatcatggactacatccaggaagacgtggatgccatgcagaatgagctgcagatgtggcacagcgagaacaggcagcacgccgaggccctgcagcaggagcagagcagtgtcccgcacgaggaaggagctgtaagtactgatgactggcacactcgggcctcctgccctctggcagctgaaatgtga

SEQ ID NO: 123799 - DNA, 1038 bp, Homo sapiens
atggtggcctttctttctctcttgaaggtgattagaatgactggtttcatgaagggcctctacacagacgccgagatgaagtctgataatgtgaagctctctagtgacgatgcggtgcggagggttttagctggagagaagggagaagtgaaaggccgggcctcactgacctcaagatctcaggaattggataataagaatgtgcgagaagaagagtccagagttcacaaaaatacagaggtgaattccaagtcgcacatctttgaaaatgaaatagatagaggagacgctgaaataaaagagagaagtacaagcagagatcgaaaacagaaggaagaattgaaagaagaccgcaagccaagagaaaaggacaaggacaaggagaaggccaaggagaatggcggaaacagacacagagaaggggagagagagagagccaaagcccgggccaggccagacaacgagcgacagaaagacagaggcaacagggagcgggacagagactccgagcgcaagaaggagacagagagaaagagtgagggggggaaagagaaggagagactgagagacagggaccgagagcgcgaccgggacaaagggaaggacagggacagacggagagtgaaaaacggggagcactcctgggacctggacagggagaagaacagagagcatgacaaacctgagaaaaagtcagcaagctcaggggagatgtctaaaaagttatcagatggaacttttaaagactccaaggctgaaacagagactgagatttccactagagcttccaagtcattgacaacaaaaacatcaaaacggcgatccaaaaattcagtggaagtgttgttaaggcatgctgattttgatggacgaaaaacaaaaacgttgatgaccagtgaaatggtccttgtcatcgcgtggtcctgccacagcgcggacctggggtctctgtcctcgcagttgcaggtgttaccttgcactggtcatggtttaacatttggaattcagagtttgctggcagttgttacagttccttaa

SEQ ID NO: 123800 - DNA, 2575 bp, Homo sapiens
atgcgggccgcggggggagccatgctgtgtgggaagcaggggcggtgggatccggagggggaaggagcccaccctggtttcattcctaagctggcctgctcttcccagggtgtgtttcgtcagctgcatctccgaacagcagtaactgctgccgtgtcgaggcacttccctcagccatcctggaggtacgacccaggtccccagtttttaggtgagaaaagtggcttcaaaccccgctgccctggtgtggcagtttgtcaatttcagagcatgaatgcctttatccattggttcaggaacaaggcctgggccagctcctgtgacagaatcaaaatacccgtcccaccagaagccactttcgtggaacctaactgtctgccaggagagataggccagctcctccggcagctgcagtcaggtcgtaatctgaaggagtggctgagggagcaattttgtgatcatccgctggagcactgtgaggacacgaggctccatgatgcagcttacgtcggggacctccagaccctcaggagcctattgcaagaggagagctaccggagccgcatcaacgagaagtctgtctggtgctgtggctggctcccctgcacaccgttgcgaatcgcggccactgcaggccatgggagctgtgtggacttcctcatccggaagggggccgaggtggatctggtggacgtaaaaggacagacggccctgtatgtggctgtggtgaacgggcacctagagagtacccagatccttctcgaagctggcgcggaccccaacggaagccggcaccatcgcagcacccctgtctaccacgcctctcgcgtgggccgggcagacatcctgaaggccctcatcaggccagctgcgtgtgatcgcagtgtgtccattactgccgatactcacttccgttatttgattaaggtggtgcctgccatgtttcgctcccgtaaagctattccttttctctctagctgcacagcgtggcgttgtgcagatgagctgcagttcattcagccagtcccgttagtggacacgtcagggagtggtaaaaccgtttcaaatgtgattacagagtcacacaattctgacaatgaagaggatgatcaatttgtggtggaagctgcccctcagctctctgaaatgtcagaaattgaaatggtaacagcagtggaactagaagaagaggagaagcatggtggacttgtgaaaaaaattttggagacgaagaaagattatgagaaattgcagcagtcacccaaacctggggagaagccttctgctactggctggcatggtgagtgcctgggcaccaggaacagggcacaaggggcactcgtgggctggggctggctgtacagtgagagacattcaggaatgttacgagccattacattaaaatacaaaggtggggggcgtcaaggaattcaggcccctggaaaagtgaaaccttccgctccagagcagcccctgaaaatcctctgggtcgctggggatttgccctcctttccaagatcatctcctaacgacaggttcttcaagttacacttctccctgagtccccaagcccgtgtaaatagccggttccctggatctgggaaggctgggctggggctgtggatggaaggtgcccgccctagtggtcatgtgcccaaggaaagggtagtggctggcaagaggccacaggtcccaacaaaagcacatcacacatgtgtgagggagactgcggggaaccaggagggtaatggggagggggccctgcagcaggagcagaggttgggggtagcagaggcagggagtaatggggagggggccctgcagcaggagcacaggatcacagactgtgccgtggagcccttaaaggctgagctcgcggagctggagcagctgatcaaagaccagcaagacaagatctgtgctgtgaaggccaacatcctcaagaatgaagaaaaaatccagaaaatggagcgatctctctttgagtcggcatggaagaaggagaaggacatcgtttccaaggagatagagaagctccgcacgtccatccagaccctgtgcaagagcgcacttcccctggggaagatcatggactacatccaggaagacgtggatgccatgcagaatgagctgcagatgtggcacagcgagaacaggcagcacgccgaggccctgcagcaggagcagaggtacggggctgatgttgacgtcaaccaccacctgactcctgatgtccagcctcgattctcccggcggctcacctccttggtggtctgccccttgtacatcagcgcagcctaccacaacctccagtgcttccggctgctcctcctggctggcgcgaaccctgacttcaactgcaatggtcctgtcaacacacagggattctacaggggctcccctgggtgcgtcatggatgctgttctgcgccacggctgtgaggcagccttcgtgagcctgctggtagaatttggagccaacctgaatctagtgaagtgggaatcgctgggcccagagtcgagaggaagaagaaaagtggaccctgaggccttgcaggtctttaaagaggccagaa

SEQ ID NO: 123801 - DNA, 1978 bp, Homo sapiens
catgaagggcctctacacagacgccgagatgaagtctgataatgtgaaggataaagatgcaaaaattagcttcctacaaaaggccatagacgtggttgtaatggtgtcgggagagccactgttggccaaaccagcccgaatcgtggcggggcatgagcctgaaagaacaaacgagctgctccagataattggaaaatgctgtctcaacaagctctctagtgacgatgcggtgcggagggttttagctggagagaagggagaagtgaaaggccgggcctcactgacctcaagatctcaggaattggataataagaatgtgcgagaagaagagtccagagttcacaaaaatacagaggatagaggagacgctgaaataaaagagagaagtacaagcagagatcgaaaacagaaggaagaattgaaagaagaccgcaagccaagagaaaaggacaaggacaaggagaaggccaaggagaatggcggaaacagacacagagaaggggagagagagagagccaaagcccgggccaggccagacaacgagcgacagaaagacagaggcaacagggagcgggacagagactccgagcgcaagaaggagacagagagaaagagtgagggggggaaagagaaggagagactgagagacagggaccgagagcgcgaccgggacaaagggaaggacagggacagacggagagtgaaaaacggggagcactcctgggacctggacagggagaagaacagagagcatgacaaacctgagaaaaagtcagcaagctcaggggagatgtctaaaaagttatcagatggaacttttaaagactccaaggctgaaacagagactgagatttccactagagcttccaagtcattgacaacaaaaacatcaaaacggcgatccaaaaattcagtggaaggtgactccaccagtgatgcagaaggagatgctggacctgctggccaagataagtctgagggtgccagagactccagaaattcctaatgagctttcatccaacatcagaagaattcctcggcctgggagtgcaagaccagcccctccccgggtcaaacggcaagacagcatggaggcgctacaaatggataggtcagggagtggtaaaaccgtttcaaatgtgattacagagtcacacaattctgacaatgaagaggatgatcaatttgtggtggaagctgcccctcagctctctgaaatgtcagaaattgaaatggtaacagcagtggaactagaagaagaggagaagcatggtggacttgtgaaaaaaattttggagacgaagaaagattatgagaaattgcagcagtcacccaaacctggggagaaggagcgatctctctttgagtcggcatggaagaaggagaaggacatcgtttccaaggagatagagaagctccgcacgtccatccagaccctgtgcaagagcgcacttcccctggggaagatcatggactacatccaggaagacgtggatgccatgcagaatgagctgcagatgatatcacagcgagaacaggcagcacgccgaggccctgcagcaggagcagaggatcacagactgtgccgtggagccctttaaaggctgagctcgcgtgagctggagcagctgatcaaagacccagccaagacaagatctgtgctgtgaaggccaacatcctcaagaatgaagaaaaaatccagaaaatggtatatagtatcaatttgacttcgagaaggtgaacactcaaaagtttcagagatgaaaagtcacctcagtttaaaagcaaaaaggaagatagaaaatcattactcttttaagttccagtttgctaagaaaatgaacagtttacaatgttattatccagctaattttcagagctttaaaactgtaagcatgttaagtgtattaaaaaaaccatgttttcttacctccttccagatggaatactggctagttataaatagcgcttccaaaca

SEQ ID NO: 123802 - DNA, 1209 bp, Homo sapiens
atgctggccaccaccagcccaggacgacagctggcctcacagtcccgggggccacacccagcagacccaccctggggctgccagcagggtgacgggccaacctgccaactcaaccttactgccactgtggcctggcgccggccgcgctcaccaggattgtgggcggcagcgcagcgggccgtggggagtggccgtggcaggtagacctgtggctgcggcgccgggaacaccgttgcggggccgtgctggtggcagagaggtggctgctgtcggcggcgcactgcttcgacgtctacggggaccccaagcgtgggcggccttcctaggcacgccgttcctgagcggcgcggaggggcagtggagcgcgtggcgcgcatctacaagcacccgttctacaatctctacacctcgactacgacgtggcgctgctggagctggcggggccggtgcgtcgcaccgcctggtgcgtcccatctgcctgcccgagcccgcgccgcgacccccgacggcacgcgctgcgtcatcaccggctggggctcggctccatggcgcgcagctgcagaaggcggccgtgcgcctcctcagcgagcagacctgccgcgcttctacccagtgcagatcagcagccgcatgctgtgtgccggcttccccagggtggcgtggacagctgctcgggtgacgctgggggacccctggcctgcagggagccctctggagcgcccgtccccggccagccccgcacctgcacagctcctgcgcgttggccacggcgatctgcactttcacctgctccattatgagccctgggtccagcttcccgctgccggagcccccgaaatcggagccgaagccgccctccatggctccgcaaagtcaccaggaccgaggccgcgtgcgccgactcgtaactaactgcgccggaagcgggccgcccggggcaccacgggaaacggagtccgcgcggacggggacggaggactacaactcccacacgaccgcgcgcgcccgggccattcaaggtcgcgcggggggccctccgctcatgcggaggcctggacctgccgttacttacacgagcttacggtggttgcgaccacgcggttagaggtaggccctgtcttgaccggcgagtagtgaggttactacatgcggccgaatacaatcgctatgtactcgcactctgccttcagttagtttggaaggtcgaaa

SEQ ID NO: 123803 - DNA, 443 bp, Homo sapiens; identical to SEQ ID NO: 113129
  misc_feature (1)...(443): n = a,t,c or g

SEQ ID NO: 123804 - DNA, 286 bp, Homo sapiens
cgcagtgatcagcaccgtagagcggggcgcgggccgcggacgaccccaggcgaagcccattcccgaggcagaggaggcgcagaggcctgagccggtggggacctcgagcaacgctgactcggcctccccggacctgggtccccggggtcctgacctggcggttctgcaggcggagcgggaagtggacatcctgaaccacgtgttcgacgacgtagagagctttgtatcgaggctgcagaagtcggcggaggcggccagagtgctggagcaccgggaacgcggccgc

SEQ ID NO: 123805 - DNA, 1059 bp, Homo sapiens; identical to SEQ ID NO: 114869

SEQ ID NO: 123806 - DNA, 933 bp, Homo sapiens; identical to SEQ ID NO: 117142

SEQ ID NO: 123807 - DNA, 2286 bp, Homo sapiens; identical to SEQ ID NO: 116755

SEQ ID NO: 123808 - DNA, 930 bp, Homo sapiens
atggaaagaataggaagaaaaggaggaagaggaaaagatggaggagaaggaggagaggaaaaggagaaggaagaggaagaggaggagggaagagggaagagatggggaaagaaaaagaatggagaagcaaaaggagaaccaggatcctactcagcccacctgcacccaggtgaaataaacagccatgttgctcacacaaagcctgtttggtggtctcttcacacggacgcgcatgaaatttggtgccatgactcctatcgggggacctcccttgggagatcaatcccctgtccttctgctctttgctccttgagaaagatccacctacgacctcaggtcctcagaccgaccagcccaagaaacatctcaccaatttcaaatccggctgctcctcgccagaccgagctaggtcccaattcttcctcagcctccgctcctccaccctataatccttttatcgcctcccctcctcacacctggtccggcttacagtttccttccatgactagccctccccctcctgcccagcaatttactcttaaaaaggtggctggagctaaaggcatagtcaaggatttaattaacctcaccttcaaggtgtacaataatagaaaaaagttgcagttccttgcctccactgtgagacaaaccccagccacatctccagcacacaagaacttccaaacgcctgaactgcagcagccaggtgttcctccagaacctcctccccgaggagcttgctacaagttccagaaatctggccaccgggccaaggaatgcctgcagcccaggattcctcctaagccacatcccatctgtgtgggaccccactggaaatcggactgtccaactcacctggcagccactcccagagcccctggaactctggcccaaggctctctgactccttcccagatcttcttggcttag

SEQ ID NO: 123809 - DNA, 247 bp, Homo sapiens
ctggcaaccactcccagagcccctggaactctggcccaaagctctctgactccttcccagatcttctcggcttagcagctgaagactgacaccgcccaattgcctcggaagctctttgttgagtcccacaattaccattgttcttggcctggacttcaatccggcctcccacattattctggataccacacctcatcctcatgactgtatctctctgatccagctgacattcaccccatttccccat

SEQ ID NO: 123810 - DNA, 414 bp, Homo sapiens
  misc_feature (1)...(414): n = a,t,c or g
cacgtcttacgtaggctgagactggagagtttccgtggactcgtaaccctgcctttgtccctgcactgaagggtgtaaggtggttgctttctgcatgagccagtgtttctcagccttggtgctgctgccatctnnnnnnnnnnnnnnnnnnnnnnnnnnnnnnnnnnnnnnnnnnnnnnnnnnnnnnnnnnnnnnnnnnnnnnnnnnnnnnnnnnnnnnnnnnnnnnnnnnnnnnnnnnnnnnnnnnnnnnnnnnnnnnnagtggagagcaaaatcacccagcagagaactgctaggctagagaggtgcaggatcctaggctgggtgcggggnnnnnnnnnnnnnnnnnnnnnnnnnnnnnnnnnnnnnnnnnnnnnnnnnnnnnnnnnnnnnnnnnnnnnnnnnacgcgtggg

SEQ ID NO: 123811 - DNA, 560 bp, Homo sapiens
  misc_feature (1)...(560): n = a,t,c or g
caacgtgactcggcctccccggacctgggtccccggggtcctgacctggcggttctgcaggcggacggagaagtggtgagccgctaaggaaggggtctgggggcagggcaggcgactggaggcggggctagggcgtggaagggcggggcggctgcgggacgggcgttctctggtcagacttctgcgttatggaagaggggctgggtcgggggcggggcttggttgtggggcgtggcaggtgtttggggcgtggctgatctggggaagtgtataggtgctcaggttcagggcttcgacggggatggttttggaactcgggagccctgagcgtccccctcctctgtcccctaggacatcctgaaccacgtgttcgacgacgtagagagctttgtatcgaggctgcagaagtcggcggagcggccagggtgctggagacggngaacgcggccgcagaagccggcgcngggcgttgnggggtaaaggggcacctggcgtgggatctgaacccctcccgatctcttccaaatgtccccgctctccccangctctccctcncgcaa

SEQ ID NO: 123812 - DNA, 602 bp, Homo sapiens
gtttcagaggtgtcagaccacgcagggacgcctgccttggtccttcacccttagcggcaagtcccgcttttctggggaaggggcaagtaccccaaccccttctctctgtgtctctaccccttctccgcctttctggggggcaagaaacacccaaccccttctccttcaccctgagtggcaagtccgcttttctagaggagcaagtaccccaacctcgtatctctgtgccccagtcccttatttccacgccccgacctcttatctctgtggcccaatcccttatttctgcaccccaacctcttatatctctgtgccccaatcccttatttccatgccccgacctcttatctctgcaccccaaccccttatttccacgacccaacccctttcccgcttttctggaaggagcttgctacaagtgccagaaatctggccaccaggccaaggaatgcctgcagcccgggattcctcctaagctgcgtcccatctgtgcgggaccccactggaaatcggactgtccaactcacctggcagccactcccagagcccctggaactctggcccaaggctctctgactgcttcccagatcttcttggcttag

SEQ ID NO: 123813 - DNA, 546 bp, Homo sapiens
gctgctcctcgccagaccgagctaggtcccaattcttcctcagcctccgctcctccaccctataatccttttatcgcctcccctcctcacacctggtccggcttacagtttccttccatgactagccctccccctcctgcccagcaatttactcttaaaaaggtggctggagctaaaggcatagtcaaggatttaattaacctcaccttcaaggtgtacaataatagaaaaaagttgcagttccttgcctccactgtgagacaaaccccagccacatctccagcacacaagaacttccaaacgcctgaactgcagcagccaggtgttcctccagaacctcctccccgaggagcttgctacaagttccagaaatctggccaccgggccaaggaatgcctgcagcccaggattcctcctaagccacatcccatctgtgtgggaccccactggaaatcggactgtccaactcacctggcagccactcccagagcccctggaactctggcccaaggctctctgactccttcccagatcttcttggcttag

SEQ ID NO: 123814 - DNA, 180 bp, Homo sapiens
cctcgacgatttcgttggccgaatgcttactctaatgggctgtcccattcctgagtgtctagagttcccagcccgcttagggaaggaaggaaaacacaggcagctctaagtgtacgacgagggaggtctcatcggcggtgaggaagcccaggcgggtccccttcccagctgaaaggggtt

SEQ ID NO: 123815 - DNA, 420 bp, Homo sapiens; identical to SEQ ID NO: 114509

SEQ ID NO: 123816 - DNA, 1029 bp, Homo sapiens
atgaccttgggccctctgaccaaccagcgcaaggaacatctcaccaatttcaaatcagtctccaccccaagttctgagtcctttgaatgcttcttttctacggactcatctgacctctccccttctcctcaagctgctcgtcgccaggccgagccaggagcttgctttaagtgctggaaatctggccactgggctgaggaatgcctgcagcccaggattcctcctaagctgcatcccatctgtgtgggaccccactggaaatcggactgtccagctcacctggcagccactcccagagccgctggaactctggcccaaggctctctgactccttcccagatcttcttggctgagtggctgaagactgacactgcccgatcgcctcagaagcctcctggaccgtcacagacactttgggtaactcttacagtggaggtggctgccactgctttaatacttttagaggccctcaaaatcacaagctatgctccacttactctctacagttcccataactttcaaaatctattttcttcctcacacttaacgcatatactttctgcccccaagacccttcagctatactcactctttgttgagtcttccacaatcaccattgttgctggcccagacttcaatccggcctcccacattattcctgataccacacctgacccccatgactgtatctctctgatccacctgacattcattccatttccccatatttccttctttcctgttcctcaccctgatcacacttggtttattgatggcagttccaccaggcctaatcgccacacaccagcaaaggcaggctatgctatagtatcttccacatttatcattgaggctactgccctgcccccctccactacctctcagcaagccaaactcattgccttaactcaggccctcactcttgcaaagggactacttgtcaatatttatactgattctaaatatgccttccatatccagtaccaccatgctgttatatgggcagaaagaaatttcctcactacataa

SEQ ID NO: 123817 - DNA, 1083 bp, Homo sapiens
cccacgcgtccgcagcactaggccggcagaatctgagcgatgtctttcacactccctgccctgctctgcgtcggtgaggtctggcgtggaaggggaatgggatcacggtgtgcctgggaggcaacaggtctcattactcccgtcttccagggctgtgtctgagtcagaggatcagcgcccagcagcagactctcccaaaaccgttcatctgggccgagccccatttcatggttccaaaggaaaagcaagtgaccatctgttgccagggaaattatggggctgttgaataccagctgcactttgaaggaagcctttttgccgtggacagaccaaaaccccctgagcggattaacaaagtcaaattctacatcccggacatgaactcccgcatggcagggcaatacagctgcatctatcgggttggggagctctggtcagagcccagcaacttgctggatctggtggtaacagaaatgtatgacacacccaccctctcggttcatcctggacccgaagtgatctcgggagagaaggtgaccttctactgccgtctagacactgcaacaagcatgttcttactgctcaaggagggaagatccagccacgtacagcgcggatacgggaaggtccaggcggagttccccctgggccctgtgaccacagcccaccgagggacataccgatgttttggctcctataacaaccatgcctggtctttccccagtgagccagtgaagctcctggtcacaggcgacattgagaacaccagccttgcacctgaagaccccacctttcctgaccatgccctctgggatcacactgcccagaatctccttcggatgggcctggcctttctagtcctggtggctctagtgtggttcctggttgaagactggctcagcaggaagaggactagagagcgagccagcagagcttccacttgggaaggcaggagaaggctgaacacacagactctttgaagaatgaccatgagacaacagtggccatgggtggatctgaaagctggtgttgagcctgggcggcgtgagctctgtgttggacccacggaggagggagtcactg

SEQ ID NO: 123818 - DNA, 849 bp, Homo sapiens
  misc_feature (1)...(849): n = a,t,c or g
ttgtgtgaggtcttgagacatccagaatgtaacctgcgatatctcgggttggtgtcttgttccgctaccactcagcagtgggctgatctctccttggcccttgaagtcaaccagtccctgacgtgcgtaaacctctccgacaatgagcttctggatgagggtgctaagttgctgtacacaactttgagacaccccaagtgctttctgcagaggttgtcgttggaaaactgtcaccttacagaagccaattgcaaggaccttgcttgctgtgttggttgtcagccgggagctgacaccacctgtgcttggccaagaaccccattgggaatacaggggtgaagtttctgtgtgagggcttgaggtaccccgagtgtaaactgcagaccttggtgctttggaactgcgacataatctagcgatggctgctgcgatctcacaaagcttctccaagaaaaatcaatgcctgttgtgtttggatctggggctgattcacataggagttaagggaatgaagttcctgtgtgaggctttgaggaaaccactgtgcaacttgagatgtctgtggttgtggggatgttccatccctccgttcagttgtgaagacctctgctctgccctcagctgcaaccagagcctcgtcactctggacctggggtcagaatcccttggggttctagtgggagtgaagatgctgttttgaaaccttgacatgttccagtgggcaccctccgggacactcaggtttgaaaatagatggactttnaattgatggaacttcaattaagctgcttgggaaggaaataggaangaaaaaaacccacaantggttatttgattantgaggnaact

SEQ ID NO: 123819 - DNA, 1188 bp, Homo sapiens
tcatgggcctctggattggtcatgtggcatcccaaccactagactgagtggggatagctgccacagcaagccccaaccagactggtccttgtgcccatgtgtgggtatgtgagcatttggctgctttactactggagtgggcagagttactgacagtgatgggcccttgtacactggtccttgggcccctggcagccactcccagagcccctggaactctggcccaaggctctctgactccttcccaggtcttctcggcttagcggctgaagactgatgctgcccgatcgccttggaagccccatagaccatcatagacgccgagcttcgggtaactctcacagtggaggcagtttaaattctagtgaagtgatggaatatagagcaggggaaaggacagagggagtttgcgagtcgacaaggcagaaactggagtacacgagtgctggaaccagctggctgctttggcactggcaggagcgaactccatgcactctgacctgctatgttccacccctcatgggagggagcatgcagcctctctcactgtccctcaaccactttctcctttccactcttcaatctctcccttctcttaatttcaattcctttcattttctgggagagacaaaggagacacgttttatccgtggacccaaaactccggtgccggtcacggactgggaaggcagccttcccttggtgtttaatcattgcagggacacctctctgattatacacccacgtttcacgggtgtcagaccacgcagggacgcctgccttggtccttcacctttagcggcaagtcccgcttttctgagggaggggcaagatttaactaacctcgccttcaaggtgtacaataatagaaaaaagttgcaattccttgtccccactgtgagacaaaccccagccgcatctccagcacacaagaacttccaaacgcctgaaccgcagcggccaggtgttcctccagaacctcctcccccaggagcttgctacaagtgccagaaacgtggccaccaggccaaggaatgcctgcagcccaggattcctcctaagccacgtcccatctgtgccggaccccactggaaatcggactgtccaactcacctggcagccactcccagagcccctggaactctggcccaaggctctctgactgcttcccagatcttcttggcttag

SEQ ID NO: 123820 - DNA, 1655 bp, Homo sapiens
tcgcggccgcaggagccggcgccgggcggctggggagggcttgctgacgctgcgggccaagccgccctcggaggccgagtacaccgacgtgctgcagaagatcaagtacgccttcagcctgctggcccggctgcgcggcaacatcgccgacccctcctctccggagctgttgcacttccttttcgggcctctgcagatgattgtgaacacgtcgggggggccggagttcgcgagcagtgtgcggcggccgcatcgtgacatcggatcgccgtggcgctgctgcgggaacaacgtcactccacgtgaaaacgagctctggacctcgctgggggactcgtggacccgccccgggctgggagctgtccccggaggagggacccccatacagacccgagttcttcagcggctgggagccgccggtcactgacccgcagagccgcgcctgggaggacccagttgagaaacagctacagcacgagcggaggcgccggcagcaaagcgccccctcaggtcgctgtcaatgggtcaccggagacttggagccagaatctgagcctcagctggagtcagagacagcaggaaaatgggtcctgtgtaattatgacttccaggccccgcaacagcagtgaagctgtccggtcaagcagcggggacgtactgggaggtcctgggatgacagtcggtaagtggtggaaggttcgggacccagcggggcaggagggatatgtgccctacaacatcctgacaccctaccccggaccccggctgcaccacagccaaagccctgcccgcagccatgaacagcactcctcctccaccaccagccccagccccaggccccacctccagctctggctcggccccgctgggacaggccccgctgggacagctgcgatagcctcaacggcttggaccccagcgagaaggagaaattctcccagatgctcatcgtcaacgaggaactgcaggcgcgcctggcccagggccgctcgggaccgagccgcgcagtcccagggccccgcgccccggaaccgcagctcagcccgggctcggacgcctccgaggtccgcgcctggctgcaggccaagggctttagctccgggaccgtggacgcgctgggtgtgctgaccggggcgcagcttttctcgctgcagaaggaggagctgcgggcggtgagccccgagggagggggcacgtgtgtacagcccagtcaccgtgcagcgctcgctgctggaggacaaaagagaaagtgtcagagctggaggcagtgatggagaagcaaaaggaagaaggtggaaggcgaggtggaaatggaggtcatttgacctgccaggcgcccttcgcaaagagtgacgaggccccgtgggagaacggacctcctcagactctccccaatagcggaagtcgatcttctgaaggatggccaatctgctccggccctggtcttcccccactcccggtggacagacttaacgatccttgctgcagtccctccggagaggatctggactggctgggagtggggagggcgtggagacagtctacggaaagcgctagcagacccccgagagggtgcagtggagccctgagcattgtaatactgcggcccagccctataaacatgcctccgtgcttagcaaaaaaaaaaaaaaaag

SEQ ID NO: 123821 - DNA, 795 bp, Homo sapiens
aattattattattttttattttactagtccttgcctgcatacatttcctccagggtacagagcttatgtggttctttgaccaaatactgttctagtcattgcatgtattagagaccaaggctttcctcgtcaaatcaattctgcatggttttcccatcttcttggttttctttttttttttttttttttaattttttattgatcattcttgggtgttttctccaaaagggggatttggcagggtcataggacaatagtggagggaaggtcagcagataaacaagtgaaacaaaaggtctctggttttcctaggcaagaggacactgcggccttccgcagtcgtttagtgtccctgggtacttgagattagggagtggtgatgactcttaacgagcatgctgccttcaagcatctgtttaacaaagcacatcttgcaccgcccttaatccatttaaccctgagtggacacagcacatgtttcagagagcaccgggttggggggtaaggtcttagattaacagcatcccaagggcagaaagaaattttccttagtacagaacaaaaatgggagttctccctattgtctacttctttctacacagacagggcaaccatccgatttctcaatcttttcccccacctttcccccctttctattccacaaaaccgccattgtcatcatggccagttctcaatgagctgttggatacacctcccagacagggtggtggccgagcagagagtctcctcacttcccagtaggggtggccgggcagaggcgcccctcacctcccg

SEQ ID NO: 123822 - DNA, 574 bp, Homo sapiens
tccccgctgcgcccgctgctgctggccctggcccttgcctccgagccttgcgcccagggcgcctgccccgcctccgccgacctcaagcactcggacgggacgcgcacttgcgccaagctctatgacttgtagcgacccctactatgagaactgctgcgggggcgccgagctgtcgctggagtcgggcgcagacctgccctacctgccctccaactgggccaacaccgcctcctcacttgtggtggccccgcgctgcgagctcaccgtgtggtcccggcaaggcaaggcgggcaagacgcacaagttctctgccggcacctacccgcgcctggaggagtaccgccggggcatcttaggagactggtccaacgctatctccgcgctctactgcaggtgcagctgatgcattgctggtctctcatctgcagcttccacagagtgccaagcccctcactcagcccatccctgggctctgctccggggccccaagacccaggaggaggagcgttctgcctgccccctcccacctcccctgcaatacagcctttgtgccgttgaaaaaaaaaaaaaaaaa

SEQ ID NO: 123823 - DNA, 1857 bp, Homo sapiens
atgcctcagttactgcaaaacattaatgggatcatcgaggccttcaggcgctatgcaaggacggagggcaactgcacagcgctcacccgaggggagctgaaaagactcttggagcaagagtttgccgatgtgattgtgaaaccccacgatccagcaactgtggatgaggtcctgcgtctgctggatgaagaccacacagggactgtggaattcaaggaattcctggtcttagtgtttaaagttgcccaggcctgtttcaagacactgagcgagagtgctgagggagcctgcggctctcaagagtctggaagcctccactctggggcctcgcaggagctgggcgaaggacagagaagtggcactgaagtgggaagggcggggaaagggcagcattatgaggggagcagccacagacagagccagcagggttccagagggcagaacaggcctggggttcagacccagggtcaggccactggctctgcgtgggtcagcagctatgacaggcaagctgagtcccagagccaggaaagaataagcccgcagatacaactctctgggcagacagagcagacccagaaagctggagaaggcaagaggaatcagacaacagagatgaggccagagagacagccacagaccagggaacaggacagagcccaccagacaggtgagactgtgactggatctggaactcagacccaggcaggtgccacccagactgtggagcaggacagcagccaccagacaggaagaaccagcaagcagacacaggaggccaccaatgaccagaacagagggactgagacccacggtcaaggcaggagccagaccagccaggctgtgacaggaggacatgctcagatacaggcagggacacacacccagacacccacccagaccgtggagcaggacagcagccaccagacaggaagcaccagcacccagacacaggagtccaccaatggccagaacagagggactgagatccacggtcaaggcaggagccagaccagccaggctgtgacaggaggacacactcagatacaggcagggtcacacaccgagactgtggagcaggacagaagccaaactgtaagccacggaggggctagagaacagggacagacccagacgcagccaggcagtggtcaaagatggatgcaagtgagcaaccctgaggcaggagagacagtaccgggaggacaggcccagactggggcaagcactgagtcaggaaggcaggagtggagcagcactcacccaaggcgctgtgtgacagaagggcagggagacagacagcccacagtggttggtgaggaatgggttgatgaccactcaagggagacagtgatcctcaggctggaccagggcaacttgcataccaagtgtttcctcagcacagggccaggatgcagcccagtcagaagagaagcgaggcatcacagctagagagctgtattcctacttgagaagcaccaagccatgacttccccgactccaatgtccagtactggaagaagacagctggagagagtttggcttgtcctgcatggccaatccagtgggtgcatccctggacatcaagctcttcattatgcagcttcccttttaggtctttctcaatgagataatttctgcaaggagctttctatcctgaactctttctttcttacctgctttgcggtgcagacccctctcaggagcaggaagactcagagcaagtcacccctttgtactgaattgtcctcatcttgtggggggtttcaggactatttttatctctgacatctctctattgccccatctaccctaatgcatcaataaaaccttaagcccctggaaaaaaaaaaaaaa

SEQ ID NO: 123824 - DNA, 3031 bp, Homo sapiens
gtcctacttacattgtaaatgggccacaatggaagagctcgaaaaggatcctcgcatcgcacagaagatcaagcgatttaggaataaacaagcccagatgaagcacatttttacggagcctgatgaagacttgttcaatccagactatgtagaagttgatcgcatcttggaggtggcccacaccaaggatgcagaaacaggggaggaggtaacacattacctggtgaagtggtgctcactaccatatgaagaaagcacgtgggagctagaggaagatgtagatcctgcaaaagttaaagaatttgaatctcttcaagttctccctgaaattaagcatgtggagcggcctgcttcagactcctggcagaaacttgagaagtctcgcgagtataagaacagtaaccagctccgggagtaccagctggaagggatgaactggcttctttttaactggtataacagaaaaaactgtattttggctgatgagatgggcctagggaaaaccatccagtccatcacattcctttcagaaatatttctgagaggaatccacggcccttttctcattatcgcccctctctccaccatcactaactgggagcgggagttccggacatggacagagatgaatgccattgtgtaccacggcagccagatcagcaggcagatgatccagcagtatgaaatggtgtacagagacgcccagggaaaccccctttcaggagtcttcaagttccacgtcgtcatcacaacatttgaaatgatcctagcagactgcccagagttgaagaagattcactggagctgtgtgataattgatgaagcccacagactgaagaataggaactgcaaacttctggagggtctaaagcttatggccctggaacataaagtgcttctcactggaacacccttgcagaactctgtggaggagctcttcagtttgttaaattttctggagccatcacagtttccttcagagaccgctttcttggaggaatttggagatctgaaaacagaggagcaggtaaagaaactgcagtctatcctaaaaccaatgatgcttcggcggctgaaagatgatgtggaaaagaaccttgctcccaaacaagagacgatcattgaggtggaactgaccaatatccagaaaaagtactaccgtgccatcctcgagaagaacttttccttcctgaccaagggggcaaatcagcacaacatgcccaatctcatcaacaccatgatggagctgaggaagtgctgtaaccatccctacctgatcaatggtgcagaggagaaaattctagaagatttccgaaaaacccacagccctgatgcccctgactttcagctgcaggccatgattcaggcagcaggaaagcttgtgttgattgataaactactccctaagctgattgcaggtggccacaaagtactcatcttctcccagatggtgcgctgcctcgacatcctagaagattacctcatccagagaaggtacacctatgagcgaattgatgggcgagtacggggaaacctgcgccaggcagccatcgaccggttctgtaagccagattcagaccgctttgtctttcttctgtgcaccagagcgggaggcctggggatcaatctcacagctgctgatacctgcatcatatttgattctgactggaacccacaaaatgacttgcaggctcaggcccgatgtcaccgcataggccagagcaaagctgtgaaggtgtatcgcctcatcactcgaaattcctacgagcgcgagatgtttgacaaggccagcctaaagctggggctggacaaggctgttcttcaggacatcaaccgaaagggcggcaccaatggggtacagcagctctcaaaaatggaggtggaggacctactccggaaaggtgcttatggagccttaatggatgaagaagatgaaggctccaagttctgtgaagaagacatagaccagattctgcagaggcgaacgcacaccatcaccatccagtctgaggggaaagggtccacttttgccaaggctagctttgtggcttcaggaaacagaacagatatttccttagatgatcctaacttttggcagaaatgggctaaaatagctgaactagacactgaagcaaagaatgaaaaggaaagcttagtgatcgaccgacctcgcgtgagaaagcagaccaaacactacaactcgtttgaggaagacgagctcatggagttttcagagttagacagcgactcagacgaaaggcccacgagatccaggcgcctcaatgacaaagccaggcgctacctccgagcggagtgcttccgggtagagaagaacctgctcatctttgggtggggccggtggaaggacatcctgactcatggccgattcaagtggcatctgaacgagaaggacatggagatgatttgccgtgccctcctggtgtactgtgtcaagcattataagggggacgagaagatcaagagtttcatttgggaactgatcacacctaccaaagatgggcaagcccagaccctccagaaccactcaggtttatctgccccagtccccagagggaggaaggggaagaagacgaagaaccagttgctaatcccagagctaaaggatgcagattggctagccacctgcaaccccgaggtggtcttgcatgatgatggctataagaaacacctcaaacagcactgcaacaaggtacttttgcgagtccggatgctgtactacctaaaagctgaaatactgggagaagcagctgagaaagcatttgaaggatctcctgccagggagctggatgtacctctgcctgacatcgactacatggagatcccagtggactggtgggatgctgaagccgataagtcacttctcattggcgtgttcaagcatggttatgaaaggtacaatgccatgcgagcagacccagcactttgcttcctggagaaagttgggatgcccgatgagaagtccctttctgcagaacagggtgttacagatgggacctcagacattcctgaa

SEQ ID NO: 123825 - DNA, 7545 bp, Homo sapiens
ctaattggtgtcgttgttggagtctttgagtgccccctccccagcctgtgccccatgttctctctctgcgggcaaaggggcactgggttcggcacagttctcatcaccgctgggctccctttcacagctgggagcaggctctgggtgggagttggggttgtccccctttgtcttcttcttcttcctcttctggctctccagacctactatttccgagtgtctggcctgctgcatggctggcagagccatgcccataccaggggagaggaacatggatgggtaaatgagtccaggagatactcctgggatgagaaatgggttaaaagccacaggactactagtagttattgcaggttcagactgatcagaaaatggacctggaccaggcttgtcctcagctaaagtgtctgttttcacatcatggctactcggcttgtcttccgcagtcttttcagtcactgccgtaccacttttcgttgtgcttgatagagacgccggagcagtggaagtgcaggtggttgccatgggtggactgaggagtcccccaacaccaaacatctggggcacagcagccatgcctggcagcatcatgggcagcatgctcagggtacttttgacctcttcacctgttggcatcgtggcaaagccagctggaaaccccaccagcccggtgagggggatgcctggcatatttctcatgttctgaagtcctaccaggtccatcccagcaatcagtccattcatgaacagtggccccattccagagggagagtctgccacaatggaaggagccttcaggagttcgctccgaggccgcctccccctcctgcgggggcccgtatctcgaagaataggctcagccagagtgtgattgaacttgttttctggaagaaaccctgccccaaagccaggaacttctaaggagtagtcagcctgctgccttagccagtcaagcagactcttgctgggaatggatttctcggcttggctgctggctgccgtagctggctcaggagccgaggtggcaggccctggcccctcagggtgtgtggtgctcaaggtggcctgccctgggtcttcatggacttccaagattcccgcctgaagtgtctgctccttcaaaaagatgaggtccatccctccttcaacatgtttccgcctccctctccgcctcctcgtggctgcatcatctcttctgaggcttccattgacaatctgtccagtcacaggatggatcaggccagcttgcagaatcccagacaagtccatgccaagggctccctgaagtgaactgatagccccaatcttaggggtgctggcgctcactgggaaaggggatgtggctcctggggacccctctgatgagcaggagaggtccatagctgactccccatgccagccattgaggatgataggggtgtgcccgtgggtggcagagaactgctccaggccccgagcctttgcatccctctccacctcaaactcatagggacgcctgtgcttttgttcatcctttgtgaatactggagctaagaagctctccttgtggatctgggccgccaatgctgcgccgttgctgaagctgtgttctgctgcttccggctctgagaggctggttcgagaaccagcactgctggttaataccggggtgggcagtgtgcctgagggctcatactgctggctagagggccacttcccctttaacaccacgtggcagatattatctaggcggttaattatcacgcggtcctttggccactcagagaaggaatagagagttttctcctgtagcagctgagcaatagtgggagctcgagcctcctgtagctcatccccaatgtctcctgtgatgcccgatgttgagctcttgctctcctcttcagagtacttccctggataatcttgactatggcagtttccgtctctatcataatcatctttattctcaaaatccatgtcttctgatttgagctcacttccttcaagaggatatgtggggaaaacgttttgcccctctgcactttctttccaaggttcttttaaaagctcatgcttcactttaaacggctgtgatggaatagcagtgggttcaccctccatggcgatagtattggttttacttttgaacagatctgggatataagccttgggtttctcgatttcaaattcatcattctcgaggccatgcatccacctctccatgtgtttgcagtggcactgacaggctgctggagcggggaaagccctctgtagcccaggagtctggtttgccacctctaagcttcctttcttggtttcatcttggaagccttggttcttttcccttgagatgttagtagtgggctccgtgagatgcaatacctctggcctttcccccatgcctactgccatggctaagttttcctcctcgttttcctcctcttcttcctcctcatcactgtggttctgactcaaaatcaatttactttctaagcttttgttttccaataaatcaattaattgctgatctgatgacaggtttcttttggagtcacagacactaagactgcacatatctacaaacccactttcatttcctggattcaaggaaggggaagctaaacacttggcttccagctggccaatgttttcaggtctctgtcctgcctcactgcagcagagctccccttcctttgaaatagacatcaacaaatgttttccatttttgatgtttgcttgagctactcctcctgcttctaagctacccataaaagtagggccagaagctatttctgcctcagggccaccagactggcagttcccatctttgcttattgagatggtaataacatcttttctagattcagtattggtacttgggctctcctgaaaagagcttggttcttggctgagcaccttcttaccatacatcatgctctctaaggactcaggcagcagactttcatcatggttgatggaaatgacatcctgaactttagaaataaagttttcacatgtcacatcaggcaggctgagatgatcatctctgctttctactctcactagattttcaggttcattttcaagggactctgaagtcctactcatttgagaatatgtaagagattcatataacttggagttggtctggtaaaggcaacagagatttcctggtgcctgggtgccagatcttttatgctgggcatagtttctataggcatccaggaaggacagctgggggtcgttcatgatgtaacagtcagtgcggttcagcccatgtttggcagtgccgatgagcaggtctcgatcatgcttcccacactcccaccagactgggaggtagaggctgggcctgcacagctggaggcgttcatgcagctgagggcacttgagcacttgctctcggactttccgtaacagttcaatgcggtacagagttcttgcagcacgttcctcagtgatgggttcaacgtagatggtggtatctgggggaccgccatctttccatgtgggtagacgacagacattccggcacatggccacaaaactataaaaatactgttccaggctctcatccgacttcttgtccaaacgggaaatgatgcggaactgtgtccagtcaaaggttttcttttcttgatcgtaaacaacaccaaaggaagacactgttctatagaagtctgcttgttctctcctagtccacctcttttgggcttccttgttgatgaggtccatttctgaggttctcctgaacatctcttcctgaacccaatatccttggttacctggtcccagaatttcaggccggcacagttccttgcggttgcagcgctggtaaacagtgaccagacgtctgagacgagctgcccggctgtcatccttcttttcgctaaaaacgccatcacctccatcactggaactctccgtttgtttctggaggccatctactttgtcctcagcattgtcttctttatctgtgttgcctctttcaggaatgtctgaggtcccatctgtaacaccctgttctgcagaaagggacttctcatcgggcatcccaactttctccaggaagcaaagtgctgggtctgctcgcatggcattgtacctttcataaccatgcttgaacacgccaatgagaagtgacttatcggcttcagcatcccaccagtccactgggatctccatgtagtcgatgtcaggcagaggtacatccagctccctggcaggagatccttcaaatgctttctcagctgcttctcccagtatttcagcttttaggtagtacagcatccggactcgcaaaagtactttgttgcagtgctgtttgaggtgtttcttatagccatcatcatgcaagaccacctcggggttgcaggtggctagccaatctgcatcctttagctctgggattagcaactggttcttcgtcttcttccccttcctccctctggggactggggcagataagcctgagtggttctggagggtctgggcttgcccatctttggtaggtgtgatcagttcccaaatgaaactcttgatcttctcgtcccccttataatgcttgacacagtacaccaggagggcacggcaaatcatctccatgtccttctcgttcagatgccacttgaatcggccatgagtcaggatgtccttccaccggccccagccaaagatgagcaggttcttctctacccggaagcactccgctcggaggtagcgcctggctttgtcattgaggcgcctggatctcgtgggcctttcgtctgagtcgctgtctaactctgaaaactccatgagctcgtcttcctcaaacgagttgtagtgtttggtctgctttctcacgcgaggtcggtcgatcactaagctttccttttcattctttgcttcagtgtctagttcagctattttagcccatttctgccaaaagttaggatcatctaaggaaatatctgttctgtttcctgaagccacaaagctagccttggcaaaagtggaccctttcccctcagactggatggtgatggtgtgcgttcgcctctgcagaatctggtctatgtcttcttcacagaacttggagccttcatcttcttcatccattaaggctccataagcacctttccggagtaggtcctccacctccatttttgagagctgctgtaccccattggtgccgccctttcggttgatgtcctgaagaacagccttgtccagccccagctttaggctggccttgtcaaacatctcgcgctcgtaggaatttcgagtgatgaggcgatacaccttcacagctttgctctggcctatgcggtgacatcgggcctgagcccagtgccagaatccctggatatggaagcccccacccatgccctgcccacattcttcccctaacctcatggctgaaaatgacaccagaattcctatacttagtactaaagcggcccaaacactaagaagcccagtaagtactcttcccctcggagcagtgtgggagtttcctgagtcctgcttctggcgattgtggaaagggcctgtctcctcactctggactcccaactgacttccaaaatcctgcagacatgcagcagctgcattatcttgtggctgtgctcttggccaggacatctgctcccacactttctgaattctgccttcagggacctgcaagtcattttgtgggttccagtcagaatcaaatatgatgcaggtatcagcagctgtgagattgatccccaggcctcccgctctggtgcacagaagaaagacaaagcggtctgaatctggcttacagaaccggtcgatggctgcctggcgcaggtttccccgtactcgcccatcaattcgctcataggtgtatcttctctggatgaggtaatcttctaggatgtcgaggcagcgcaccatctgggagaagatgagtactttgtggccacctgcaatcagcttagggagtagtttatcaatcaacacaagctttcctgctgcctgaatcatggcctgcagctgaaagtcaggggcatcagggctgtgggtttttcggaaatcttctagaattttctcctctgctccattgatcaggtagggatggttacagcacttcctcagctccatcatggtgttgatgagattgggcatgttgtgctgatttgcccccttggtcaggaaggaaaagttcttctcgaggatggcacggtagtactttttctggatattggtcagttccacctcaatgatcgtctcttgtttgggagcaaggttcttttccacatcatctttcagccgccgaagcatcattggttttaggatagactgcagtttctttacctgctcctctgttttcagatctccaaattcctccaagaaagcggtctctgaaggaaactgtgatggctccagaaaatttaacaaactgaagagctcctccacagagttctgcaagggtgttccagtgagaagcactttatgttccagggccataagctttagaccctccagaagtttgcagttcctattcttcagtctgtgggcttcatcaattatcacacagctccagtgaatcttcttcaactctgggcagtctgctaggatcatttcaaatgttgtgatgacgacgtggaacttgaagactcctgaaagggggtttccctgggcgtctctgtacaccatttcatactgctggatcatctgcctgctgatctggctgccgtggtacacaatggcattcatctctgtccatgtccggaactcccgctcccagttagtgatggtggagagaggggcgataatgagaaaagggccgtggattcctctcagaaatatttctgaaaggaatgtgatggactggatggttttccctaggcccatctcatcagccaaaatacagttttttctgttataccagttaaaaagaagccagttcatcccttccagctggtactcccggagctggttactgttcttatactcgcgagacttctcaagtttctgccaggagtctgaagcaggccgctccacatgcttaatttcagggagaacttgaagagattcaaattctttaacttttgcaggatctacatcttcctctagctcccacgtgctttcttcatatggtagtgagcaccacttcaccaggtaatgtgttacctcctcccctgtttctgcatccttggtgtgggccacctccaagatgcgatcaacttctacatagtctggattgaacaagtcttcatcaggcattgtgcagtccgctctccacctatgccccattcccaccatgacagtcctcttgcagctgccctcaggttttgcaaagtccctcactgaatcctccgtaaaaatgtgcttcatctgggcttgtttattcctaaatcgcttgatcttctgtgcgatgcgaggatccttttcgagctcttccattgtggcccatttacaatgtaagtaggaaaaatttctatacttaacgtagaacagctccaagtcgaacggaggttctcctgggtgaacctcctggacagtcttagatgccaggatcttctcaatgatgtttgcatcatcttctggaggctc

SEQ ID NO: 123826 - DNA, 1955 bp, Homo sapiens
atgaacttcaagctttcttattgcaaggaggacctctgtaacacagtgggccaagtggcaggagtacttactgggcttcttagtgtttgggccgctttagtactaagtataggaattctggtgtcattttcagccatgaggttaggggaagaatgtgggcagggcatgggtgggggcttccatatccagggattctggcactggggagaaaaaacattcccgctaaaagagactaggacttctggaaacaaaatggctgaagccaggtctggacaggaaatgtacaagaggagtgtggaatatgttgaaagcaagggaactattgaaagactaccagtctttgatataacatacaaacataaatgtacacatatccatacctatttctatatctgtgctcaggcccgatgtcaccgcataggccagagcaaagctgtgaaggtgtatcgcctcatcactcgaaattcctacgagcgcgagatgtttgacaaggccagcctaaagctggggctggacaaggctgttcttcaggacatcaaccgaaagggcggcaccaatggggtacagcagctctcaaaaatggaggtggaggacctactccggaaaggtgcttatggagccttaatggatgaagaagatgaaggctccaagttctgtgaagaagacatagaccagattctgcagaggcgaacgcacaccatcaccatccagtctgaggggaaagggtccacttttgccaaggctagctttgtggcttcaggaaacagaacagatatttccttagatgatcctaacttttggcagaaatgggctaaaatagctgaactagacactgaagcaaagaatgaaaaggaaagcttagtgatcgaccgacctcgcgtgagaaagcagaccaaacactacaactcgtttgaggaagacgagctcatggagttttcagagttagacagcgactcagacgaaaggcccacgagatccaggcgcctcaatgacaaagccaggcgctacctccgagcggagtgcttccgggtagagaagaacctgctcatctttggctggggccggtggaaggacatcctgactcatggccgattcaagtggcatctgaacgagaaggacatggagatgatttgccgtgccctcctggtgtactgtgtcaagcattataagggggacgagaagatcaagagtttcatttgggaactgatcacacctaccaaagatgggcaagcccagaccctccagaaccactcaggcttatctgccccagtccccagagggaggaaggggaagaagacgaagaaccagttgctaatcccagagctaaaggatgcagattggctagccacctgcaaccccgaggtggtcttgcatgatgatggctataagaaacacctcaaacagcactgcaacaaagtacttttgcgagtccggatgctgtactacctaaaagctgaaatactgggagaagcagctgagaaagcatttgaaggatctcctgccagggagctggatgtacctctgcctgacatcgactacatggagataccagtggactggtgggatgctgaagccgataagtcacttctcattggcgtgttcaagcatggttatgaaaggtacaatgccatgcgaggcagacccagcactttgcttcctggagaaagttgggatgcccgatgagaagtccctttctgcagaacagggtgttacagatgggacctcagacattcctgaaagaggcaacacagataaagaagacaatgctgaggacaaagtagatggcctccagaaacaaacggagagttccagtgatggaggtgatggcgtttttagcgaaaagaaggatgacagccgggcagcccaggatggctccgacccagacaaatcgccctggccagtttcctccgccctcacagctcgtctcagacgtctggtcactgtttaccagcgct

SEQ ID NO: 123827 - DNA, 1459 bp, Homo sapiens
cgcagtgcccagaaggagaagactgcagccaaggagcagcagggggagaagacagaagtcctgagcagtgatgacgatgccccagacagccctgtgatcctggagatcccctccttgccaccctccactccaccctccactcctacctacaagaagtccctccgcctctcctccgatcagatccggcgcctgaacctgcaagaaggtgccaatgatgtggtcttcagcgtgaccactcagtaccagggcacctgccgctgcaaggccaccatctacctgtggaaatgggacgacaaggtggtcatctctgacatcgacggcaccatcaccaagtcagaatgctttgggccatatcctgccccagctggggaaagactggacacaccagggcatcaccagtctctatcacaaaatccaacttggtcagttagtgatgccccttgacgctcgaccagaacgtcccatggatggaatgaaggtgcgggcatttatggagcgcctgctgtttgtcaggcgaggtactgataagcgctggagtgtaaggatgtacgtgacctgctctcagagttcaaatttaaatgaagagatatacattaatcaagtagtcattcaagcaaatatgaaattacaactgtgggctatgcgaacagatgacgcgaggggcctgtccagtctgggagatacggaaccttccccttgtccctctgtggttcctgggctccaacccaagcctgcccctgtctgtgcgggtgatgctctgctgcaagcccaaatccctggggtcctccttggcaccctcttttctggggccgccttctactctggcctgtatgggggctcagagcagttcttggaccacctccttcacccggctcgcgccgcgccgcccccgccgctggtcggcccgggtcccgccccgagggtcccggggtccccttcggcccccgagctcgctggcccggccgtctggcgcttcgcggcggctgcgtcccgcggagtggtcgtcgctgctagcggctggggccgcggaggggaggcatcccagactttccagaccggcaaagagcccggaggcacaaggcacccaacacggatgcccctgggcagcacgggctgcattttccctggaacactggaaaagagccaaggttatgaaaggtacaatgccatgcgagcagacccagcactttgcttcctggagaaagttgggatgcccgatgagaagtccctttctgcagaacagggtgttacagatgggacctcagacattcctgaaagagcaaggcagaatgaggagcagctgacctcctttggtttactgtggccaaccccacagggatctaccgaccacattgacaaccaccccagagaaagatacccagaaatgagatgggagctggatgtacctttgcctgacatcgactacatggaaatcccagtggactggtgggatgcttaa

SEQ ID NO: 123828 - DNA, 4805 bp, Homo sapiens; identical to SEQ ID NO: 123522

SEQ ID NO: 123829 - DNA, 900 bp, Homo sapiens; identical to SEQ ID NO: 117494

SEQ ID NO: 123830 - DNA, 1219 bp, Homo sapiens
ttatattcgaccttgaatttctttaactttctcggtgatgattccggattgattaacataacaacagcatttttcctctaaaaataaaaaggttcccccgctttccgcggttagcaagtctaaagctcttcgattttgaaggactactgctgctagggagttaagttgatcttgcaaggtgaccagggtatcagcgacccattccatgtcaccatttagttcttgagacagtttgtagtagaactgagtagaggttgtgataccgccaatgccagtagctactccgcctagcactcctgctccaataacaaaaggaagaatgggtactcttttgttgcggggcttaggtatgacatgattgtataaatcttgttcagtgtagatgggcataggggccacagggtggaatagttcctttccctcttcttggggacaggctccctgtaatgttttaagaacctgttgatatttggctaaggagatgatgtctgcaactaagttggctgtctctcggtcaagcccaagttcattggttaggaagggccgtccatacagcattttgtatggactaagtcctgctttttggggagagtttcggattcttagtaaggctaacacctgggatactccttgggttactgtagccttgaaagcagggccattgtcactctgtaagccttggggaagtccgaatctgggaattatttcatgaacgtttattacctcttgggccttttctgtcctacaggggaaggcctctgcccaaccagtgaaagtatctacccagaatagtagatactgaaatccctgagatttgggcatgtgggtaaaatctagttgccagtcttctcctgggtaaatggcctgttctttgttctcctgaaggagcttggcgataaggcaggggattatttctttggcacacttcacaggccctgactatctgcttgatagttttgaaaaggcctggtccagtaaataatgatttggccatctgatgggtgctatcaatacctaagtgaagggtttggtgaagggttttaagtaatttccattggttagctgcaggcaaaagtatttttccttctttggtggctagccatcctgaggggaggaaactatgtccccgtgaggttccccattctatttcttcttctgagtactggggcttggtttcctggaggggattaccccatactaggtgtccttctataagcat

SEQ ID NO: 123831 - DNA, 497 bp, Homo sapiens
gaatggggaacctcacgaggacatagtttcctcccctcaggatggttagccaccaaagaaggaaaaatacttttgcctgcagctaaccaatggaaattacttaaaactcttcaccaaacctttcacttaggcattgatagcactcatcagatggctgaatctttatttactggaccaggccttttcaaaactaacaagcagatagtcagggcctgtgaagtgtgccaaagaaataatcccctgcactgcaggccatacatttcaatccctgtatctttttaacctccttgttaagtttgtctcttccagaatcaaagctataaaactacaaatggttctccaaatggagccccagatgcagtccatgactaagatctactgcggacctctggaccggcctgctagcccagctcccacattaatgacatcaaaggcacccctcccgaggaaatctcaactgcatgacacctactacgccccaattcagcaggaagcag

SEQ ID NO: 123832 - DNA, 6507 bp, Homo sapiens; identical to SEQ ID NO: 123525

SEQ ID NO: 123833 - DNA, 5424 bp, Homo sapiens
gggagcccacagcgtctctgtgacttggcaggacccagctccactgaatcagagtccagaaaaagatcaatttcaaaaagaaagtctcatctggatctcctcaaactcatcatggatggcatgaccgaagcatgcatcaagggtggcatcgaagcttgctatgcagccgtgtcctgtgtctgcaccttgctgggtgccctggatgagctcagccaggggaagggcttgagcgaaggtcaggtgcaactgctgcttctgcgccttgaggagctgaaggatggggctgagtggagccgagattccatggagatcaatgaggctgacttccgctggcagcggcgagtgctgtcctcagaacacacgccgtgggagtcagggaacgagaggagccttgacatcagcatcagtgtcaccacagacacaggccagaccactctcgagggagagttgggtcagactacacccgaggaccattcgggaaaccacaagaacagtctcaagtcgccagccatcccagagggtaaggagacgctgagcaaagtattggaaacagaggcggtagaccagccagatgtcgtgcagagaagccacacggtcccttaccctgacataactaacttcctgtcagtagactgcaggacaaggtcctatggatctaggtatagtgagagcaattttagcgttgatgaccaagacctttctaggacagagtttgattcctgtgatcagtactctatggcagcagaaaaggactcgggcaggtccgacgtgtcagacattgggtcggacaactgttcactagccgatgaagagcagacaccccgggactgcctaggccaccggtccctgcgaactgccgccctgtctctaaaactgctgaagaaccaggaggcggatcagcacagcgccaggctgttcatacagtccctggaaggcctcctccctcggctcctgtctctctccaatgtagaggaggtggacaccgctctgcagaactttgcctctactttctgctcaggcatgatgcactctcctggctttgacgggaatagcagcctcagcttccagatgctgatgaacgcagacagcctctacacagctgcacactgcgccctgctcctcaacctgaagctctcccacggtgactactacaggaagcggccgaccctggcgccaggcgtgatgaaggacttcatgaagcaggtgcagaccagcggcgtgctgatggtcttctctcaggcctggattgaggagctctaccatcaggtgctcgacaggaacatgcttggagaggctggctattggggcagcccagaagataacagccttcccctcatcacaatgctgaccgatattgacggcttagagagcagtgccattggtggccagctgatggcctcggctgctacagagtctcctttcgcccagagcaggagaattgatgactccacagtggcaggcgtggcatttgctcgctatattctggtgggctgctggaagaacttgatcgatactttatcaaccccactgactggtcgaatggcggggagctccaaagggctggccttcattctgggagctgaaggcatcaaagagcagaaccagaaggagcgggacgccatctgcatgagcctcgacgggctgcggaaagccgcacggctgagctgcgctctaggcgttgctgctaactgcgcctcagcccttgcccagatggcagctgcctcctgtgtccaagaagaaaaagaagagagggaggcccaagaacccagtgatgccatcacacaagtgaaactaaaagtggagcagaaactggagcagattgggaaggtgcagggggtgtggctgcacactgcccacgtcttgtgcatggaggccatcctcagcgtaggcctggagatgggaagccacaacccggactgctggccacacgtgttcagggtgtgtgaatacgtgggcaccctggagcacaaccacttcagcgatggtgcctcgcagccccctctgaccatcagccagccccagaaggccactggaagcgctggcctccttggggaccccgagtgtgagggctcgccccccgagcacagcccggagcaggggcgctccctgagcacggcccctgtcgtccagcccctgtccatccaggacctcgtccgggaaggcagccggggtcgggcctccgacttccgcggcgggagcctcatgagcgggagcagcgcggccaaggtggtgctcaccctctccacgcaagccgacaggctctttgaagatgctacggataagttgaacctcatggccttgggaggttttctttaccagctgaagaaagcatcgcagtctcagcttttccattctgttacagatacagttgattactctctggcaatgccaggagaagttaaatccactcaagaccgaaaaagcgccctccacctgttccgcctggggaatgccatgctgaggattgtgcggagcaaagcacggcccctgctccacgtgatgcgctgctggagccttgtggccccacacctggtggaggctgcttgccataaggaaagacatgtgtctcagaaggctgtttccttcatccatgacatactgacagaagtcctcactgactggaatgagccacctcattttcacttcaatgaagcactcttccgacctttcgagcgcattatgcagctggaattgtgtgatgaggacgtccaagaccaggttgtcacatccattggtgagctggttgaagtgtgttccacgcagatccagtcgggatggagacccttgttcagtgccctggaaacagtgcatggcgggaacaagtcagagatgaaggagtacctggttggtgactactccatgggaaaaggccaagctccagtgtttgatgtatttgaagcttttctcaatactgacaacatccaggtctttgctaatgcagccactagctacatcatgtgccttatgaagtttgtcaaaggactgggggaggtggactgtaaagagattggagactgtgccccagcacccggagccccgtccacagacctgtgcctcccggccctggattacctcaggcgctgctctcagttattggccaaaatctacaaaatgcccttgaagccaatattccttagtgggagacttgccggcttgcctcgaagacttcaggaacagtcagccagcagtgaggatggaattgaatcagtcctgtctgattttgatgatgacaccggtctgatagaagtctggataatcctgctggagcagctgacagcggctgtgtccaattgtccacggcagcaccaaccaccaactctggatttactctttgagctgttgagagatgtgacgaaaacaccaggaccagggtttggtatctatgcagtggttcacctcctccttcctgtgatgtccgtttggctccgccggagccataaagaccattcctactgggatatggcctctgccaatttcaagcacgctattggtctgtcctgtgagctggtggtggagcacattcaaagctttctacattcagatatcaggtacgagagcatgatcaataccatgctgaaggacctctttgagttgctggtcgcctgtgtggccaagcccactgaaaccatctccagagtgggctgctcctgtattagatacgtccttgtgacagcgggccctgtgttcactgaggagatgtggaggcttgcctgctgtgccctgcaagatgcgttctctgccacactcaagccagtgaaggacctgctgggctgcttccacagcggcacggagagcttcagcggggaaggctgccaggtgcgagtggcggccccgtcctcctccccaagtgccgaggccgagtactggcgcatccgagccatggcccagcaggtgtttatgctggacacccagtgctcaccaaagacaccaaacaactttgaccacgctcagtcctgccagctcattattgagctgcctcctgatgaaaaaccaaatggacacaccaagaaaagcgtgtctttcagggaaattgtggtgagcctgctgtctcatcaggtgttactccagaacttatatgacatcttgttagaagagtttgtcaaaggcccctctcctggagaggaaaagacgatacaagtgccagaagccaagctggctggcttcctcagatacatctctatgcagaacttggcagtcatattcgacctgctgctggactcttataggactgccagggagtttgacaccagccccgggctgaagtgcctgctgaagaaagtgtctggcatcgggggcgccgccaacctctaccgccagtctgcgatgagctttaacatttatttccacgccctggtgtgtgctgttctcaccaatcaagaaaccatcacggccgagcaagtgaagaaggtcctttttgaggacgacgagagaagcacggattcttcccagcagtgttcatctgaggatgaagacatctttgaggaaaccgcccaggtcagccccccgagaggcaaggagaagagacagtggcgggcacggatgcccttgctcagcgtccagcctgtcagcaacgcagattgggtgtggctggtcaagaggctgcacaagctgtgcatggaactgtgcaacaactacatccagatgcacttggacctggagaactgtatggaggagcctcccatcttcaagggcgacccgttcttcatcctgccctccttccagtccgagtcatccaccccatccaccgggggcttctctgggaaagaaaccccttccgaggatgacagaagccagtcccgggagcacatgggcgagtccctgagcctgaaggccggtggtggggacctgctgctgccccccagccccaaagtggagaagaaggatcccagccggaagaaggagtggtgggagaatgcggggaacaaaatctacaccatggcagccgacaagaccatttcaaagttgatgaccgaatacaaaaagaggaaacagcagcacaacctgtccgcgttccccaaagaggtcaaagtggagaagaaaggagagccactgggtcccaggggccaggactccccgctgcttcagcgtccccagcacttgatggaccaagggcaaatgcggcattccttcagcgcaggccccgagctgctgcgacaggacaagaggccccgctcaggctccaccgggagctccctcagtgtctcggtgagagacgcagaagcacagatccaggcatggaccaacatggtgctaacagttctcaatcagattcagattctcccagaccagaccttcacggccctccagcccgcagtgttcccgtgcatcagtcagctgacctgtcacgtgaccgacatcagagttcgccaggctgtgagggagtggctgggcagggtgggccgtgtctatgacatcattgtgtag

SEQ ID NO: 123834 - DNA, 470 bp, Homo sapiens
cattccttcagcgcaggccccgagctgctgcgacaggacaagaggccccgctcaggctccaccgggagctccctcagtgtctcggtgagagacgcagaagcacagatccaggcatggaccaacatggtgctaacagttctcaatcagattcagattctcccagaccagaccttcacggccctccagcccgcagtgttcccgtgcatcagtcagctgacctgtcacgtgaccgacatcagagttcgccaggctgcgagggagtggctgggcagggtgggccgtgtctatgacatcattgtgtagccgactcctgttctactctcccaccaaataacagtagtgagggttagagtcctgccaatacagctgttgcattttccccaccactagccccacttaaactactactactgtctcagagaacagtgtttcctaatgtaaaaagcctttccaaccactgatcagcatta

SEQ ID NO: 123835 - DNA, 741 bp, Homo sapiens
caactttaaggtaatatacttttggctataaatacaggcaactaaaaacaatgtataaactctcattctgcttaggtctgtaaatacatgctaataactgttcgtaactttaaaaggctgccttgaattttgtcttactgttgctgcaaaagagactgtgaggagagaaacacctgacactttcagagactgggagggagggaaacaaagttgggggagtgggcagctgagtcacaggaacagggcaagagactgagctgggcagcctgggaaggtgccactcccctctcagtgttcttcatctcctccctttcttctccacctgctgggaagaacccacctgaatgccctactcattagagactactttgcatcaagctgcaaatacctctgagaagtactgctgtcactcagtgatggttctggttgaaatctgatgtcagtgtggatggctggtaactcgagtgcagagtatgttaggactgagttatagagaagacaatgggaaggtaccaaaacactcttaaaaaattgtaggtcaagagctctgtacacctactcatccttttattcttgggacccataatcaggctagaactagaacagtgtttggacacagtacagggtaaacttatgttcaagaattttggatcctataatagagcatcggggagaatgctgatttccaaacaaacaactaacatactttgggatacagtattcacccatcgtgccgaatct

SEQ ID NO: 123836 - DNA, 5956 bp, Homo sapiens
atggatggcatgaccgaagcatgcatcaagggtggcatcgaagcttgctatgcagccgtgtcctgtgtctgcaccttgctgggtgccctggatgagctcagccaggggaagggcttgagcgaaggtcaggtgcaactgctgcttctgcgccttgaggagctgaaggatggggctgagtggagccgagattccatggagatcaatgaggctgacttccgctggcagcggcgagtgctgtcctcagaacacacgccgtgggagtcagggaacgagaggagccttgacatcagcatcagtgtcaccacagacacaggccagaccactctcgagggagagttgggtcagactacacccgaggaccattcgggaaaccacaagaacagtctcaagtcgccagccatcccagagggtaaggagacgctgagcaaagtattggaaacagaggcggtagaccagccagatgtcgtgcagagaagccacacgggtcccttaccctgacataactaacttcctgtcagtagactgcaggacaaggtcctatggatctaggtatagtgagagcaattttagcgttgatgaccaagacctttctaggacagagttttgattcctgtgatcagtactctatgggcagcagaaaaggactcgggcaggtccgacgtgtcagacattgggtcggacaactgttcactagccgatgaagagcagacaccccgggactgcctaggccaccggtccctgcgaactgccgccctgtctctaaaactgctgaagaaccaggaggcggatcagcacagcgccaggctgttcatacagtccctggaaggcctcctccctcggctcctgtctctctccaatgtagaggaggtggacaccgctctgcagaactttgcctctactttctgctcaggcatgatgcactctcctggctttgacgggaatagcagcctcagcttccagatgctgatgaacgcagacagcctctacacagctgcacactgcgccctgctcctcaacctgaagctctcccacggtgactactacaggaagcggccgaccctggcgccaggcgtgatgaaggacttcatgaagcaggtgcagaccagcggcgtgctgatggtcttctctcaggcctggattgaggagctctaccatcaggtgctcgaccaggaacatgcttggagaggctggctattggggcagcccagaagataacagccttcccctcatcacaatgctgaccgatattgacggcttagagagcagtgccattggtggccagctgatggcctcggctgctacagagtctcctttcgcccagagcagggagaatttgatgacttccacaagtggcaggcgttggcaatttgctcgctatattctggtgggctgcttggaagaacttgatcgatactttatcaaccccactgactggtcgaatggcggggagctccaaagggctggccttcattctgggagctgaaggcatcaaagagcagaaccagaaggagcgggacgccatctgcatgagcctcgacgggctgcggaaagccgcacggctgagctgcgctctagcccttgcccagatggcagctgcctcctgtgtccaagaagaaaaagaagagagggaggcccaagaacccagtgatgccatcacacaaggtaacaactggagggccagaacccacctggtgccttgggtgcagtatgcacacacctgcacaggcctacacacgccagccaacactcgtgcctgttctgtgtgtgatgcccgtgaaactaaaagtggagcagaaactggagcagattgggaaggtgcagggggtgtggctgcacactgcccacgtcttgtgcatggaggccatcctcagcgtaggcctggagatgggaagccacaacccggactgctggccacacgtgttcaggtgcatgacgggctcccacccccagatggcactaaccctgccttgggaaacctggagtgggctgtggcagaacatcagagtggattatccatgatgctctttaccagtaaacagacttactccgagatgagggaccttgcgaaccatcttcgtcccagggtgtgtgaatacgtgggcaccctggagcacaaccacttcagcgatggtgcctcgcagccccctctgaccatcagccagccccagaaggccactggaagcgctggcctccttggggaccccgagtgtgagggctcgccccccgagcacagcccggagcaggggcgctccctgagcacggcccctgtcgtccagcccctgtccatccaggacctcgtccgggaaggcagccggggtcgggcctccgacttccgcggcgggagcctcatgagcgggagcagcgcggccaaggtggtgctcaccctctccacgcaagccgacaggctctttgaagatgctacggataagttgaacctcatggccttgggaggttttctttaccagctgaagaaagcatcgcagtctcagcttttccattctgttacagatacagttgattactctctggcaatgccagcaattttaggagtgggcagtattatccccaggtttacagatgagatcattaaagaggaaaatctttggcccagtataacacaactactaaatggtgccaggattcgaatccagacggtcggacttctcggccctcctactgaaccgctacctcattccctcttatcatcaagttttgatcatacctgtcacgtcccaggagaagttaaatccactcaagaccgaaaaagcgccctccacctgttccgcctggggaatgccatgctgaggattgtgcggagcaaagcacggcccctgctccacgtgatgcgctgctggagccttgtggccccacacctggtggaggtgagcactgggaaggctgcttgccataaggaaagacatgtgtctcagaaggctgtttccttcatccatgacatactgacagaagtcctcactgactggaatgagccacctcattttcacttcaatgaagcactcttccgacctttcgagcgcattatgcagctggaattgtgtgatgaggacgtccaagaccaggttgtcacatccattggtgagctggttgaagtgtgttccacgcagatccagtcgggatggagacccttgttcagtgccctggaaacagtgcatggcgggaacaagtcagagatgaaggagtacctggttggtgactactccatgggaaaaggccaagctccagtgtttgatgtatttgaagcttttctcaatactgacaacatccaggtctttgctaatgcagccactagctacatcatgtgccttatgaagtttgtcaaaggactgggggaggtggactgtaaagagattggagactgtgccccagcacccggagccccgtccacagacctgtgcctcccggccctggattacctcaggcgctgctctcagttattggccaaaatctacaaaatgcccttgaagccaatattccttagtgggagacttgccggcttgcctcgaagacttcaggaacagtcagccagcagtgaggatggaattgaatcagtcctgtctgattttgatgatgacaccggtctgatagaagtctggataatcctgctggagcagctgacagcggctgtgtccaattgtccacggcagcaccaaccaccaactctggatttactctttgagctgttgagagatgtgacgaaaacaccaggaccagggtttggtatctatgcagtggttcacctcctccttcctgtgatgtccgtttggctccgccggagccataaagaccattcctactgggatatggcctctgccaatttcaagcacgctattggtctgtcctgtgagctggtggtggagcacattcaaagctttctacattcagatatcaggtacgagagcatgatcaataccatgctgaaggacctctttgagttgctggtcgcctgtgtggccaagcccactgaaaccatctccagagtgggctgctcctgtattagatacgtccttgtgacagcgggccctgtgttcactgaggagatgtggaggcttgcctgctgtgccctgcaagatgcgttctctgccacactcaagccagtgaaggacctgctgggctgcttccacagcggcacggagagcttcagcggggaaggctgccaggtgcgagtggcggccccgtcctcctccccaagtgccgaggccgagtactggcgcatccgagccatggcccagcaggtgtttatgctggacacccagtgctcaccaaagacaccaaacaactttgaccacgctcagtcctgccagctcattattgagctgcctcctgatgaaaaaccaaatggacacaccaagaaaagggaaattgtggtgagcctgctgtctcatcaggtgttactccagaacttatatgacatcttgttagaagagtttgtcaaaggcccctctcctggagaggaaaagacgatacaagtgccagaagccaagctggctggcttcctcagatacatctctatgcagaacttggcagtcatattcgacctgctgctggactcttataggactgccagggagtttgacaccagccccgggctgaagtgcctgctgaagaaagtgtctggcatcgggggcgccgccaacctctaccgccagtctgcgatgagctttaacatttatttccacgccctggtgtgtgctgttctcaccaatcaagaaaccatcacggccgagcaagtggaagaaggtcctttttgaggacgacggagagaagcacggattcttcccagcagtgttcatctgaggatgaagacatctttgaggaaaccgcccaggtcagccccccgagaggcaaggagaagagacagtggcgggcacggatgcccttgctcagcgtccagcctgtcagcaacgcagattgggtgtggctggtcaagaggctgcacaagctgtgcatggaactgtgcaacaactacatccagatgcacttggacctggagaactgtatggaggagcctcccatcttcaagggcgacccgttcttcatcctgccctccttccagtccgagtcatccaccccatccaccgggggcttctctgggaaagaaaccccttccgaggatgacagaagccagtcccgggagcacatgggcgagtccctgagcctgaaggccggtggtggggacctgctgctgccccccagccccaaagtggagaagaaggatcccagccggaagaaggagtggtgggagaatgcggggaacaaaatctacaccatggcagccgacaagaccatttcaaagttgatgaccgaatacaaaaagaggaaacagcagcacaacctgtccgcgttccccaaagaggtcaaagtggagaagaaaggagagccactgggtcccaggggccaggactccccgctgcttcagcgtccccagcacttgatggaccaagggcaaatgcggcattccttcagcgcaggccccgagctgctgcgacaggacaagaggccccgctcaggctccaccgggagctccctcagtgtctcggtgagagacgcagaagcacagatccaggcatggaccaacatggtgctaacagttctcaatcagattcagattctcccagaccagaccttcacggccctccagcccgcagtgttcccgtgcatcagtcagctgacctgtcacgtgaccgacatcagagttcgccaggctgtactgtgttgtacctttatttctgtatttctaaaagaagaaagttctttcctagcagggtttgaagtctgtggcttatcagcctgtgacacagagtacccagtgaaagtggctgtcctaacatactctgcactcgagttaccagccatccacactgacatcagatttcaaccagaaccatcactgagtgacagcagtacttctcagaggtatttgcagcttgatgcaaagtag

SEQ ID NO: 123837 - DNA, 2220 bp, Homo sapiens; identical to SEQ ID NO: 117499

SEQ ID NO: 123838 - DNA, 1726 bp, Homo sapiens
atgcctgaaattgccacacccttgttagggagagacattctagcaaaaacaggggccattatacacctgaacataggagaaggaacacccgtttgttgtcccctgcttgaagtctgggtaacagaaggacaatatggacgagcaaagaatgcccgtcctgttcgagttaaactaaaggattctgcctcctttccctaccaaaggcagtacccccttagacccgaggcccaacaaggactccaaaaaattgttaaggacctaaaagcccaaggcctagtaaaaccgtgcagtagcccctgcaatactacaattttaggagtacagaaacccaatggacagtggaggttagtgcaagatttcgggattatcaatgaggccattgtccatctacacccagctgtacctaacccttatactctgctttcccaaataccagaggaagcagagtggtttacagtcctggaccttaaggatgcctttttctgtatccctgtacatcctgactctcaattcttgtttgcctttgaagatcctttgaacccaacatctcaactcacctggactgttttaccccaagggttcagggatagctcccatctatttggccaggcattaacccgagacttaagccagttctcatacctggacactcttgtcctttggtacatggatgatttacttttagctgcccattcagaaaccttgtgccatcaagccacccaagcgctcttaaatttccttgctgcctgtgactacaaggtttccaaaccaaaagttcagctctgctctcagcagggaagagattttactgtgtggacatctcatgatgtgaacggcatactgactgctaaaggagacttgtggctgtcagacaaccgtttacttaaatatcaggctctattacttgaagggccagtgctgcgactgcgcatttgtgcaactcttaacccagtcccatttcttccggacaatgaagaaaagatagaacataactgtcaacaagtaattgctcaaacctacaccgctcgagggggaccctttagagcaatatggagagaaggggaattcctaatttctgagggaacacctatcaaacatcaggaagccattaggagattattattcgctgtacagcaacctaaagaagtgacagtcttacactgccggggtcatcagaaaggaaaggaaagggaaatagaagggaaccgccaagaggatattgaagccaaaagagccgcaaggcaggaccctccattagaaatgcttataaaaggacccgtagtatggggtaatcccctccgggaaaccaagccccagtactcagaagaagaaatagaatgggggaccccacgagggccatagtttcctcccctcagaatggccagccaccgaagaaggaaaaatacttatgcctgcagctaaccaatggaaattacttaaaacccttcaccatatctttctcttaggcattaatagcacccatcagatggtcaaattattatttactagaccaggccttttcaaaactatcaagcagatagtcaaggcctgtgaagtgtgccaaagaaataatcccctgcactgcagcccatacatttcaatccctttatctttaacctccttgttaagtttgtctcttccagaatcaaagctgtaaaactacaaatagttcttcaaatggagccccagatgcagtccatgactaagatctaccatggacccctgg

SEQ ID NO: 123839 - DNA, 780 bp, Homo sapiens
atgaatattaaaaatccaatagctgctcagcatctggataaccttcctattgtaaaagccagcagcattggaatgacttggggacttgttagaaatggagtctcagcccccacccagaagtcctgcatcagaatccacatcttagcaagatgcacaggtgcagttgcatttgagaagctctacttcaagagccctgccaaccaggcccatgctaggaaggtgggaaaacaggtgcaggactgctacattgggagagacattgtagcaaaagcaggggccattatacatctgaacgtaggaaaaggaacacctgtttgttgtcccctgcttgaagaaggaattaattctgaagtctggacaacagaaggacaatatggacgagccaaagaatgcccgtcctgttcaagttaaactaaaggattccacctcctttccctaccaaaggcagtacccgcttagacccaaggcccaacaaagggcttccaaaagattgttaaggacctaaaagcccaaggcctagtaaaaccatgcagtaacccctgcagtactccaattttaggagtacagaaacccaacagacagtggagaattgaagctctaaagctacaaattgttcttcaaatggagccccagatgcagtccatgactaaaatctaccacggacccctgggccggcctgctagtccatgctctgatgttaatgacatcgagggcaatcctaccaaggaaatctcaactgcaccacccctactatgccccaattcagcaggaagcagttag

SEQ ID NO: 123840 - DNA, 415 bp, Homo sapiens
ccacgcgtccgcccacgcgtccggctggctttccaggcagctgaaagtgtcggcatcaaatccacactggacattaatgaaatggtacggactgaacgacccgactggcagaacgtgatgctgtatgtgacggcgatctacaagtactttgagacctgcaggccggtggctgctggagttttccttctgaagagaatattgaactacactggtgcctcatgggatgggggggtaggggtccccaggatcttctggaggaaggtggccatggatggatgggctgtatctgtgttttccctctgggagtctcatgggtccagcatcaggcctgaggtcagcaacagggaaagagggtgggcacggggagggcttggccccgcctatctagaggcttgcctcgggcccctccttgggg

SEQ ID NO: 123841 - DNA, 3650 bp, Homo sapiens
  misc_feature (1)...(3650): n = a,t,c or g
atggtgcatttcatatccaggctgctgtactcagatggcctggatgtcccaggggatcccatacaggactccgatgatgccgcactttctgtctctccgcactgctctcctgactcacgtgtcagcaccaccaagcacctttgggtatctccaagactgctgcgggtggctgtgagagtgaaaaatattgacattacaaacttcagcagcagctggaaatgatgggctggccttctgtgccctcctgcatacatatctccctgcccacattccatatcaagaactgaacagccaggataagagaaggaacttcatgctggctttccaggcagctgaaagtgtcggcatcaaatccacactggacattaatgaaatggtacggactgaacgacccgactggcagaacgtgatgctgtttgttattggcgatctacaagtactttgagacctgagcatgccgggaggagccgccccaatagcgggggtacccctccacagcgaccgagcgacaccgacgccattagctacgcacccctgtaaagcttccagcaactctgggctgccccacagcgtgtgagcctccagctcggggcttccgtattggaagaactcagccgtgtggcccacagctcccaccagggcccctcccacatgacccgtccattcaggtcatgtgggctcagcacacatcctgcaggccggtggctgctggagttttccttctgaagagaatattgaactacactagtgctccagggcaccaaacaaaaagggctcatgcacagctgaatttgggaaaagggattcagttctgtgggaaactcactagggttgatgaaggctcggccgcggcacttcctgactattggctggggtgggttccggtgctggtgagaacccagaaggagagtcagcgcctggcagttcccagcgccctgggcccttcaccgtcctagtttggaggagcatgttcaccacagacgtgggtcagctgccccacacctgacggggctgtcccggccgacacaatccaggcgtgttcagcctgagctaggagagtatctagagggcgtggtgcgggcacgccagggctggggtgctgctgctgcactcacgcggctgggctttctggcgggaagcagttacgggggccccttgcctggactcagcgacctgtcttccagcctggaaggggtttggagtcccagctctggctttagatttcttcatcataaggagtttttctagttaacatttttgttttgttacgagcaatgctggaaaaggtcgctcctgttctgattagtaccaaagttacattgttttcaataagcatagaaatctaaacaacatctgtacattagcatggtgagagcaaggaataaagcaggaaataggagaaaagtaaacaactttagggagcccaggcagtgtcatttaaactcactgagtcactaagacataattctcctaggccagagttaaagaaagtgccttaactcttcttgtgagggcagccactgccctccgtggccaaggcaggacctccaagactcagtggttgagttgtctcctaccaccatgcccgccctccccagggtacttggttccatgcccccgtgtgcccaccctccccagggtgctgggttccatgctgttttgaaccaaagccttatttaaagggtgggtcactggagatgcttctcaaggccagaactcaaacagctaatttttggggaataggggatctcccgtgtgcctaacgcagtagctattggtttgaacaatgtccagacaagacctgtaccttttgagaatataactgtgtttgtgcacctggcatagcaccatggngggatgaccagccaccagtggaagcggggtcactgccccacagactggatgcaatgaggggctcacaggaggcccagccagcccgattgtgggctgaggggtctgcattcaagcacgatgttctagaataggagtttaacgtgtctacgtaacctagaaatgtggttattaggaaaggggctgtgattgtgggtgcagctggcggcacacctgggtcaccagatggccagaagctgcccatcagccctgcccagatgtcagcctgggagctcaggctgctgccgcttggctggatgccctttagtgaaatgcctgttttcagctaagaaaggagaggccaggcaagcaaagtcatgccacaaagcatatcagagacccccgcagactcctggccccgtcccgccccccgttctgagttgtgtttttgttgctgttcctctgttgatggccagctctgctgttggcatgagccactgatgttcatgtgagaattactgtttttaagtgtctctccacttaggtgtcctcagttcccacttttgctctcatttgccttcacagaggccactccacctgtccggatccagctgtctggtcatggtttggtttatttattttgtccttcagggggctgtttttgccctaaagaattgaggggggcttccctgggtcttgcagtttcccaacttttatcccttgctgggccatgcggagcccagccctgggttgcctcatggggatggggggggtagggggtccccagggatccttcttggaaggaaggttggccatggatggatgggctgtatctgtgttttccctctgggagtctcatgggtccagcatcaggcctgaggtcagcaacagggaaaaaagggtgggccacggggaaggccttggccccgccctatcttagaggcttgcctcgggcccctcccttggggaaggtttgcgtgcagagctgcaagggagagggttccaagaaagcattgcccttttggcctcgtctaatagggatccttagggacactgtgggctttaggaatgcctatagatgcctcacacgtgtttaaagtgacatttggagatgctctcagtcctgtggcatctggcacgaagtctccaagaggccactttgcctcttctcccttcaagcacaagctttactgacaaaagggccagtcgcgtttctatttctctcgatcccaggcttttgcgggaccgaccgatacgtttaaatgttgttctagtccatctctcttgaatgtattaaaatggctgaaacaacaagcttgggcttttctagcttgccctccactccctgccgtccctctgacgtcgcataaaccagaacccagctccctcctgggactggctgtggagagaagggcacctctgagccagcctgtggccctaccccaaggcgcacttcctcatgtgggcagatcctgaccaggagtccagggtggcctcccctgggccacagcacatcaccgtgtggcctggggctgtgggacagtgagccctgtaaccactagggttctgtgacagatgccaagaccccagagaccgtggcagagctacccccaggagagcggaagcccctacacagcccagacacatgccttccctgggggctggggagtgtgtctcggaggggttttgtttgttttgaggcatgtatcatcttggaaataattgtcaggatgtataaaatagagaaaaagaaaaaaggtatcctaccccagaggcaacccagataaacttttttgcctgtgcaaaaaaaaaaaaaaaaa

SEQ ID NO: 123842 - DNA, 605 bp, Homo sapiens
atgatgaatggccccctgagagaatcatacaatataatgagcctactacttggcatgggatggcttgtggggataccggacccggttttacatgatcaaccaaatcatatggtacaagctatcttagaaataatcactaataaaactgacagagccttgactattctggcccagcaagaaactcagatgagaaatgctatcaatcaaaatagattggctcttgactacttgccagcagctgaaggaggcatctgtgggaaatttaaccttactaattgctgtctacacgtagatgatcaagggcaagtagttgaagacatagtcagagatatgataaaactgtcacatgtgcccatgcaagtgtggcatggatttgatcctggggccatgtttggaaaatggttcccagtgttaggaggatttaaaactcttataataggagttatattagtaataggaacctgcttactgctcccttgtttgctacctgtacttcttcaaatgataaaaagcttcatcgctaccttagttcaccaaaatgcttcagaacaactgtactatatgaatcactatcgatctgtcttgcaagaatacatgggtagtga

SEQ ID NO: 123843 - DNA, 879 bp, Homo sapiens
atggagcaggtggcggttttggctcccccatggacatctttgatatgtttttttggaggaggaggaaggatgcacagagaaaggagaggtaaaaatgttgtacatcagctctcagtaaccctagaagacttatataatagtgcaacaagaaaactggctctgcaaaagaatgcaatttgtgacaaatgtgaagatagaggaggtaagaaaggaggagtagagtactgtcccaattgccgaggtactggaatgcaaataagaattcatcagataggacctggaaaggttcagcaaattcagtctgtgtgcgtggagtgccagggccatggggagcagatcagtcctaaagatagatgtgaaagctgcaatggaaggaagatacttcgagagaagaagattctagaatttcatattgacaaaggcatgaaatatggccagaagataacattccatggtgaaggataccaagaaccaggactggagggagaagatattatcattgtgttagatcagaaggacgatgctgtttttactcgacaaggagaagaccttttcatgtgtcagattgtcaagcatggagatatcaagtgtgtaataaatgaaggaatgccaatttatcctaggccatatgaaaagggtcgcctaatcattgaattcaaggtaaacttgcctgagaatgactttctctctcctgataaactgtctttgctggaaaaactcctacccaagaggaaggaagtggaagaaactgatgagatggatcaagtagaactggtggactttgatccaaatcaggaaagatggcaccattacaatggagaagcatatgaggatgatgaacatcatcccagaggtggtgttcggtgtcagacctcttaa

SEQ ID NO: 123844 - DNA, 410 bp, Homo sapiens
gggtttttctcaagtgactttgaaggtaatgcttttgcttaccatatttccaagatggccacgtctgtgcccttaagcaaatatttaatctctgacctgattttccctcatctgtgattacatcacagtttgaggatcatctgtgataacgtgaacattctgtgtatatagtaggtagtcaacagatgtaccctgtgaggctcatcttttattattctttgccacattctttatagtgcctttagcacaaataagatccagcatcttaaacagatttgcaatgagaaatattttgttttaggtaaaaatgttgtacatcagctctcagtaaccctagaagacttatataatggtgcaacaagaaaactggctctgcaaaagaatgtgatttgtgacaaatgtgaaggtag

SEQ ID NO: 123845 - DNA, 1798 bp, Homo sapiens
ctgcggcgcgccgggcggaactttccagaacgctcggtgagaggcggaggagcggtaactaccccggctgcgcacagggcggttctgggttcccgctttgtcacacacggggctcaacccgcaccggcagtagaagatggtgaaagaaacaacttactacgatgttttgggggtcaaacccaatgctactcaggaagaattgaaaaaggcttataggaaactggccttggaagtacccatcctgataagaacccaaatgaaggagagaagtttaaacagatttctcaagcttacgaagttctctctgatgcaaagaaaagggaattatatgacaaaggaggagaacaggcaattaaagagggtggagcaggtggcggttttggctcccccatggacatcctttgatatgttttttggaggaggaggaaggatgcagagagaaaggagaggtaaaaatgttgtacatcagctctcagtaaccctagaagacttatataatggtgcaacaagaaaactggctctgcaaaagaatgtgatttgtgacaaatgtgaaggtcgtagggaaggtttaaagaacagggagcagttagaagtgcttgtcccaattgccgaggtactggaatgcaaataagaattcatcagataggacctggaatggattcagcaaattcagtctgtgtgcatggagtgccagggccatggggagcggatcagacctaaagatagatgtaaaagctgcaacggaaggaagatagttcgagagaagaaaattttagaagttcatattgacaaaggcatgaaagatggccagaagataacattccatggtgaaggagaccaagaaccaggactggagccaggcgatattatcattgtgttagatcagaaggaccatgctgtttttactcgacgaggagaagaccttttcatgtgtatggacatacagctcgttgaagcactgtgtggcttccagaagccaatatctactcttgacaaccgaaccatcggtcatcacctctcatccagggtcagattgtcaagcatggagatatcaagtgtgtactaaatgaaggcatgcccaatttatcgtagaccatatgaaagagggtcgcctgaatcatcgaatttaaggtaaactttcctgagaatggctttctctctcctgataaactgtctttgctggaaaaactcctacccgaggaggaaggaagtggaagagactgatgagatggaccaagtagaactcggtggactttgatccaaatgcaggaaagacggcgccactacaatggagaagcatatgaggatgatgaacatcatcccagaggtggtgttcagtgttcagacctcttaatggggccagtggaataacactcactgctggcatttaatgtgcagtagtgaatgagtgaaggactgtaatcataatatagctcactacttgctcttgtttttgttttaattaaactattaggtagtgttttaaaaagttaaatggaggattaaacgccaaatataaaagctctggattttgccccggtatgtatgatggactttcagtggtgcaaagatggaagtttaaattaccccgtaaaaactacaaagaagttcccctaagcatttctaggccaaaccttgtaattgacttcagctatgtaccgtgggacaagcttagactgaaatgctaggtatatgtattggcttcagtgtatgacccttcattgttaagctatgaaagtaaaactctgtatttaactggcaatgaggaaaaaaaaattttgtagagaaaaaaaaaaaa

SEQ ID NO: 123846 - DNA, 480 bp, Homo sapiens
atgggtactcccaagcccccagaaagagagaggagaatgctcatccctctcccagcctttctcaaaggcccaacccgatgcagcaagcctcgagccgccgtccctcgaaactcctgctggcaggacgccagcgacgctcacccagggcagccctcccgcggccgtccgggaaccgctatccccaggacacaacgcgaaagctcgactgaggtcccgtcccgccaggcctccgtggattccggaccccgaccccccgggtcactttgtcaccgatttctgcgcgccagaatctctgcagggggagacgcggacctcccgctcttttcagctcctgtgaagcctcaggcgccctctcccgcggagactcacctcttgctgagcggccggacccgcacggcgacctgcacgttcgccatccgtctgccacaacccaagtccagcgggtcagctcagcggcagcatcccaggcccccgccctaa

SEQ ID NO: 123847 - DNA, 474 bp, Homo sapiens
agtgggtcagtgtcttctcaggggcacagctgggggcacaggggatgcctctcagtgacgtttgagctgagactgaagagttcaggcaaatgcatctgggggaagactgcttcaggcaaaaggctagcatgtgcaaagtccctgaggaggcagagtgttcagcggagatggagggagaggaggcagcaggggcggcagggccagatccagttggccacaggaagaaatgtgggtttcatcctgtgtgtgagcgggaagccccgagcacatttgcagctgttatgatccatctggtgggtaatccctggcatgcaactgttttattcccactctggggccgggatgcctgggttcaaatcaaattctgccacttcccagctctgtgatctcgttccagttccttaccatctgtgagcctcggtttctccatctgtaaagtgcgggtagggggaggaggaaagacactgacccact

SEQ ID NO: 123848 - DNA, 1372 bp, Homo sapiens
atggagggagaggaggcagcaggggcggcagggccagatccagttggccacaggaagaaatgtgggtttcatcctgtgtgtgagcgggaagccccgagcacatttgcagctgttatgatccatctggtggttcagtacatcggggagatctgccgctacctgctgaagcagccggtgcgcgaggcggagaggcgacaccgcgtgcgcctggcggtggggaacgggctgcgtcctgccatctgggaggagttcacggagcgcttcggcgtacgccaaatcggggagttctacggcgccaccgagtgcaactgcagcattgccaacatggacggcaaggtcggctcctgtggtttcaacagccgcatcctgccccacgtgtaccccatccggctggtgaaggtcaatgaggacacaatggagctgctgcgggatgcccagggcctctgcatcccctgccaggccggggagcctggcctccttgtgggtcagatcaaccaacaggacccgctgcgccgcttcacatggctatgtcagcgagagcgccaccagcacgaagatcgcccacagcgtcttcagcaagggcgacagcgcctacctctcaagagacgcgctaatgatggatgaactgggctacatgtactatcgcgaccggagcggggacaccttccgctggcgaggggagaacgtctccaccaccgatgtggagggtgagcttagccgccttgctgggccagacagacgtggccgtctatggggtggctgttccaggcaagctggggttgcagggggtggtcctgaggcatggagtggagggtaaggcagggatggcggccgtcgcagacccccacagcctgctggaccccaacgcgatataccaggagctgcagaaggtgctggcaccctatgcccggcccatcttcctgcgcctcctgccccaggtggacaccacaggcaccttcaagatccagaagacgaggctgcagcgagagggctttgacccacgccagacctcagaccggctcttcttcctggacctgaagcagggccactacctgcccttaaatgaggcagtctacactcgcatctgctcgggcgccttcgccctctgaagctgttcctctactggccacaaactctgggcctggtgggagaggccagcttgagccagacagcgctgcccaggggtggccgcctagtacacacccacctggccgagctgtacctggcacggcccatcctggactgagaaactggaacctcagaggaacccgggcctctctgctgccttggtgcccctgtgtctgcctcctctccctgcttttcagcctctggctccttccatccctgtccctgtctggccttaactcttccc

SEQ ID NO: 123849 - DNA, 532 bp, Homo sapiens
tttttttggcataaacacaaactttattgaggccctcagcactagttctctttctcctgcacagtcttggttccccggagacgtccagtccggcgggcagcaatgagacccactttgcggccagcaggggcatctctgcggatggtggagggcttgcgcatgtgctggtggttgccacctccaaaaggatgctccacaggattcatggccacaccccgtactcgtggccagcagttcctctttgccttatatttgtggtacgcccggccagccttcaagatgggtttgtcaattcggccacctccagccaccacaccaaccacagctctgttggctgaggagataaccttcttggagccggaggcagcttcacacgggtcttcttggtctcagggttgtgggagataacggtggcatagttccctgatgcccgggccagcttgccacggtctccaggcttctcctccaggcagcacacgattgtaccctcaggcatggtgcttcacgtgcgcgcggaacacagacacggcgc

SEQ ID NO: 123850 - DNA, 463 bp, Homo sapiens
gcgtgaggcagtgtcgtggaattcgggatccgtatcggtttaagaagcggacggagctgttcattgccgccgagggcattcacacgggccagtttgtgtattgcggcaagaaggcccagctcaacattggcaatgtgctccctgtgggcaccatgcctgagggtacaatcgtgtgctgcctggaggagaagcctggagaccgtggcaagctggcccgggcatcagggaactatgccaccgttatctcccacaaccctgagaccaagaagacccgtgtgaagctgccctccggctccaagaaggttatctcctcagccaacagagctgtggttggtgagtatcaggcagcagttgaatgctgagggctgtgggtgaacatgctgtgagtgccggtggacagccagtggctagacttggtccctggaattcgattacctgttgttctaaaacttgggttctgtaa

SEQ ID NO: 123851 - DNA, 843 bp, Homo sapiens
atgcaggaagtaccaggcatgtttgaacgtaattacccccaccctgctataactttcaagccatctgtgccagtttcacgcagtctggactacgcgcccctcccggggggggtcttccgcgacccgtactggtttaagaagcggacggagcttttcattgctgccgagggcattcacacgggccagtttgtgtattgcggcaagaaggcccagctcaacattggcagtgtgctccctgtgggcaccatgcctgagggtatgatcgtgtgctgcctggaggagaagcctggaggccgtagcaagctgtcctgggcatcagggaactatgccactgctatctcccacaaccctgagaccaagaagacccgtgtgaagctgccctctggctccaagaaggttgtctcctcagccaacagagctgtggttggtgtggtggctggaggtggccgaactgacaaacccatcttgaaggcttgccaagcctaccacaaatataaggcaaagaggaactggtggccacgagtatgggatgtggccatgaaccctatggagcatccttttggaggtggcaaccaccagcacatcggcatcccctccgccatctcagagatgaccctgctggctgcaaaatgggtctcattgctgcccgccagactggacgtctctggggaaccaagactgtgcaggagaaagagaactagtgctaaggggctcaataaagtttgtctttatgccaaaaaaaagtgtcagacctgcattgcagttccaggctccacctactcacggttcttcttccctttgtcctccatagacctttcccctgatacgtctcttgcacattga

SEQ ID NO: 123852 - DNA, 965 bp, Homo sapiens
cagtgtggcggaattcggagaacaggacccgtcgccatgggccgtgtgatccgtggacagaggaagggcgctttttctgtgtttcgcgcgcacgtgaagcaccgtagaggcgctgcgcgcctgcgcgccgtggatttcgctgagcggcacggctacatcaagggcatcgtcaaggtgcggaacgctggccggggcgggaggggaagggacgcccggccggaacgccgcactcacgccgcctctgcccacaggacatcatccacgaccggggccggcggcgcgcccctcgcccagggtggtcttccgggatccgtatcggtttaagaagcggacggagctgtttcattgccgccgaggggcattcacacgggccagttttgtgtattgcggcaagaaaggcccagcctcaacattggcaatgtgctccctgtgggcacccatgccctgagtgtacaatcgtgtgctgcctggaggagaagcctggagacctgtggcaagcctggcccgggcatcagggaactatgccaccgttatctcccaacaaccctgagaccaagaagaccccgtgtgaagctgccctccggctccaagaaggttatctcctcagccaacagagctgtggttggtgtggtggctggagggtggcccgaattgacaaacccatctttgaaggctggcccgggcggtaccacaaatataaggcaaagaggaactgctagccacgaatacggggtgtgggccatgaatcctgtggagcatcccttttggaggtggcaaccaccagcacatcggcaaagccctccacccatccgcagagatgccccctgctggccgcaaagtgggtctcattgcttgcccgccggactggacgtctccggggaaccaagactgtgcaggagaaagagaactagtgctgagggcctcaataaagttttgtgtttatgccaaaaaaaaaaaaaaaaaaa

SEQ ID NO: 123853 - DNA, 405 bp, Homo sapiens; identical to SEQ ID NO: 119913
  misc_feature (1)...(405): n = a,t,c or g

SEQ ID NO: 123854 - DNA, 346 bp, Homo sapiens
caagaaagtactttgagccactctcgcatggaaaggagtgtctttatgcctcgacctcaagctgtgggctcttccaattatgcttccaccagtgccggactgaagtatcctggaagtggggctgaccttcctcctccccaaagagcagctggagacagtggtgaggattcagacgacagtgattatgaaaatttgattagaacaaatcagatataccttctcttgtctgcatgactttgtgagataaagagagggcttccaacttttttctactagcttgatatgtattatcacttaaaatggttgcctttaaaaaaaaagggggggatcctattcccggtgggaa

SEQ ID NO: 123855 - DNA, 423 bp, Homo sapiens
atgaaagtcattgggtggtacagattccggcgcaatacgcagcagcagatgtcctacagagagcaggttcttcacaagcagctcacccgcatcctcggcgtgcccgacctcgtctttcttctcttcagcttcatctccactgccaacaattccactcacgctttagaatatgtgctcttcagaccaaatagaagcgccaacagcaacgcggaccacgtaggtgccgggccccctgccgcgcccgctgggggctttcagcctctgtctcaggccggcgctcgcggccaagccgggacctcatgcggctcgccccctgggcaccagggccggccggaggagctggtgacccgggcggctcccgcccccggttgtcgtgggggtgctgcgagtgaaaccgtggctgtcactactgatacttgttag

SEQ ID NO: 123856 - DNA, 3020 bp, Homo sapiens
tggagatttccatcatggcggcgtccatttcgggctacaccttcagtgctgtgtgtttccacagcgccaacagcaacgcggaccacgaaggatttttactgggagaggtaagacaagaggaaacgtttagcatcagtgactcacaaaatcagcaacacagaatttctgcaagtaattgaaatccataaccatcagccttgttcaaaactttttagtttttatgactacgcaagcaaagtgaatgaggagagtttggacaggattcttaaagatcggagaaagaaagtcattggggtggtacagattccggcgcaatacgcagcagcagattgtcctacaagtgagcaggttcttcacaagcagctcaccccgcatcctcggcgtgcccgacctcgtctttcttctcttcagcttcatctccactgccaacaattccactcacgctttagaatatgtgctcttcagaccaaatagaaggtataatcagaggatatcactcgctattcccaatctaggaaatactagccagcaagagtacaaagtgtcttcagtgccaaatacttctcagagttatgccaaagtgattaaagaacatggtactgacttttttgacaaggatggagtgatgaaagacatcagggcgatttatcaggtttataatgcacttcaggagaaagttcaggcagtgtgtgcagatgttgaaaagagtgagcgagttgttgaatcttgtcaggcagaagtgaacaaattaagaagacaaatcactcagaggaaaaatgaaaaggaacaagaaagaagattgcagcaggcagtgttaagcagacagatgccgtctgaaagcttggacccagcgttcagtcctcggatgccgtcctctgggtttgcagctgaaggcagaagtacacttggagatgcagaggcctcggatcctcctcccccttactctgattttcacccaaacaatcaagaaagtactttgagccactctcgcatgggaaaggagtgtctttatgcctcgacctcaagctgtggggctcttccaattatggcttccaccagtgccggatttgaagtattcctgggaagtggggctgaccttcctcctccccaaagagcagctggagacagtggtgaggattcagacgacagtgattatgaaaatttgattgaccctacagagccttctaatagtgaatactcacattcaaaggattctcgacccatggcacatcccgacgaggaccccaggaacactcagacctcccagatttaactaaacaaaagaaactctccacctagctagtgactgtttttcttcattgcttactgagagggtttttgagaacttaatctggggggagaactgctttctcagataccttaactcccgagaagagagttccttgtgcacagaacttgtgggagcctccatccgctgctctttacctttggatacagtgtgccaagtttcatgacagaatccattaggattaatcaaattgtcctaattctggtgcggattcatggatatactggtaaatttaggcaaagtgaaactttatccagcggtagtttctgttctttaaaataaattggaaattagagacctaagcacaattagtcctataaatggttcctataaatcaaaagcttaccctcttgcactatcatgccttgaaatttactttttcaaagggaaacaagtttagcagcagccttcaaagaacttctttctatgatgagcccaaattcatctttgccagaaaagaaattttgataattccaagaagcctgattagaacaaatcatatatagccttctcttgtctgcatgactttgtgagataaaagagagggcttccaacttttttctactagcttgatatgtattatcacttaaaatgggttgcctttaaaaaaaaaaagtagagatactaattaccagtaagtaatcatccaaataaatacgtcataaaataaattaattattttttctttgatggattacagtgactactgtgttgcactggcacatttatggtctctgttctggaatcttggaggacacacagcagtggagaacagaaggagtgagttttataatgaacagattccagacacggtaggtttagctgagttcatacagaggagatataactcatttagatcttctgacaaatcctagtgttagttttatctgtggaggaaagacatttaataataaactgtttgggaatcttggtgaataaagattcattttcaagctgaataaccatacttattttattttaagttgccattttggggaataattgcagtatgtgtagagactctcttggggatgcacttatatttttatttaatgactacttgttttctagttttgcccacaacgtctgaaaccactaagacattcaggagcatgttgagcttctggtttggaaacagcaagacccaccatttatgacaaggacagccatgaggttaatacttggagtttaactgccttccctttgaactagttaaaatctgtaagaataaggaagttgttgaaggcttaaaatctggggttctggaaaaagtagtttccagtttatgggataccacatttactcactggggctcccagttccaatactaaattagacagtatcatatagacggaaaatgaaatgcttagaactgccgttcttttggatcgccactctatgggggtctgtcttttaactacctctcctggttatggttgggccttacacccactgcccattggatttaaaacgctgcagacactttatctgcaaatgtgttccagttgttatcagctacctactacgcagcttcagcgccagtgtgaatttatttttttttaagtgccattacccgtctcctctgttcagattttgacattcaggaaaatatttttattttgatgccatactgaaatctacaatgtatatctgacaaagcagttaaatgtgacaataaaaaacttatttaatcatggtaaaaaaaaaaaaa

SEQ ID NO: 123857 - DNA, 516 bp, Homo sapiens
atggtgcttatggtggaggatatggagcctgtgacaattataatggctatggctatggatttgggtcagatagatttggaagagacctcaattattgtttttcaggaatgtctgatcacaaatatggggatggtggctctaccttccagagcacaacaggacactgtatatacggtacacattgaaattggtcctgatggcagagtaactggtgaagcagatgttgagtttgcaactcatgaagatgctgtggcagctatgtcaaaagacaaagcaaatatgcaacacagctatgtagaacccttcttgaattgtgcagcaggagccagcggtactgcttacggtagccaaatgatggggggcatgggcttgtcaatccagtccagttatggtggcccagccagcccgcagctgagtggtggttatggaggtggctatggtggccacagcagcatgagtggatttgaccaagttttacaggaaaactcatgtgattttcaatcagacattgcatag

SEQ ID NO: 123858 - DNA, 1314 bp, Homo sapiens
  misc_feature (1)...(1314): n = a,t,c or g
ctaaatacctgtataaaatgaactaatggtttctctcccctccctaccccttccttatgaacaatgctttaggtatattgaaatctttaagagcagtagagctgaagttagaactcattatgatccaccacgaaagcttatggccatgcagcggccaggtccttatgacagacctggggctggtagagggtataacagcattggcagaggagctggctttgagaggatgaggcgtggtgcttatggtggaggctatggaggctatgatgattacaatggctataatgatggctatggatttgggtcagatagatttggaagaggtaaggtaagaattgaatttctcagttgaaggatgcttacactcttgtccatctagacctcaattactgtttttcaggaatgtctgatcacagatacggggatggtggctctactttccagagcacaacaggacactgtgtacacatgcggggattaccttacagagctactgagaatgacatttataattttttttcaccgctcaaccctgtgagagtacacattgaaattggtcctgatggcagagtaactggtgaagcagatgtcgagttcgcaactcatgaagatgctgtggcagcttatgtcaaaagacaaagcaaatatgcaacacagatatgtagaactcttcttgaattctacagcaggagccaagcggtggtgcttacgaacacagatatgtagaactcttcttgaattctacagcaggagcaagcggtggtgcttatggtagccaaatgatgggaggcatgggcttgtcaaaccagtccagctacgggggcccagccagacagcagctgagtgggggttacggaggcggctacggtggccagagcagcatgagtggatacgaccaagttttacaggaaaactccagtgattttcaatcaaacattgcataggtaaccaaggagcagtgaacagcagctactacagtagtggaagccgtgcatctatgggcgtgaacggaatgggagggttgtctagcatgtccagtatgagtggtggatggggaatgtaattgatcgatcctgatcactgactcttggtcaaccnnnnnnnnnnnnnnnnnnnnnnnnaaaaaactttaatttaaacagttttggcaataacagttggggatttatgcttactttaagggaaaatcaggatggttttgaaaactaaggcgcccattttttggattccaatcctcatttaggagtgaacggggaggctgggaaccttatacgtggaaactaaagtcccagctttttctaagtaagtaataga

SEQ ID NO: 123859 - DNA, 3714 bp, Homo sapiens
atgagggttcgccatgttggccaggctgctctcgaacttctgacctcagtaagagaatccagggcaacctctgcctttcaggtgtctccttatgaggatgagccttgccgcccctgtaattgtgaccctgtggggtccctcagttctgtctgtattaaggatgacctccattctgacttacacaatgggaagcagccaggtcagtgcccatgtaaggaaggttatacaggagaaaaatgtgatcgctgccaacttggctataaggattacccgacctgtgtctcctgtgggtgcaacccagtgggcagtgccagtgatgagccctgcacagggccctgtgtttgtaaggaaaacgttgaggggaaggcctgtgatcgctgcaagccaggattctataacttgaaggaaaaaaacccccggggctgctccgagtgcttctgctttggcgtttctgatgtctgcagcagcctctcttggcctgttggtcaggtaaacagtatgtccgggtggctggtcaccgacttgatcagtcccaggaagatcccgtctcagcaagatgcactaggcgggcgccatcaggtcagcatcaacaacaccgcggtcatgcagagactggctcccaagtactactgggcagcccccgaggcctaccttggaaataagctgactgcgtttggcggattcctgaaatacacggtgtcctacgatattccggtagagacggtagacagtaacctcatgtcgcatgctgacgtcatcattaagccttatgaagagtacctaaacgtggttagacttgtgcctgaaaacttccaagattttcacagcaaaaggcagattgatcgtgaccagctgatgactgtccttgccaatgtgacacatcttttgatcagagccacctacaattctgcaaaaatggctctttacaggtatgtattgaaattggaggaaaaacttatggtgaagcggcagtgcacgtgcaccgagaacctctttgctgggctgtgggtggtctttggtttcatgtttctgcggaaaccagctacagtgggatatgaaggctctgacattctagatcctggcccaccgtgttggttgttcctcatgggacagtcagtctctagcacagtttctgaatgtctgaaggaagtcaacgggaagcatcgggtcaatttcctgcctcagactgcaaaacggatctggacacatctcccatcactttgtgatacccatttgctttttcttcttgaaattgtactgtatggaagtggtgtgcaggcaacatcttcgccttctggtgcccttgatgatgattttctggaaaagaacattccaccagaggctgaagagctgtcatttgaagtgtcttattcagaaatggttacggaggctctaaaaagaaataaacttaagaaatcagagattaagaaagaagactatgttttaactaaatttaatgttcagaaaaccagatttggcttaactgaagcaggagatctgtctgctgaagacatgaagaaaatccgccatctctctctgattgaattgactgccttttttgatgcctttggaattcaactgaaaaggaacaaaacagagaaagtaaaaggacgagagaccttcattcacattgactcacctgttttcatattgaaattttgccaatatgtctttggctttggtttgattgttgagttgaatggccatggacaccttggagagaagtggagcatggacccgtatgactccttccggcactgcccagctctggctgagcctgcaggaggctgtgcggcatccggagtggtcaggggtgggtcagagttggccctggaaacaggtgcacgtcccctggatttatgcctcattttggacgctctcccccttcaccgcgacagcggcaacgtggacccctcggaggctggtcactgtgactcagtcaccggggagtgcctgaagtgcctggggaacacagatggcgcccactgtgaaaggtgtgctgacgggttctatggggacgctgtgacagccaagaactgccgcgacagaggatctcttaaaggaattctcggccactccccctttcaaagccctcctgtgacttcccactgtgccgaaaatccaaacaccctcaaagcccctcctccctatgttggagccacatctgccctggtgctgtccctgggtggtccagtgacaccgtggctctcggttgagctaagcatccgcacgttcgcctccagcggcctgatttactacatggctcatcagaaccaagcagactacgctgtgctccagctgcacgggggccgcctccacttcatgtttgaccttggcaaaggcagaacaaaggtctctcaccctgcactgctcagtgatggcaagtggcacacggtcaagacagactatgttaaaagaaaaggcttcataactgtcgacggccgagagtctcccatggtgactgtggtgggagatggaaccatgctggatgtggagggtttgttctacctaggaggcctgccctcccagtaccaggccaggaaaattggaaatatcacccacagcatccctgcctgcattggggatgtgacggttaacagcaaacagctggacaaggacagcccggtgtctgccttcacggtgaacaggtgctacgcagtggcccaggaaggaacatactttgacggaagcggatatgcagctcttgtcaaagagggctacaaagtccagtcagatgtgaacatcacactggagtttcgaacctcctcgcagaatggcgtcctcctggggatcagcactgccaaagtggatgccattggactagagcttgtggacggcaaggaaaatgtctttggccctcagtgcaacgaatgtcgagatggcaccttcgctctccgcgcagacaaccccctgggctgcagcccgtgcttctgctccgggctgtcccacctctgctcagagctggaggactacgtgaggaccccagtaacgctgggctccgatcagcctcttctgcgtgtggtttctcagagtaacttgaggggcacgactgagggggtttactaccaggcccccgacttcctgctggatgccgccaccgtccggcagcacatccgtgcagagccgttttactggcggctgccgcagcagttccaaggagaccagctcatggcctatggtggcaaactgaagtacagcgtggccttctattctttggatggcgtcggcacctccaattttgagcctcaagttctcatcaaaggtggtcggatcagaaagcaagtcatttacatggatgcaccagccccagagaatggagtgagacaggaacaagaagtagcaatgagagagaatttttggaaatattttaactctgtttctgaaaaacctgtcacgcgagaggattttatgtctgtcctcagcgatattgagtacatcctcatcaaggcatcgtatggtcaaggattacagcagagcaggactgcgcccctgggtaccacagagggaagctcccagcagggagtgacaggggaccacgccctctggttgctccttgtgttccctgcagttgcaacaaccacagtgacacctgtgaccccaacaccgggaagtgtctggtatgctggtttgtgggggtgcttgcctgagtttagaagtaaagtggacgctgagtgtcagatttccggtctaagtcatagccgtgccttggtttag

SEQ ID NO: 123860 - DNA, 286 bp, Homo sapiens
tgcccagctctggctgagcctgcaggaggctgtgcggcatccggagtggtcaggggtgggtcagagttggccctggaaacaggtgcacgtcccctggatttatgcctcattttggacgctctcccccttcaccgcgacagcggcaacgtggacccctcggaggctggtcactgtgactcagtcaccggggagtgcctgaagtgcctggggaacacagatggcgcccactgtgaaaggtgtgctgacgggttctatggggacgctgtgacagccaagaactgccgcg

SEQ ID NO: 123861 - DNA, 278 bp, Homo sapiens
tcaaagagggctacaaagtccagtcagatgtgaacatcacactggagtttcgaacctcctcgcagaatggcgtcctcctggggatcagcactgccaaagtggatgccattggactagagcttgtggacggcaaggaaaatgtctttggccctcagtgcaacgaatgtcgagatggcaccttcgctctccgcgcagacaaccccctgggctgcagcccgtgcttctgctccgggctgtcccacctctgctcagagctggaggactacgtgaggacccca

SEQ ID NO: 123862 - DNA, 330 bp, Homo sapiens
ccttatgaagagtacctaaacgtggttagacttgtgcctgaaaacttccaagattttcacagcaaaaggcagattgatcgtgaccagctgatgactgtccttgccaatgtgacacatcttttgatcagagccacctacaattctgcaaaaatggctctttacaggtatgtattgaaattggaggaaaaacttatggtgaagcggcagtgcacgtgcaccgagaacctctttgctgggctgtgggtggtctttggtttcatgtttctgcggaaaccagctacagtgggatatgaaggctctgacattctagatcctggcccaccgtgttgg

SEQ ID NO: 123863 - DNA, 795 bp, Homo sapiens
gcctgcaattgcagtctcgtggggtcgactcatcatcggtgcgatgtggtcactggccattgccagtgcaagtcaaaatttggtggccgggcctgcgatcagtgttccttgggttacagagactttcccgactgtgttccctgtgactgtgacctgagggggacgtcgggggacgcctgcaacctggagcagggtctctgcggctgtgtggaggaaaccggggcctgcccttgcaagttcctaacgggttacacgtctacagcccaggggatggggacacctgtcttagttcatctggactgcagtaacaaaataccatacactgagtggcttataagtaacagaaatttggaggatgggaagttcaggatcaaggcaccagcagatttagtgtctagtaaagacttgcttccacctagacagccatcttcttcctgtgtcctcacagggagccatgacccttatgatggggagggcacggatgaactcagaacccagggcttgcagcccagacaccgagcaactggcccggcagtcaggcacatacccataagcctggggcaggccacggtgttagaagactctaaagcggcactgccaggtcttggacccacactaatggctgtgactgtggtgacaacagaagctgcagtagccatggttgtgggtgataggggagaggagagaggagggactctggtagctccaggaaccagggtgggaggccagtttgcccatcagtcaccggagcctgtccctatagagtctgcacagatatttaactctatgacctga

SEQ ID NO: 123864 - DNA, 837 bp, Homo sapiens
atggtggtggaaggtgaagttgtggcggtgcggggggcaggcacatcacgtggagagaatgggagaaagagagatagagaaggcggatgtccaactctttcaaacaaccagatctcaaccaagaatgaactgagcgagaactcaccaccaagggggggaaactgcagtgtcaatgtgagcataatacttgcggggagagctgtaacaggtgctgtcctgggtaccatcagcagccctggaggccgggaaccgtgtcctccggcaatacatgtgaagcaacttgtgcagacatggagcgggccagggtgtgattggagctgtgtgtttgaatatcgccctgctgccagcgttgaggagggaatggctgccaggggtgttgggttaggagacaagacccgaaatgaatctttctgcttggtaggaggagaaactgatcgtcaggttcacctcctgcctctgctgtggggcagcggctgcagccggaggtgtggacaggccgtccagagaaagaggcggcttgaaatgaaacacggaggggagacacacgagaaacaagagggagggcaggagagtgggcgtcccaaataccacaggaagagggcgatgcaaaagggagagggaggtcacggggtcccttccgcagagccacggggtaagagggggaccgaagtctgctccctgaatttggtgcctgggaaatctctggagactttagggagaacagatgcagcagacaaggggccaggaggacactatgcgaaacttggattggacggatgtgccagggaggtggatgttctgatggaggataaaagggagggggtgtcttgtgtttga

SEQ ID NO: 123865 - DNA, 539 bp, Homo sapiens
atatcacattgtttggccagtcatcaaatgcatcattttacttcaaccagattaggagttcagtggttctggggggctgggggaacacggccaccaatcctaacaaccctatcactcaggacaaaagaggcaagaatgaacggttccaggatttccggcttggggaacctggtgggcgttatgccttcagccaagaaaaagaaagcctgtttcctgccattctcaatcttgccagcaatgctcacatcagcaccaatgccacctgtggcgagaaggggccggagatgttctgcaaacttgtggagcatgtgccaggcctgtttcctgccattctcaatcttgccagcaatgctcacatcagcaccaatgccacctgtggcgagaaggggccggagatgttctgcaaacttgtggagcatgtgccaggtcggcccgtccgaaacccacagtgccggatctgtgatggcaacagcgcaaaccccagaggcaagtgtcgcgcctttatttctgaaattcccatgggaatgtacactttgtga

SEQ ID NO: 123866 - DNA, 638 bp, Homo sapiens
atgaagcgggcacattattagaaagcaggacgataaatgtgtccaatctgtacgtcgggggaattccagagggagaggggacgtcactgctcacaatgagaagatcgttccatggctgtatcaaaaacctgatcttcaatttggaacttttggatttcaacagtgcagttggccatgagcaagtcgacctggacacctgctggctgtcagaaaggcctaagctggctcccgatgcagaggacagcaagctcttgccagagccccgggctttttcagaacagtgtgtggtggatgcagctctggagtacgttcccggcgctcaccagtttggtctcacacaaaacagctattccatcttgccttttaatcagtcggctgtcagaaagaagctctcggttgagctaagcatccgcacgttctcctccagcggcctgatttactacatggctcatcagaaccaagcagactacgctgtgctccagctgcacgggggccgcctccacttcatgtttgaccttggcaaaggcagaacaaaggtctctcaccctgcactgctcagtgatggcaagtggcacacggtcaagacagactatgttaaaagaaaaggcttcataactgtcgacggccgagagtctccc

SEQ ID NO: 123867 - DNA, 2092 bp, Homo sapiens
atgagctcaaatcaaaagtcaccaacaaaaacaagtaaatcccctgggacagctaatgttctggatgtaaacaattcaacactcatgtttgttggaggtcttggaggacaaatcaagaaatctcctgctgtgaaggttactcattttaaaggctgcttgggagaggccttcctgaatggaaaatccataggcctatggaactatattgaaagggaaggcaagtgccgtgggtgcttcggaagctcccagaatgaagacccttccttccattttgacgggagtgggtactctgtcgtggagaagtcacttccggctaccgtgacccagataatcatgctttttaataccttttcacctaatggacttctttctctacctgggttcatacggcacaaaagactttttatccatcgagctgtttcgtggcagagtgaaggttatgactgacctgggttcaggacccattacccttttgacagacagacgttataacaatggaacctggtacaaaattgccttccagcgaaaccggaagcaaggagtgctagcagttatcgatgcctataacaccagtaataaagaaaccaagcagggcgagactccgggagcatcttctgacctcaaccgcctagacaaggacccgatttatgtgggtggattaccaaggtcaagagttgtaaggagaggtgtcaccaccaaaagctttgtgggctgcatcaagaacctggaaatatccagatcaacctttgacttactcagaaattcctatggagtgagaaaaggctgtttactggagcccatccggagtgttagcttcctgaaaggcggctacattgaattgccacccaaatctttgtcaccagaatcagaatggctggtaacatttgccaccacgaacagcagtggcatcatcctggctgccctcggcggggatgtggagaagcggggtgatcgtgaggaagcacacgtgcccttcttttccgtcatgctgatcggaggcaacattgaggtacatgtcaatcctggggatgggacaggcctgagaaaagctctcctgcacgctcccacgggtacctgcagtgatggacaagcgcattccatctccttggtcaggaatcggagaattatcactgtccaattggatgagaacaatcctgtggaaatgaagttgggcgcattagtagaaagcaggacgataaatgtgtccaatctgtacgtcgggggaattccagagggagaggggacgtcactgctcacaatgagaagatcgttccatggctgtatcaaaaacctgatcttcaatttggatcatgggtttgtggactcggtagagcagaaacgtttctgtggagttcccagctgtgcccgggaaagtgccaggggacgtgcgcaggcacaggacacagcacaggagctgcagagtgaaagtgcgtgtgacaagcgtagcccacaacctcctggcaaggggaagcacatgtatgggggtgttctgcagccacagagtcttttccaaaagaacctgcttttattttatgatgaagtgcttgatttgcaaccaaatggcaaagagaaggaattcagtgttggtgcaaatcacaacgctttcatggtggttcactggggagtctgtggtttctgccttttcccttctggagagtggctggcttcccctttctgtgtgcatccccaaatcacaattcatcccccagataggttccaggccagtgttacagatgaagggtacttgttcctagcaaagcccacccagccagccccagcttgtcctctggatcccatccgccctctcctcctaggacatgcacagcagccactcctcacagaccagcacacagatgccgctgtcaccccatcgtcagcagtgacagcaagagcagcaaactattgtgctggaggaaggaacgaaaggaaaaagacaggaagagagaagcgtcacctcacaggaggtccctgtgtagccttgcggacattcacagtgctccacatcagcagccaccaccaggtcgatggcattagagctggctatgtccagagagacggactccaacctacaaatagacagattgttatgtga

SEQ ID NO: 123868 - DNA, 8707 bp, Homo sapiens
atgcgcgggggcgtgctcctggtcttgctgctgtgtgtcgccgcgcagtgccggcagagaggcctgtttcctgccattctcaatcttgccagcaatgctcacatcagcaccaatgccacctgtggcgagaaggggccggagatgttctgcaaacttgtggagcatgtgccaggtcggcccgtccgaaacccacagtgccggatctgtgatggcaacagcgcaaaccccagagaacgccatccaatatcacatgccatagatggcaccaataactggtggcaaagtcccagcattcagaatgggagagaatatcactgggtcacaatcactctggacttaagacaggtctttcaagttgcatatgtcatcattaaagctgccaatgcccctcgacctggaaactggattttggagcgttctctggatggcaccacgttcagcccctggcagtattatgcagtcagcgactcagagtgtttgtctcgttacaatataactccaagacgagggccacccacctacagggctgatgatgaagtgatctgcacctcctattattccagattggtgccacttgagcatggagagattcatacatcactcatcaatggcagaccaagcgctgacgatctttcacccaagttgttggaattcacttctgcacgatatattcgccttcgcttcgaacgcattagaacgctcaatgcagatctcatgacccttagccaccgggaacctaaagaactggatcctatgttaccaagacgctattattattcaataaaggacatttctgttggaggcatgtgtatctgctatggccatgctagtagctgcccatgggatgaaactacaaagaaactgcagtgtcaatgtgagcataatacttgcggggagagctgtaacaggtgctgtcctgggtaccatcagcagccctggaggccgggaaccgtgtcctccggcaatacatgtgaagcatgtaattgtcacaataaagccaaagactgttactatgatgaaagtgttgcaaagcagaagaaaagtttgaatactgctggacagttcagaggaggaggggtttgcataaattgcttgcagaacaccatgggaatcaactgtgaaacctgtattgatggatattatagaccacacaaagtgtctccttatgaggatgagccttgccgcccctgtaattgtgaccctgtggggtccctcagttctgtctgtattaaggatgacctccattctgacttagagaatgggaagcagccaggtcagtgcccatgtaaggaaggttatacaggagaaaaatgtgatcgctgcccaacttggctataaggattacccgacctgtgtctcctgtgggtgcaacccagtgggcagtgccagtgatgagccctgcacagggccctgtgtttgtaaggaaaacgttgaggggaaggcctgtgatcgctgcaagccaggattctataacttgaaggaaaaaaacccccggggctgctccgagtgcttctgctttggcgtttctgatgtctgcagcagcctctcttggcctcttggtcaggtaaacagtatgtccgggtggctggtcaccgacttgatcagtcccaggaagatcccgtctcagcaagatgcactaggcgggcgccatcaggtcagcatcaacaacaccgcggtcatgcagagactggctcccaagtactactgggcagcccccgaggcctaccttggaaataagctgactgcgtttggcggattcctgaaatacacggtgtcctacgatattccggtagagacggtagacagtaacctcatgtcgcatgctgacgtcatcattaagggaaacggactcactttaagcacacaggctgagggtctgtcattgcagccttatgaagagtacctaaacgtggttagacttgtgcctgaaaacttccaagattttcacagcaaaaggcagattgatcgtgaccagctgatgactgtccttgccaatgtgacacatcttttgatcagagccacctacaattctgcaaaaatggctctttacaggttggagtccgtctctctggacatagccagctctaatgccatcgacctggtggtggctgctgatgtggagcactgtgaatgtccgcaaggctacacagggacctcctgtgagtcgtgcctctctggctattaccgcgtggatggaatactctttggaggaatttgtcaaccctgtgaatgccacggccatgcagctgagtgtaatgttcacggcgtttgcattgcgtgtgcgcacaacaccaccggcgtccactgtgagcagtgcttgcccggcttctacggggagccttcccgagggacacctggggactgccagccctgcgcctgccctctcaccatagcctccaacaatttcagccccacctgccacctcaatgatggagatgaagtggtctgtgactggtgtgccccgggctactcaggagcttggtgtgagagatgcgcagatggttactatggaaacccaacagtgcctggcgaatcttgtgttccctgtgactgcagcggcaacgtggacccctcggaggctggtcactgtgactcagtcaccggggagtgcctgaagtgcctggggaacacagatggcgcccactgtgaaaggtgcgctgacgggttctatggggacgctgtgacagccaagaactgccgcgcctgtgaatgccatgtgaaaggctcccattctgccgtgtgccatcttgagaccgggctctgtgactgcaaaccaaacgtgactggacagcagtgtgaccagtgcttgcatggctattatgggctggactcaggccatggctgccggccctgcaactgcagcgtggcaggctccgtgtcagatggctgcacggatgaaggccagtgtcactgtgtcccaggtgtggcagggaaaaggtgtgacaggtgtgcccatggcttctacgcctaccaggatggtagctgtacaccctgtgactgcccacacactcagaatacctgcgacccagaaactggagagtgtgtctgcccccctcacacacagggtgtgaagtgtgaagaatgtgaggatgggcactggggctacgatgcggaggtggggtgccaggcctgcaattgcagtctcgtggggtcgactcatcatcggtgcgatgtggtcaccggccattgccagtgcaagtcaaaatttggtggccgggcctgcgtacagtgttccttgggttacagagactttcccgactgtgttccctgtgactgtgacctgagggggacgtcgggggacgcctgcaacctggagcagggtctctgcggctgtgtggaggaaaccggggcctgcccttgcaaggaaaatgtctttggtcctcagtgcaacgaatgtcgagagggcaccttcgctctccgcgcagacaaccccctgggctgcagcccgtgcttctgctccgggctgtcccacctctgctcagagctggaggactacgtgaggaccccagtaacgctgggctccgatcagcctcttctgcgtgtggtttctcagagtaacttgaggggcacgactgagggggtttactaccaggcccccgacttcctgctggatgccgccaccgtccggcagcacatccgtgcagagccgttttactggcggctgccgcagcagttccaaggagaccagctcatggcctatggtggcaaactgaagtacagcgtggccttctattctttggatggcgtcggcacctccaattttgagcctcaagttctcatcaaaggtggtcggatcagaaagcaagtcatttacatggatgcaccagccccagagaatggagtgagacaggaacaagaagtagcaatgagagagaatttttggaaatattttaactctgtttctgaaaaacctgtcacgcgagaggattttatgtctgtcctcagcgatattgagtacatcctcatcaaggcatcgtatggtcaaggattacagcagagcagaatctcagacatttcaatggaggttggcagaaaggctgaaaagctgcacccagaagaagaggttgcatctcttttagagaattgtgtctgtcctcctggcactgtgggattctcatgtcaggactgcgcccctgggtaccacagagggaagctcccagcagggagtgacaggggaccacgccctctggttgctccttgtgttccctgcagttgcaacaaccacagtgacacctgtgaccccaacaccgggaagtgtctgaactgtggcgataacacagcaggtgaccattgtgatgtgtgtacttctggctactacgggaaggtgactggctcagcaagtgactgtgctctgtgtgcctgtcctcacagccctcctgccagttttagtcccacttgtgtcttggaaggggaccacgatttccgttgtgacgcctgtctcctgggctatgaaggaaaacactgtgaaaggtgctcctcaagctattatgggaaccctcaaacaccaggtggcagttgccagaagtgtgactgcaacccgcacggctctgtccacggtgactgtgaccgcacatctgggcagtgcgtttgcaggctgggggcctcggggctccggtgcgatgagtgtgaaccgaggcacattctgatggaaacagattgtgtttcctgtgatgatgagtgtgtaggtgtgctgctgaatgacttggatgagattggtgatgccgttctttctctgaacctcactggcattatccctgtcccatatggaattttgtcaaacctggaaaatacaactaaatatctccaggaatctttattaaaagaaaatatgcaaaaggacctgggaaaaattaagcttgaaggtgttgcagaagaaacgggacaacctgcaaaaagaagctccactaggatgttagcgagtacccaaaaggtgaatagggcaactgagagaatcttcaaggagagtcaagacctggccatagccattgagaggctgcagatgagcatcacagaaattatggaaaagacaactttaaatcagactttggatgaagatttcctactacccaattctactcttcagaacatgcaacagaatggtacatctttgctagaaatcatgcagataagagacttcacacagttgcaccaaaatgccacccttgaactcaaggctgctgaagatttattgtcacaaattcaggaaaattaccagaagccgctggaagaattggaggtattgaaagaagcagcaagccacgtcctttcaaagcacaacaatgaactaaaggcggctgaggcgctcgtgagggaagctgaggcaaagatgcaggaaagcaaccacctgctgctcatggtcaatgctaatctgagagaattcagtgataaaaagctacatgttcaagaagaacaaaatctgacctcagagctcattgtccaaggaagaggattgatagatgctgctgctgcacaaacagatgctgtacaagatgctctagagcacttagaggatcaccaggataagctacttttatggtctgccaaaatcaggcaccacatagatgacctggtcatgcacatgtcccaaaggaacgcagtcgacctggtctacagagctgaggaccatgccgctgagttccagagactagcagatgttctgtacagtggccttgaaaacatcagaaatgtgtccctgaatgccaccagtgcagcctatgtccattacaacatccagagcctgattgaagaatcggaggaactggccagagatgctcacaggactgtgactgagacgagcctgctctcagaatcccttgtttctaacgggaaagcggccgtgcagcgcagctccagatttctaaaagaaggcaacaacctcagcaggaagcttccaggtattgcattggaactgagtgaattgagaaataagacaaacagatttcaagagaatgctgttgaaattaccaggcaaaccaatgaatcactcttgatacttagagcaattcctgaaggtataagagacaagggagccaaaaccaaagagctggccacgtctgcaagccagagcgcggtgagcacgctgagggacgtggcggggctgagccaggagctgctgaacacatctgccagcctgtccagggtcaacaccacattacgagagacacaccagcttctgcaggactccaccatggccactctgttggctggaagaaaagtcaaagacgtggaaactcaagccaaccttttgtttgatcggttgaagcctttgaagatgttagaggagaatctgagcagaaacctatcagaaattaaactgttgatcagccaggcccgcaaacaagcagcttctattaaagtcgccgtgtctgcagacagagattgcatccgggcctaccagcctcagatttcctctaccaactacaataccttaacactaaatgttaagacacaggaacccgataatcttctcttctacctcggtagcagcaccgcttctgatttccttgcagtggagatgcggcgagggagagtggccttcctgtgggacctgggctccgggtccacacgcttggagtttccagactttcccattgatgacaacagatggcacagtatccatgtagccagatttggaaacattggttcactgagtgtaaaggaaatgagctcaaatcaaaagtcaccaacaaaaacaagtaaatcccctgggacagctaatgttctggatgtaaacaattcaacactcatgtttgttggaggtcttggaggacaaatcaagaaatctcctgctgtgaaggttactcattttaaaggctgcttgggggaggccttcctgaatggaaaatccataggcctatggaactatattgaaagggaaggcaagtgccgtgggtgcttcggaagctcccagaatgaagacccttccttccattttgacgggagtgggtactctgtcgtggagaagtcacttccggctaccgtgacccagataatcatgctttttaataccttttcacctaatggacttcttctctacctgggttcatacggcacaaaagactttttatccatcgagctgtttcgtggcagagtgaaggttatgactgacctgggttcaggacccattacccttttgacagacagacgttataacaatggaacctggtacaaaattgccttccagcgaaaccggaagcaaggagtgctagcagttatcgatgcctataacaccagtaataaagaaaccaagcagggcgagactccgggagcatcttctgacctcaaccgcctagacaaggacccgatttatgtgggtggattaccaaggtcaagagttgtaaggagaggtgtcaccaccaaaagctttgtgggctgcatcaagaacctggaaatatccagatcaacctttgacttactcagaaattcctatggagtgagaaaaggctgtttactggagcccatccggagtgttagcttcctgaaaggcggctacattgaattgccacccaaatctttgtcaccagaatcagaatggctggtaacatttgccaccacgaacagcagtggcatcatcctggctgccctcggcggggatgtggagaagcggggtgatcgtgaggaagcacacgtgcccttcttttccgtcatgctgatcggaggcaacattgaggtacatgtcaatcctggggatgggacaggcctgagaaaagctctcctgcacgctcccacgggtacctgcagtgatggacaagcgcattccatctccttggtcaggaatcggagaattatcactgtccaattggatgagaacaatcctgtggaaatgaagttgggcacattagtagaaagcaggacgataaatgtgtccaatctgtacgtcgggggaattccagagggagaggggacgtcactgctcacaatgagaagatcgttccatggctgtatcaaaaacctgatcttcaatttggaacttttggatttcaacagtgcagttggccatgagcaagtcgacctggacacctgctggctgtcagaaaggcctaagctggctcccgatgcagaggacagcaagctcttgccagagccccgggcttttccagtaggagcggcttcctttactatcagtcaggtccagtcagcaaaggagggcctaggacagagggagttaaaatggggccttgctgtaaaggtgcctgcgaaagctggagctggagctggagctggagctgtgctaaaaatcagagcggggacagggagggaaaggatgtatgggggtgttctgcagccacagagtcttttccaaaagaacctgcttttattttatgatgaagtgcttgatttgcaaccaaatggcaaagagaaggaattcagtgttggtgcaaatcacaacgctttcatggtggttcactggggagtctgtggtttctgccttttcccttctggagagtggctggcttcccctttctgtgtgcatccccaaatcacaattcatcccccagataggttccaggccagtgttacagatgaagggtacttgttcctagcaaagcccacccagccagccccagcttgtcctctggatcccatccgccctctcctcctaggacatgcacagcagccactcctcacagaccagcacacagatgccgctgtcaccccatcgtcagcagtgacagcaagagcagcaaactattgtgctggaggttga

SEQ ID NO: 123869 - DNA, 824 bp, Homo sapiens
atgggtgacctggaggataagctggtgcccttcattggagagttgcccaggcatctggaccagaattcagagcagctgaagcaagtggtccagcgggagctgaaggagctccatgagacatgccagcaacatcagctatgtcaagcaagtacatcaggggaaccaaaagaaagagacaaggaagagggtaaagattctaagccgcgttctttgcggttcacatggagtatgaagaccactagttcaatggaccctaatgacatgatgagagaaatccgaaaagtgttagatgcaaataactgtgattatgagcaaaaagagagatttttgcttttctgtgtccatggagacgctagacaggatagcccccgtgccagtggggagatgggaagtcctgccaagttggcccacgactgtcaccttaatggggtttcgcttcaagcgaatatcctgggacatcctattgccctttaaagaacattgccatcaaaaatagccaaatgagcttaagcctgtaaagaagtcccaaatttaccaggttcagggaagatacatacatatatgaggtacagtttttgaatgtactggtaatgccctaatgtggtcctgccctgtgaatctccccatgtagaatttgcccttaatgcaataaggttatacatagttatgaactgtaaaattaaagtcagtatgaactataataaatatctgtagcttaaaaagtaggttcacatgtacaggtaagtatattgtgtatttctgttcattttctgttcatagagttgtataataaaacatgattgcttaaaaacttgaaaaaaaaa

SEQ ID NO: 123870 - DNA, 452 bp, Homo sapiens
ggccaatgcccacggcttcatcatggaactccaggacggctacagcacagagacaggggagaagggcgcccagctgtcaggtggccagaagcagcgggtggccatggcccgggctctggtgcggaaccccccagtcctcatcctggatgaagccaccagcgctttggatgccgagagcgagtatctgatccagcaggccatccatggcaacctgtcagaagcacacggtactcatcatcgcgcaccggctgagcaccgtggagcacgcgcacctcattgtggtgctggacaagggccgcgtagtgcagcagggcacccaccagcagcttgcttgccccagggcgggcttttacggcaagctggtgcagcggcagatgctggggcttcagcccgccgcagacttcacagctggccacaacgagcctgtagccaacggcagtcacaaggcctga

SEQ ID NO: 123871 - DNA, 501 bp, Homo sapiens
  misc_feature (1)...(501): n = a,t,c or g
atggtgaagtattactgggccagggcgtgctccgcagttcctgggacaagttgttnccgcctttggcagcggtaccgaaatcctgtgcaacggtatctgacggaagacatagtacaccgggagaatcagaccatgaccaccttcacctggaacatcaaccacgcccggccgatggtggtggaggaacgatgtgtttactgtgtgaactctgacaacagtggctggaccgaaatccgccgggaagcgtgggtctcctctagcttatgcggtgtctccagagctgtctgggaatttggtcttgcccagttcaaaagcaacgtgaccaagactttgaagggttttgaatatatcttggcgaagctgcaaggcgaggctgcttccaaaacacttattaagacagccagggaagccaaggagaaggcaaaggagacggccctggcagctacagagaaggccaaggacctcgccagcaaggcggccaccaagaagcagcagcagtag

SEQ ID NO: 123872 - DNA, 475 bp, Homo sapiens
atacactggctagggtcagtgggcaactcagtatccttcccattctcatctcatgccaggaatttggtcttgcccgattcaaaagcaacgtgaccaagactatgaagggttttgaatatatcttggctaagctgcaaggtgagtttctgggtatgtggatattcctcatagggagaggctcattcagcctagcgggcgtggagtctgggttagtcattgccctgctctgagctgggactccttgtctgtactgggggtgggaggagggtgaataccacctttttagtggagcctggcccagaggagattggtgtcatgggggagggaaattaggttggtctttcaggcatcttctaaaggcagccacctgccgttcgcgacaggcgaggccccttccaaaccacttattgagacagccaaggaagccaaggagaaggcaaaggagacggcactggcagctacagagaagacgaaa

SEQ ID NO: 123873 - DNA, 1149 bp, Homo sapiens
ttttttttttttttttggggccaactgaattcaacaagtatttattgagtgtctattatgtgctagatactgagacacatcagagaacaaaaccaaaagccctgcccttgtcgggcttacagtctagcacttaccgccagttaacctgcaggctacctggagccccgggcaagtcaccgcacctctgtgccctcggtcctcagctgcccaatgggagaataagcagacctggctcaaaacatgaatcatgtgccttggtgtaactgcaagatgcccaaactgcatcccccacaacccaccacgtaagacagcagacagggctggaagttgatttttaatgaataaagtacaatgaagggagggcagaggggctaagcctagctgtcccggggtgctgtggtggtggtaaaatggcctaacacaaactgttgctgctgctgctgcttcttggtgcgtcgccttgctggcgagggtccttggccttctctgtaagctgccagtgccgtctcctttgccttctccttggcttccttggctgtctcaacaagtgttttggaaggggccgtcgccttgcagcttagccaagatatattcaaaacccttcatagtcttggtcacgttgcttttgaatcgggcaagaccaaattcctgggacagctctggagacaccaaattaagctagaggagacccaggcttccccggcgggatttcagtccagcccactgttggtcagagttcacaacagtaaaacacatcgtttcctccaccaccatcagccggggcgtgggttgatgttccagttgaaagtagtcaaggtctgattctgtgggtccacaatagagtcctccaggacgtacaccgagtgagcaacattggcaggaaatagtcgctcgggcccagcgtgggcattcctgttggtcttggtcagagtcgcccgggacagcagtttctggtcaggggtcacctcccggtgtactatgtcttccgtcaagacatgtttgctatagggattcgggtacccgctgccagaaggcggcgaacacttggtcccaggaactccggagcacgctctggcccaggaaatacttcaccatcgtcccggccgaagcgggctcaggaattacgcctctctacctagggtgtcaaag

SEQ ID NO: 123874 - DNA, 449 bp, Homo sapiens
  misc_feature (1)...(449): n = a,t,c or g
tcgcgggtcgacccacgcgtccgcgctactcaatatgaacacaaagtaattgtttatgtggagaccgntacttctcgtcggagtgtttttcagaaattcattgcagatggctgcaaagaggctctgcttgaagagaagaggcgcttctgctttctggttgataagcactgtggctttgcaaaccacatacattattatcacttacagtctgcagaactactgaattccaagctgcctcggtggcaggagacctgtgttgatgccatcaaagcgccagagaaaatcatgaatatgatcgaagaaataaagaccccagcctctacccccgtgtctggaactcctcaggcttcacccatgatcgagagaagcaatgtggtacttccgaagatcccagtttacagcgatcagttttggttgcaacgggacttgaacatgatgaaaaagccgag

SEQ ID NO: 123875 - DNA, 439 bp, Homo sapiens
gtgttttgtattgatatatgtactgtgtgtgtctgtgtgtgtgagatcaagatcaggttttgattggtgatgtactattactgttgtccttggtcagggacacagaggatgtttggggtttggtggtgagacattatctaacacgtgctgtgtcctttttgggtttgagccccacaccagtgagaagcatcagcaccgtgaacttgtctgagaatagcagtgttgtcatccccccacccgactacttggaatgcttatccatgggggcagctgccgacaggagagcagattcggccaggacgacatccacctttaaggccccagcgtccaagcccgagaccgcggctcctaacgatgccaacgggactgcaaagccgccttttctcagcggagaaaacccctttgccactgtgaaactccgcccgactgtgacgaatga

SEQ ID NO: 123876 - DNA, 1729 bp, Homo sapiens
cttctccgcctcccctgtcccttctcctccccgtcccttctcctcttccctgaccctcagagctctggagaccaccccccatccccagaccagctacacattttacaactagtgcacttaagttggggaggggtctgttgtgcgtcggtggggcccacgtcctcctcacaacttcttggaatcagtgacccgtgctgtcctggctgccgggcttaagcctccgggaccaaagacacaagctcgagtttcctctaagaaaagaaagcgcccaagaatgtgggggtgaaactcccctgtaattaggatcgccagaatgttatggaacagttcaatcctgggctgcgaaatttaataaacctggggaaaaattatgagaaagctgtaaacgctatgatcctggcaggaaaagcctactacgatggagtggccaagatcggtgagattgccactgggtcccccgtgtcaacttgaactgggacatgtcctcatagagatttcaagtacccacaagaaacttcaacgagagtctttgatggaaaatttttaaaaaattccacaaagagattatccatgagctggagaagaagatagaacttggacgtgaaatatatgaacgcaactctaaaaagataccaaacagaacacaagaataaattagagtctttggagaaatcccaagctgagttgaagaagatcagaaggaaaagccaaggaagccgaaacgcactcaaatatgaacacaaagaaattgagtatgtggagaccgttacttctcgtcagagtgaaatcctagaaatccattgcagatggttgcaaagaggctctgcttgaaagagaaagaggcgcttcctgctttcctgggttgaataagcactgtggctttgcaaaacccacatacattattatcacttacagtctgcagaactactgaattcccaagctgcctcggtggcaggagacctgtgttgatgccatcaaagtgcccagagaaaatcatgaatatgatcgaagaaataaagaccccagcctctacccccgtgtctggaactcctcaggcttcacccatgatcgagagaagcaatgtggtaaggaaagattacgacaccctttctaaatgctcaccaaagatgccccccgctccttcaggcagagcatataccagtcccttgatcgatatgtttaataacccagccacggctgccccgaattcacaaagggtaaataattcaacaggtacttccgaagatcccagtttacagcgatcagtttcggttgcaacgggactgaacatgatgaagaagcagaaagtgaagaccatcttcccgcacactgcgggctccaacaagaccttactcagctttgcacagggagatgtcatcacgctgctcatccccgaggagaaggatggctggctctatggagaacacgacgtgtccaaggcgaggggttggttcccgtcgtcgtacacgaagttgctggaagaaaatgagacagaagcagtgaccgtgcccacgccaagccccacaccagtgagaagcttcagtggagaggcctaactctaatgtcgcctgcttaagcaaatcatgcttctctgtttcacgtagttgggttgacaagtttctgcctttaagataaatgagtaatagtctaatgaccagctcagccatttaaaatattttcttcctattctgttcaagaaacagtaaacttggtttcaatctttaaaaaa

SEQ ID NO: 123877 - DNA, 1993 bp, Homo sapiens
  misc_feature (1)...(1993): n = a,t,c or g
atgttacgcctgcattttggaaagatccctggcatctgtgaggaaggacatgtcctcatagagatttcaagtacccacaagaaactcaacgagagtcttgatgaaaattttaaaaaattccacaaagagattatccatgagctggagaagaagatagaacttgacgtgaaatatatgaactatgtggagaccgttacttctcgtcagagtgaaatccagaaattcattgcagatggttgcaaagaggctctgcttgaagagaagaggcgcttctgctttctggttgataagcactgtggctttgcaaaccacatacattattatcacttacagtctgcagaactactgaattccaagctgcctcggtggcaggagacctgtgttgatgccatcaaagtgccagagaaaatcatgaatatgatcgaagaaataaagaccccagcctctacccccgtgtctggaactcctcaggcttcacccatgatcgagagaagcaatgtgtccctgttccttctgggcaatgatcaaagcgaggaaataggacagggtacttccgaagatcccagtttacagcgatcagtttcggttgcaacgggactgaacatgatgaagaagcagaaagtgaagaccatcttcccgcacactgcgggctccaacaagaccttactcagctttgcacagggagatgtcatcacgctgctcatccccgaggagaaggatggctggctctatggagaacacgacgtgtccaaggcgaggggttggttcccgtcgtcgtacacgaagttgctggaagaaaatgagacagaagcagtgaccgtgcccacgccaagccccacaccagtgagaagcatcagcaccgtgaacttgtctgagaatagcagtgttgtcatccccccacccgactacttggaatgcttgtccatgggggcagctgccgacaggagagcagattcggccaggacgacatccacctttaaggccccagcgtccaagcccgagaccgcggctcctaacgatgccaacgggactgcaaagccgccttttctcagcggagaaaacccctttgccactgtgaaactccgcccgactgtgacgaatgatcgctcggcacccatcattcgatgagaggacagccaaggactctcccagggcctctccggttctcccttgcggaatgatgggccgcatccctgtctgccacgtgctgacggtcggggaagcttcagtggaaaggcctaactctaatgtcgcctgcttaagcaaatcatgcttctctgtttcacgtagttgggttgacaaagtttctgcctttaagataaatgagtaatagtcgaatgaccagctcagccatttaaaatattttcttcctattctgttcaagaaacagtaaacttggtttcaatctttactgtattttttaaatgaattttttccttaatgacagccagaataagggatagtctatgctttcaggactggctttctgcacctgatatgaatgagaccagttttattttataaagcatgtgctcttaatagcattatgtctaaagaagatatcacgtaagtttggcatcttattcatgcaaatcataattttaaggcaatataaattatgaaaatactatataaatggtaatttaacttaaaatggtttaaggtgtaggaggcttccaggagatgggaggaaacccccaccctcccctcccaacccacggccaggagcctggtaggagtgccttaaggacgcctttgcctggcccctttattnacagccacacgtagcactcgacgaaatctcctccgagagctccttttcttggtagttaggagtcgccaacggattcagctgcacacgggccatccaggacacaggctggggcgttcggagtcacggctccttgtggtctcactcagctagctggccaaagctgcatgcattaccagtacactcaaactggtgggtgccctgggttgcctcctagtcctc

SEQ ID NO: 123878 - DNA, 449 bp, Homo sapiens
ccgaatttccgggcagcccacgcgtccggcccagagaaggccagccattgcccaaggtccccaccttactgctggcagagccagggtgcaaagccccgagacctcctgggtcctgatcttatccctctcaaccacagcccccgtgtcagtcatctcctctgccacaggcacatccgcaaggccgggagggtctttgttgcagatgagatccaggttggctttggccgggtaggcaagcacttctgggccttccagctccagggaaaagacttcgtccctgacatcgtcaccatgggcaagtccattggcaacggccaccctgttgcctgcgtggccgcaacccagcctgtggcgagggcatttgaagccaccggcgttgagtacttcaacacggggtgttgggctcttcattggtgtggatctgatcaaagatgaggccacaaggacac

SEQ ID NO: 123879 - DNA, 438 bp, Homo sapiens
aaaatgtactatttttaatgggtgtgcatgtcaggattttctttagaaatacactggtctggtctaatttatttaagcaggagcactttaaagtatcccaccctaccccattccacccccagtggacagaaaggaaattgactgacttgaggggatgcagacatctgggttattccaacagaccagtggttaggaggagggggtgggtagcattatggcctcgggcaggcccccccaccctgagcctctgaaagctgactttatctgtaagagggaggtcaggctcgccttctcaatagcgtgtatttggatgagatgagtttcttctggagtacacttaggcagagcagggctggcttagggctggagcctcagcgtttcacaacttctcaccttctcttccatgtcttgataccaagtaggcagcctcttcagttg

SEQ ID NO: 123880 - DNA, 851 bp, Homo sapiens
atggacgctgacatcagctttactcaaaactgccaaaacctggaagcagccaacatgtccttcagtcgccaggaactgggtgtcatcctcatgccttgctcccccaacccctcgcaacagccaccaaatcctggccagccagtctccaaaatgtcccttgagcccctgcgctgccccaagttaagtgccaaggcccacaccagaagggcgagccagggagcatggggcctcggggagagaacggtgtggacggtgccccaggaccgaagactcttttttcccgaggatcctgttaagattgtccgggcccaagggcagtacatgtacgatgaacaggggccagaatacatcgattgcatcagcaatgtggcgcacggcctgacccctgagttctcgggggcaaatggaaagcctgattttgatgtgacgctcttcagatttttcaatgttggcaacaaacagaaaagccccaaaccctccaaaacacaaagacatgagcggggcccagtgtcctgcgctgtggggctggccgtcctgaatgtcttggagaaggagcagctccaggatcatgccaccagtgtaggcagcttcctgatgcagctcctcgggcagcaaaaaatcaaacatcccatcgtcggggatgtcaggcaccagtgcctgaaaccactggggctggtgggctgccaaaggccactgagagagcacagaaagaggtacaggaaggcacatgagcagaaccaggtgctcaacaccaacagccggtacctgcatgacaacatcgtggactatgcgcagaggctgtcagagaccctgccggagcagctctgtgtgttctatttcctgaattctgg

SEQ ID NO: 123881 - DNA, 925 bp, Homo sapiens
ctctatcctggctgggagtttggaaagagtggattaggatagtcttaaattttctataaaatgacagtctttgaggcagttaggggaagcagtggttattactccagtggacagtgatagaggcctttttctctatgtgccataatgggaaatgggtgggaagagcctctaaggcagagtttaagtgaaactactggtagtgagtcttaggagtaagtatatttagttggttatattcagtatttttaatttagtaggatagaatatatcagattgcattattttaatttgccaattaaaagtatgactgggacactgtaaaatgtactatttttaatcgggtggtgccatgtcaaggatttttcttttagaaatacactggtctggtctaatttatttaagcaggaagcacttttaaaagtatcccaccctaccccattccacccccagtggacagaaaggaaattgactgacttgaggggatgcatacatctgggttaatcccaaacagaccagtggttaaggaggcagggggtgggtagcattatggcctcgggcaggcccccccaccctgagcctctgaaagctgactttatctgtaagagggaggtcaggctcgccttctcaataagcgtgtatttcggatgagatgagtttcttctgtaaagagaaaaagatgttaaaacctcattgtctaaggcccctcatctggagaagtcttgtctgaccctctagcccagcaggaccaaggtgtggtgcctggtcccagcctgtcctctggctcccctggggctgcaagttggcccagtttgcctgcctccaattagatacggagttggctctgggggctgagatgcccatctcaagtggcatccggtccggaagggttccctgctggaaggcctttgggttttaagttgggaat

SEQ ID NO: 123882 - DNA, 1194 bp, Homo sapiens
  misc_feature (1)...(1194): n = a,t,c or g
aggcgttgatgctgaccactagnccagngcggnggaattcccagccattgcccaaggtnnnnnnttactgctggcagagccagggtgcaaagccccgagacctcctgggtcctgatcttatccctctcaaccacagcccccgtgtcagtcatctcctctgccacaggcacatccgcaaggccggaggggtctttgttgcagatgagatccaggttggctttggccgggtaggcaagcacttctgggccttccagctccagggaaaagacttcgtccctgacatcgtcaccatgggcaagtccattggcaacggccaccctgttgcctgcgtggccgcaacccagcctgtggcgagggcatttgaagccaccggcgttgagtacttcaacacgtttgggggcatgcccagtgtcctgcgctgtggggctggccgtcctgaatgtcttggagaaggagcagctccaggatcatgccaccagtgtaggcagcttcctgatgcagctcctcgggcagcaaaaaatcaaacatcccatcgtcggggatgtcaggggtgttgggctcttcattggtgtggatctgatcaaagatgaggccacaaggacaccagcaactgaagaggcatgtctacttggtatcaaggctgaaggagaactacgttttgctgagcactgatggccctgggaggaacatcctgaagtttaagcccccaatgtgcttcagcctggacaatgcacggcaggtggtggcaaagctggatgccattctgactgacatggaagagaaggtgagaagttgtgaaaaccgctgaagctccagccctaagccagccctgctctgcctaagtgtactcccagaagaaactcatctcatccaaatacacgctattgagaaggcgagcctgacctccctcttacagataaagtcagctttcagaggctcagggtgggggggcctgcccgaggccataatgctacccaccccctccctcctaaccactggtctgttggaataacccagatgtctgcatcccctcaagtcagtcaatttcctttctgtccactgggggaggaatggggtagggagggatactttaaagtgctcctgcttaaataaattacaccaaaccagcggtatttctaaagaaaatcctgacatgcacacccgattaaaaatagtacattttacagtgaaaaa

SEQ ID NO: 123883 - DNA, 622 bp, Homo sapiens
ggaggcaggaggtgtgccggatcttgaaacaggtcttccttatcttcccccacttctgcttgggccgggggctcattgacatggtgcggaaccaggccatggctgatgcctttgagcgcttgggagacaggcagttccagtcacccctgcgctgggaggtggtcggcaagaacctcttggccatggtgatacaggggcccctcttccttctcttcacactactgctgcagcaccgaagccaactcctgccacagcccagggtgaggtctctgccactcctgggagaggaggacgaggatgtagcccgtgaacgggagcgggtggtccaaggagccacccagggggatgtgttggtgctgaggaacttgaccaaggtataccgtgggcagaggatgccagctgttgaccgcttgtgcctggggattccccctggtgaggtgagtccaggggtggaggccaggtgcagggacagtgagtggctgccctactgcatgccctgcccatcatcctttactgaacacctactgtgtatccaccaccttttattgggcacctactgtatgccaatatttgtgctcctatttttattttattaaattattatttatttaaaaaaaaaaaa

SEQ ID NO: 123884 - DNA, 3437 bp, Homo sapiens
atggggtttcaccatgttggtcaggctggtctcaaactcctgacctcaggcactcctcagctgctggccctggtacagcactgggtgcccggggcacggctggtggaggagctgccacacgagctggtgctggtgctgccctacacgggtgcccatgacggcagcttcgccacactcttccgagagctagacacgcggctggcggagctgaggctcactggctacgggatctccgacaccagcctcgaggagatcttcctgaaggtggtggaggagtgtgctgcggacacagatatggaggatggcagctgcgggcagcacctatgcacaggcattgctggcctagacgtaaccctacggctcaagatgccgccacaggagacagcgctggagaacggggaaccagctgggtcagccccagagactgaccagggctctgggccagacgccgtgggccgggtacagggctgggcactgacccgccagcagctccaggccctgcttctcaagcgctttctgcttgcccgccgcagccgccgcggcctgttcgcccagatcgtgctgcctgccctctttgtgggcctggccctcgtgttcagcctcatcgtgcctcctttcgggcactacccggctctgcggctcagtcccaccatgtacggtgctcaggtgtccttcttcagtgaggacgccccaggggaccctggacgtgcccggctgctcgaggcgctgctgcaggaggcaggactggaggagcccccagtgcagcatagctcccacagcgcccttgagtgtgcacagcccattgtctgcaggttctcggcaccagaagttcctgctgaagtggccaaggtcttggccagtggcaactggaccccagagtctccatccccagcctgccagtgtagccggcccggtgcccggcgcctgctgcccgactgcccggctgcagctggtggtccccctccgccccaggcagtgaccggctctggggaagtggttcagaacctgacaggccggaacctgtctgacttcctggtcaagacctacccgcgcctggtgcgccagggcctgaagactaagaagtgggtgaatgaggtcagatacggaggcttctcgctggggggccgagacccaggcctgccctcgggccaagagttgggccgctcagtggaggagttgtgggcgctgctgagtcccctgcctggcggggccctcgaccgtgtcctgaaaaacctcacagcctgggctcacagcctggatgctcaggacagtctcaagatctggttcaacaacaaaggctggcactccatggtggcctttgtcaaccgagccagcaacgcaatcctccgtgctcacctgcccccaggcccggcccgccacgcccacagcatcaccacactcaaccaccccttgaacctcaccaaggagcagctgtctgagggtgcactgatggcctcctcggtggacgtcctcgtctccatctgtgtggtctttgccatgtcctttgtcccggccagcttcactcttgtcctcattgaggagcgagtcacccgagccaagcacctgcagctcatggggggcctgtcccccaccctctactggcttggcaactttctctgggacatgtgtaactacttggtgccagcatgcatcgtggtgctcatctttctggccttccagcagagggcatatgtggcccctgccaacctgcctgctctcctgctgttgctactactgtatggctggtcgatcacaccgctcatgtacccagcctccttcttcttctccgtgcccagcacagcctatgtggtgctcacctgcataaacctctttattggcatcaatggaagcatggccacctttgtgcttgagctcttctctgatcagaagctgcaggaggtgagccggatcttgaaacaggtcttccttatcttcccccacttctgcttgggccgggggctcattgacatggtgcggaaccaggccatggctgatgcctttgagcgcttgggtgagaacttcctgtcaggagacaggcagttccagtcacccctgcgctgggaggtggtcggcaagaacctcttggccatggtgatacaggggcccctcttccttctcttcacactactgctgcagcaccgaagccaactcctgccacagcccagggtgaggtctctgccactcctgggagaggaggacgaggatgtagcccgtgaacgggagcgggtggtccaaggagccacccagggggatgtgttggtgctgaggaacttgaccaaggtataccgtgggcagaggatgccagctgttgaccgcttgtgcctggggattccccctggtgagtgttttgggctgctgggtgtgaatggagcagggaagacgtccacgtttcgcatggtgacgggggacacattggccagcaggggcgaggctgtgctggcaggccacagcgtggcccgggaacccagtgctgcgcacctcagcatgggatactgccctcaatccgatgccatctttgagctgctgacgggccgcgagcacctggagctgcttgcgcgcctgcgcggtgtcccggaggcccaggttgcccagaccgctggctcgggcctggcgcgtctgggactctcatggtacgcagaccggcctgcaggcacctacagcggagggaacaaacgcaagctggcgacggccctggcgctggttggggacccagccgtggtgtttctggacgagccgaccacaggcatggaccccagcgcgcggcgcttcctttggaacagccttttggccgtggtgcgggagggccgttcagtgatgctcacctcccatagcatggaggagtgtgaagcgctctgctcgcgcctggccatcatggtgaatgggcggttccgctgcctgggcagcccgcaacatctcaagggcaggtcccagccggcagcggccttcgtggcggccgagttccctggggcggagctgcgcgaggcacatggaggccgcctgcggcttccaagctgccgccgggagggcgctgcgcccctggcgcgcgtctttggagagctggccggtgcacggcgcagagcacggcgtggaggactttttccgtgagccagacgatgcttggaggaggtattcttgtacttctccaaggaccaggggaaggacgaggacaccgaagagcagaaggaggcaggagtgggagtggaccccgcgccaggcctgcagcaccccaaacgcgtcagccagttcctcgatgaccctagcactgtcgagactgtgctctgagcctccctcccctgcggggccgcggggaggccctgggaatggcaagggcaaggtagagtgcctaggagccctggactcaggctggcagaggggctggtgccctggagaaaataaagagaaggctggagagaagccgtggtggtgaaaaaaaaaaa

SEQ ID NO: 123885 - DNA, 728 bp, Homo sapiens
cggacgcgtgggccgccgccgcagagccggagcgggggccgccggcgccgcatccctctctacctgccaacatcctgtattaaagaacttgtggccggaggtgtggctgtggagagctggccggggagggacgctgctcagctgctgctctgctcctgtctcctgtcccctcccccggtcatgacagagacccgtgagccagctgagactgggggctacgccagcttggaagaagatgatgaagacctttccccaggccccgagcattcctctgattcagaatacactctctcagagccggactccgaagaggaagaagatgaggaggaggaggaagaggagaccactgacgatcctgaatatgatcctggctacaaggtgaagtagcgccttggcggaggccgtggtggcccatcccgccgggccccccgttgcagcccagcccccggcccagccttgccagctctgtggccgctcaccccttggggaggccccaccgggaaccccacgctgcacgggcacttcatgctgcatgcccggggtgaggtgtaggcagagcccccatacggggagcttggcagaaggggtggggtgggaggagggggctgaggaaattggggttgtgacagtggtcatgggggatggggtactgccggtctgtgttgtcttagaagtagatgtgtgatggccagaataaaagccaaaatctgtaaaaaaaaaaaaaaaaa

SEQ ID NO: 123886 - DNA, 711 bp, Homo sapiens
atggagagtgacatcggcagaaagggtggcaaagaccctgaggcaggccccgagcattcctctgattcagaatacactctctcagagccggactccgaagaggaagaagatgaggaggaggaggaagaggagaccactgacgatcctgaatatgatcctggctacaaggtgaagcagcgccttggcgggggccgtggtggcccatcccgccgggccccccgtgcagcccagcccccggcccagccttgccagctctgtggccgctcaccccttggggaggccccaccgggaaccccaccctgccggctctgctgccctgctacagccccccaggaagcaccagcccctgaaggcagggccctcggggaggaagaggaggaaccacctcgggctggggagggccgaccagctgggcgggagaaggaggaggaagaggaggaggagggaacctaccactgtacggaatgtgaggattccttcgacaacctgggggagctgcacgggcacttcatgctgcatgcccggggtgaggtgtaggcagagcccccatacggggagcttggcagaaggggtggggtgggaggagggggctgaggaaattggggttgtgacagtggtcatgggggatggggtactgccggtctgtgttgtcttagaagtaaatgtgtgatggccagaataaaagccaaaatctgtaaaaaaaaaaaaaaa

SEQ ID NO: 123887 - DNA, 2064 bp, Homo sapiens
cacaagaacttcgtgaagcatacacaagtatcaatagccatatctatcaagcagaagaaaggatatcagagattgaagatcaactcaatgaaataaagcaagaaaacaagattagagaaaaaagaatgaaaagaaacgaacaaagcctgcaagaagtaggggactatgtgaaaagaccaaatctacgtctgattggtgtatctgaaagtgacggggaaaatggaaccgagttggaaaatactcttcaggatattaaccaggagaacttccccaatctagcaaggcaggccaacattcaaattcaggaaatacagagagcaccacaaagatactcctcgaaaagagcaaccccaagacacataatcgtcagattcaccaaggcctcccttacaagaactcctgaaggaagcactaaacgtggaaaggaacaaccggtaccagccacagcaaaaacataccaaattgtaaagaccattgatgctacaaagaaactgcaacaacgggcaaaataacccaggtcacaggatgtccccccaaagccatcccagtcagatgtctgcagacacctgctcccctggcaacagtgacccagacctgattcagtcttcatcaatcattctactagatacgcttctcctcactgaaaatgaaggtggtcataatgtcacaatctccttgcagtccaggactgggcatactcatatgccttctgtggttggcgtccttgtatttacccagttttggttctggtttcctctttcacacttcctgtcattggcttatacccctacctgtgtcattggccttaacaaggacttaaagatgccgaaagttcagtataaatcgaactgtaaaccatccacatttgcatatcctgcccctctggaagtaccaaaagaaaaagaaaaggaaaagcattgtaagacatatagtccagagaggatatctacaaccagcgctgaaggaaattgttctattttccattgctttcctgtaaagcaaaaaggctatagcacccaaatctcaatcttggaagtacatgagagcaaattcatatccaaggtttctactgctgtattatctataattgccaaggctaaaaagaaggaaaaagaaaaggaaaaaaaggaggaggagaaaatggaagtggcatctcccgtgcactccggacccttccgggacagactcgatccgctacgcacggcccgctctccgctagctgcgaggcctggctctaggcacctccctgctctgagcctcagtttacctcggtgctcaataagggaatggccaaaggggtccaacttgggggacgtgcccgagccaccgcccgcccgcgcccagccggccccgcgcagtctcacctggatgcccgtctccggcggcttgcagggccctgcaggcggccgctggacggcaggcaggaggcgtggagtggtcagtaggcggccgctgcacgggcccccccgcctggcgccgaacacgggcgcaacagcgcctccagcagccgcagccccggcgccaccgcgtcctctggcccggcctcggcaccagcaccccgaccagcgccgccccggccgccgccggccgcgcacgtcccgcagcatctcccgcagcggcgcgcggctcccgggcggccagcgacgacgcgcggcacagcacgaagaccagcggcgagcggatggcgcggccgccgccgccgcgcccccgccgccccagccgccctcgccgccctctgcgccccgcgccgccccgggccccgcgccctctgccgccgcgccgcccggcttggccgcgcctggctccggcgggaacaccgcccgacagggctgcaccaactgcacccaagctggcacctcaactgtcaggcccattgaggttaaagtggagcaaagagcagttattactggaggcaaccttattcctcccccaagtctcagagcagctcctcggtccccggctgatgaaaaaataggaagtgtgcaagtgttggggcaatgggcagtgggtgacttcatgatcatcgttcatgaggtgcctgatatagaacaaggtgaccattaa

SEQ ID NO: 123888 - DNA, 849 bp, Homo sapiens
taatgctttacagcaggggtccccaacccatgggccatggaccagtcctagtctgtggcctgttaggaactggctgcacagcaggagcacaagaacttcgtgaagcatacacaagtatcagtagccaaatcgatcaagcggaagaaaggatatcagaaattgaagataaactcaatgaaataaagcgtgaagacaagattacagaaaaaagaatgaaaaggaacgaacaaagcctccaagaaatatgggactatgtgaaaagaccaaatctacgtctgattggtgtacctaaaagtgatgtggagaatggaaccaagttggaaaacactcttcaggatattatccaggagaacttccccaatctagcaaggcaggccaacgttcagattcaggaaatacagagaacgccacaaagatactcctcgagaagagcaactccaagacacataattgtcagattcaccaaagttgaaatgagggaaaaaagtgttaagggcagccagagagaaaggtcgggttacccacaaagggaagccggtcagactaacagctgatctctcagcagaaaccgtacaagccagaagagagtgggggccaatattcaacattcttaaaggaaagaattttcaacccagaatttcatatccagccaaactaagcttcataagtgaaggagaaataaaatactttacagacaagcaaatgctgaaagattttgtcaccaccagcctgccctaaaagagctcctgaaggaagcactaaacatggaaaggaacaactggtaccagccactgcaaaagcatgccaaattgtaaagaccatcgaggctaggaagaaagtgcatcaact

SEQ ID NO: 123889 - DNA, 563 bp, Homo sapiens
atggtgaatggaagaatcccgcaggcccccagccagttctcgcacctcgcgagactccacccagccccttccccgaacagcgacccgtccccgttcctagctgagctcctgcttatgccctctgtgattggcctaactcctagttacccttcaagattcagctcagaaagcaccttcctccaggaagccttccctgatctctgccaggcagaggaccctgtgtacgccaacggcggcctcaactacagttaccgcgggtacggggccttgagcagcaacctgcagccccctgcctccctccaaacaggaaaccacagtaatgggcccacggacctcaagcatgaaaggcggggcctttaccacctccaccacccccacgcccaccccttccagcaccagcaccagcaggcccgtgcccaccgctcagctcagccccacggagatcagcgccgtgcggcagctcatcgcgggctaccgggagtctgctgccttcctgctgcgctctgcagatgaactggaaaacctcatcctacagcagaacagaccccgccggcacctgtaat

SEQ ID NO: 123890 - DNA, 477 bp, Homo sapiens
  misc_feature (1)...(477): n = a,t,c or g
gaaaggggtccagtttcagttttcttcatatggctagccagttttcccaacaccatttattaaatagggagtcctttccccattgtttgtttttctcaggtttctcaaagatcagatggttgtagatgtgtagcattatttctgagggctctgttctgttccattggtctatatctctgttttggtactggtaccatgctgttttttttttactgtagccttgtagtatagtttgaagtcaggtagtgtgatgcctccagctttgttcttttggcttaggattgtcttggctataaaggctcttttttgcttccatatgaaatttatagcaggtttttctaattctgtgaagaaagtcaatgttagcttgatggggatagcattgaatctataaattactttgggcagtatgggccattttcacaatattgattcctcctatccatgagcatggnatggttttccatttgtttgtgt

SEQ ID NO: 123891 - DNA, 352 bp, Homo sapiens; identical to SEQ ID NO: 117493

SEQ ID NO: 123892 - DNA, 517 bp, Homo sapiens
ttttttttttttttttataaatatatgtatatattttatttacattatatacatggcatatctatacagttacatttacacttgacttagagtcaaagtcatatacacacacacaggacttggactcaaagcttttaatgacaagcatgcaaaatttcttagtatagaccctaagagtacccttaatataagtatgtttatttaaaaattctatgtatctactactgttaccagggggtccttgctcccagagctcccaagatggtggcaggctgcttccaagacggtggcaagcctcgtgttctctgacctggggttcttggcctcacggattccaaggaatggaatcttgggccatgcggtgagtgttatagctctattagaagccgtgggtcacggaagagaaccgtggaacccagtgactagtgttcagctcgattaggacgaacccaggctcttagccgtgcaggaacaatgggcaagccttcagtccgattcaggagttggcaaagggcgc

SEQ ID NO: 123893 - DNA, 1926 bp, Homo sapiens
atgaatcaaagtgaccaggaaatgactggagcgtttgtccacatgaaaagttatacgggcctgatctcaggggtggcagtaaagatggaaagacacatttatcaagacagacgaattgcaatagagaaagagtttaattcatgtagaactggctgtatgggagactggagttttactattactcaaatcagactcctggaaaacacagggatcagggtttttaaggataatttggtagaggaagcagagtggtttacagtcctggaccttatggatgcctttttctgcatccctgtacatcctgactctcaattcttgtttgcctttgaagatccttcgaacccagcatctcaacttacctggactgttttaccccagaggttcaagaatagtccccatctatttggccaggcattagcccaagacttgagccagttctcatacctggacactcttgtccttcggtacatggatgatttacttttagctgcctattcagaaaccttgtgccatcaagccaccgaagctctcttaaatttcctcgccacctgtggctacaaggtttccaaaccaaaggctcagctctgctcacagcaggttaaatacttagggctaaagttatccaaaggcaccagggcccccagtgaggaatgtatccagcctatactggcttatcctcatcccaaaaccctaaagcaactaagagcgttccttggcataacaggtttctgccgaatatggattcccagcatactcactgctaaaggagacttgtggctgtcagataaccatttacttaaatatcaggttctattacttgaagggccagtgctgcaactgcgcacttgtgcaactcttaacccagccacatttcttccagacaatgaagaaaagatagaacataactgtcaacaagtaattgctcaaacctacgccactcgaggggaccttttagaggttcccttgactgatcccgacctcaacttgtatactgatggaagttcctttgtacaaaaaggacttcaaaaagcgggatatgcagtggtcagtgataatggaatacttgaaagtaatcccttcactccaggaactagcactcagctggcagaactggtagccctcacttgggcactagaattcggagaaggaaaaagggtaaatataaatacaggctctaagtatgcttacctagtcctccatgcccatgcatcaatatggagagaaagggaattcctaacttccgagggaacacctatcaaacatcaggaagccattaggagattattattggttgtacagaaacctgaagaggtggcagtcttacactgctggggtcatccgaaaggaaaggaaagggaaatagaagggaactgccaagcggatattgaagccaaaagagcctcaaggcaggaccctccattagaaatgcttatagaaagacacctagtatggggtaatcccctctgggaaaccaacccccagtactcagcagaagaaatagaatggggaatctcacgaggacatagttttctcccctcaggatggcaagccaccgaacaaggaaaaatacctttgcctgcagctaaccaatggaaattacttaaaaccactcaccaaaactttcacttatgcattgatagcacccatcagatggccaaattgttatttactggaccaggacttttcaaaactctcaagcagatagttggggcctgtaaatttgtctcttccagaattaaagctgtaaaactacaaatcattcttcaaatggagccccagatgcagtccatgactaagatctaccgcggacccctggaccaccctgacagcccatgctccaatgttaacgacatcgaaggcacccctcctgaggaaatctcaactgcacaacccctactacaccccaggccagcaggaagcagttag

SEQ ID NO: 123894 - DNA, 2121 bp, Homo sapiens
atggtattagtagtagtagcagtagtagtggtggttttggtagtagcagtaattgtagtcgtagtagtagtagtagcagcagtagtggtaggagcagtagtagtagtggtggtggtggtaatggtagtagtggtggtggtagtggtagtagaggaggacaaccagcacaaaactggtgcaataaacaacaataatacagctaagaaccctcaacagagtccatttcactcccctgccacctccactggagcagaggctactcaaatgagaaggaaccagaaaaccaatcctcataatatgacaaaacaagtctctttaacaccccccaaaatcacactagctcaccagcaatggatccaaaccaagaagaaatacctgatttacctgaaaaagcattcaggagtgaataaaatacctaggaatccaacttatgagggatgtgaaggaccttttcaaggagaactacaaaccactgctcaacaaaataaaggaggacacaaacaaacggaagatcattccatgctcatggataggaagaatcaatattgtgaaaatggccatactgcccaagctgtacctaacccttacactctgctttcccaaataccagaggacgcagagtggtttacagtcctggaccctaagcatgccgttttctgcatccctgtacatcctgactctcaattcttgtttgcctttgaagatccttcaaacccaatgtctcaactcatctggactgttttaccccaagggttcaggaatagcccccatctatttggccaggcattagcccaagacttgagccaattctcctacctggacactcttgtccttcggtacatggatgatttacttttagccacccattcagaaaccttgtgccatcaagccacccaagcactcttaaatttccttgctacctgtggctacaaggtttccaaaccaaaggctcagctctgctcacagcaggttaaatacttagggctaaaattatccaaaggcaccagaaccctcagtgaggaacgtatccagcctatactgggttatcctcatcccaaaaccctaaagcaactaacagcgttccttggcataacaggtttctgccaaatatggattcccaggtacagcaaaatagccagaccattaaatacacgaattaaggaaactcaaaaagccaatacccatttagtaagatggacacctgaagcagaagtggctttccaggccctaaagaaggcgctaacacatgccccagtgttaagcttgccagtggggcaaaacttttctttatatgtcacagaaaaaaacaggaatagctctaggagtccttacacaggaactagtgctcagctggcagaactaatagccctcactcgggcaccagaattaggagaaggaaaaagggtaaatatatatgcaaactcaatagggagagaaagggaattcctaacttccaagggaacacttgtcaaacatcaggaagccattaagagattattattggctgtacagaaacctaaagaggtggcagtcttacactgctggggtcatcagaaaggaaaagaaagggaaatagaagagaaccgccaagcggatattgaagccagaagagccgcaaggcaggaccctccattagaaatgcttacagaaggacccctagcattcgagctggcaatggctacggctcgagctgagctttcactcgccatccaccactgctgtttgccgccgccaccgcagacccgctgctggcttccatcccttcggatccggcagggtgtctgctgcattcctgatccagcgagagctataacactcaccgcatggcccaagattccattccttggaatccgtaaggccaagaatccccaggtcagagaacacgaggcttgccaccatcttggaagtggcctgccgccattttggaagtggcccaccaccatcttgggagctctcggagcaaggacccctggtaacactggcagtacttatactttcattggttatacttatacttccccggttatatttatactttcctggcagtacgtatactttcatggtttatactattttaaaattattttttattaaatggagccaaattttttaaaaaaaaaa

SEQ ID NO: 123895 - DNA, 1287 bp, Homo sapiens
atgattacgaattcgagctcggtaccccctgaacctggaggatacctctcctgcggcaatgcagtcaccctgaagtgttccaggaaggctgtctataggttcagccacactgagctcctgtgggagaagccccagctgtgtctgcagtggtggacaagcggttttttcgccctttgcgttggagttccacgttctttaatagtggactcttgttccaaactggaacaacactcaaccctatctcgggctattcttttgatttataagggattttgccgatttcggaaccaccatcaaacaggattttcgcctgctggggcaaaccagcgtggaccgcttgctgcaactctctcagggccaggcggtgctgaatgtggagtaaatgcagatgttgagaaacatcttgaattgggcaagaaattacttgcagctggacagctagctgatgctttatctcagtttcatgctgccgacagagaatgtgaagacaatgtgaagacacataaggaaaagaaagccatttacgaaccaaggagagtacgtctgtgttatattctttcctcgcagccctcagaaggtatcaaccctgtggacaccttcatcttggactttcagcttccagaactaaatgccaaaaagcaagaaattattaaagcataccgaaaattagcactgcagtggcacccagataacttccagaatgaagaagaaaagaaaaaagctgagaaaaagttcattgatatagcagctgctaaagaattaaggtcctttctgttagagggaaaccttacaaccagaaaggacatccccaccaaaaacccatctgtacatcaccatcatcaaagaccaaaagtagataaacccacaaagatggggaaaaaacagaacagaaaaactggaaactctaaaaagcagagcgcatctcctcctctaaaggaacgcagttcctcaccagcaacagaacaaagctggatggagaatgactttgacgagctgagagaagaaggcttcagacgatcaaattactctgagctacgggaggacattcaaaccaaaggcaaagaggttgaaaactttgaaaaaaatttagaagaatgtataactagaataaccaatacagagaagtgcttaaaggagctgatggagctgaaaaccaaggctcaagaatgcagaagcctcaggagccaatacgatcaactggaagaaagggtatcagcgatggaagatgaaatgaatgaaatgaagcgagaagggaagtttagaagaaaaaagaataaaaagaaatga

SEQ ID NO: 123896 - DNA, 3464 bp, Homo sapiens
atggtggcccccggctccgtgaccagccggctgggctcggtattccccttcctgctagtcctggtggatctgcagtacgaaggtgctgaatgtggagtaaatgcagatgttgagaaacatcttgaattgggcaagaaattacttgcagctggacagctagctgatgctttatctcagtttcatgctgccgtagatggtgaccctgataactatattgcttattatcggagggctactgtctttttagctatgggcaaatcaaaagctgcacttcctgatttaactaaagtgattcaattgaagatggacttcactgcagcaagattacagagaggtcacttattactcaaacaaggaaaacttgatgaagcagaagatgattttaaaaaagtgctcaaatctaatccaagtgaaaatgaagaaaaggaagcacagtctcaacttataaaatctgatgaaatgcagcgtttgcgttcacaagcacttaacgcttttggaagtggagattatactgctgctatagccttccttgataagattttagaggtttgtgtttgggatgcagaactacgggaacttcgagctgaatgttttataaaagaaggagaacctaggaaagctataagtgacttaaaagctgcgtcaaagttgaagaatgataatactgaagcgttttataaaataagcacactgtactaccaactaggagaccacgactgttccttcagtgagtttcgggatgttcttaaccttgaccaggatcataaaaggttgtttcgcacactataaacaagtaaagaaacttaataagctgattgagtcagctgaagagctcatcagagatggcagatacacagatgctaccagcaaatatgaatctgtcatgaaaacagagccaagcattgctgaatatacagttcgttcaaaggagaggatttgcccactgctttttctaaggacgagaaagcctgttgaagctattacgggtttgttctgaagttttacagatggaacctgacaatgtgaatgccctgaaagatcgagcagaggcctatttgatagaggaaatgtatgatgaagctattcaggattatgaaactgctcaggaacacaatggaaaatgatcagcagattcgagaaggtctagagaaagcacaaagattattggaaacagtcgcagaaacgagattattattaaaatcttgggagtaaaaagaaatgccaaaaagcaagaaattattaaagcataccgaaaattagcactgcagtggcacccagataacttccagaatgaagaagaaaagaaaaaagctgagaaaaagttcattgatatagcagctgctaaagaagtcctctctgatccagaaatgagaaagaagtttgacgacggagaagatcctttggatgcagagagccagcaaggaggcggcggcaaccctttccacagaagctggaactcatggcaagggttcaatcccttcagctcaggcggaccatttagatttaaattccacttcaattaaaccaactgtttttctggtcttcttaatttggttaaatattaaaaacaaagaaatcttgttccgggaccctaatgaaaaaaaatttcaaatcttttcagtttgtccatgaccaaagagttgctttaataggaaaaaatctgttcttatccctgtcagatttatggttaatgggtttgcaacggcaaggaggcaaggaatggttctatttctgacagagcagcctgcatctgctttatgctgtctggagggaagtggtctgaggcaggctcacccgtggaagtgctcacgtattctgtattatttttctacactggagctggagattcttctcttcaacagccttgcagagtaagtccagtgcctaacaaagtgtaagaaggagctgtaatcttcaatgaggatggttatacttcagtattcttaaagagaacatgaacatttttgagctgtatgttcttagggacaactgtgcttcgatgtggtcagtctcgtcacttgtgagtagctgtgaaatctttagtgtgcatgtgtttgcacctctgtggtctgtcaacgtggctgtcactgaaggagcaagagaccatcttttaggaaccctgccaccaaataataatataccccccggcctagacctttggattaatgttaaatgtaccatttttttggttcagtacccgaagaagaatacctgaaacttgaatcctataaattccctatgaccccttttaatattaaacacaacaaattaaaagttgttataggtaaaataagttcagataaaatagtggtggtatttaaaataatattgctgaagtgcaggattgaaatactttttaaacaactgaagttctgagtttttataggggattttcatgtaacaagactggtttagaaacgtaaagttgcgcagtcaacataaataaatacagaatgccatgttctccacttctaagtaaagacagtgggcagcttctgtttctccttctatcaaggcttcaccctatcttaaaggtctgtggtgcctcccacgtgggacctgtctgctggtatgtgttaaacagcagaccggcccttctaccagatcttgatgcctctgattttctcctgcctacaagaaaatacaggcaaggttagtcaggtctggctatatttccactgttgtttcatttaataagatggcatctcctcttgagatatgttcttcttaccttttaagaagatactatttaagaagtgaactattcagtctttgtatactgaatgctttttccctaaaaaatgttaatcaagaatattgaatatttatggcactcttgatgctgcattttgaaagctgaaggaattactttagatagataggaattgctacctttattctggaaaggttttgtttctgcctcaaagcattttgaagtgttttaaccattaaagggtctaatttttttttcttaaatgaaatcaagcattttaattcactgtgggaggcatcctgaccacggacatccataacagcaaagcacaaatcgttttcgtctgtagtcatatcctgaaacataggtggacaaattttaaacccggagagacaaaaatccaccaaagtggaattggaggcagaaacacctaaagtgccttcctgcatcctatttagggagtctatttcctacccaataaacttgacaacgcatttgggaaaactagtgaacacccttacagctttcattttgctttaatgtttcaattcaagccggtgtaaaaataatttcccaaggcatttctgtttattctttagtaatctcactactggctatgtcagcaatatctttttcaatctggttccttttgtatatgatgtcactgtgacctctttgaaatatagtgatggcttttacctactttgaaaagaattttcacatagagtcagaaaaaaaaaaaaagtcgacg

SEQ ID NO: 123897 - DNA, 522 bp, Homo sapiens
atgactgacctgccaggaagagcacaagaagaaacacccggactcttctgtcaatttcgtggaattctccaagaagtgtttggagagatggaagaccacgtctgcaaaggagaagtgaagtttgaagagaaggcaaaaagtgacaaagctcgctgtgacagggagattaaaaattacattcctccgaaatgtaagaaaggaaggccaccatctgccttcttcctgttttgctctgaacatcgcccaaagatcaaaagtggacacccaggcctatttgtcgtggaaactgcaaagaaactgggtgaaatgtggtctgggcagtcagccaaagataaacaaccatatgagcagaaagcagttaagctacaggagagatatgaaaagggtattgctgcatatcgtgctaagggcaaaagtgaagcaggaaagaagggctcaaagaagaacaaaccagaagatgaggaggaggaggaggagaaagaagatgaagatgaggaggaagagggtgaagatgaagaataa

SEQ ID NO: 123898 - DNA, 3546 bp, Homo sapiens
tactctatagctacggttctggcagcggaggaaaagctagatcccagaagagatgaggcaaaacgcctgaggccgcagcgcaacttcaatatcacattcacccacgggacggtttttcgccctttgacgttggagtccacgttctttaatagtgcactcttgttcaccaccatcaaacaggaccttcccccactgcccaagaccatcatcactaacgcatttcaccgatttcggaaccaccatcaaacaggatttaagctgtctgcggcaaaccagcgtggaccgcttgctgcaactctctcagggccaggcggtgaaggacaatcagctgttgcccgtctcactggtgaaaagaaaaaccaccctggcgcccaatacgcaaaccgcctctccccgcgcgttggccgattcattaatgcagctggaacgacaggtttcccgactggaaagcgcgcaaggagcgactcaagcctcgcgaaagaaaataaccaaaaagcatacaaagaaacgtacggcgtctctcatattacacgccatgatatgctgcagatccctaaacagcagcaaaacgaaaaataccaagtgcctcaattcgatcaatcaacgattaaaaatattgagtctgcaaaaggacttgatgtgtgggacagctggccgctgcaaaacgctgacggaacagtagctgaatacaacggctatcacgttgtgtttgctcttgcgggaagcccgaaagacgctgatgacacatcaatctacatgttttatcaaaaggtcggcgacaactcaatcgacagctggaaaaacgcgggccgtgtctttaaagacagcgataagttcgacgccaacgatccgatcctgaaagatcagacgcaagaatggtccggttctgcaacctttacatctgacggaaaaatccgtttattctacactgactattccggtaaacattacggcaaacaaagcctgacaacagcgcaggtacacaataagccttccgaagatctccaaacttgttccctcaatcttggacacattctgcccattatcaagtttaatgatgacagcccggaagcgaggaaaataacccggcgctggagaataggtgaagcagcggatttagttggggtttcttctcaggctatcagagatgccgagaaagcagggcgactaccgcacccggatatggaaattcgaggacgggttgagcaacgtgttggttatacaattgaacaaattaatcatatgcgtgatgtgtttggtacgcgattgcgacgtgctgaagacgtatttccaccgtttaatgatgacagcccggaagcgaggaaaataacccgccgctggagaataggtgaagcagcggatttagttggggtttcttctcaggctatcagagatgccgagaaagcagggcgatctaccgccacccggatattggaaattcgaggacgggttgagcaacgtgttggttatacaattgaacaaattaatcatatgcgtgatgtgtttggtacgcgattgcgacgtgctgaagacgtatttccaccggtgatcggggttgctgcccataaggagttaaataatgattacacatcgaaaaaagtaatgaagccgctgatcacttcaaacacggtaactgatgaaatcgagcgcgcgaatgttctcaaaatgaacggcaaatggtacttgttcactgattcacgcggttcaaaaatgacgatcgatggtattaactcaaacgatatttacatgcttggttatgtatcaaactctttaaccggcccttacaagccgctgaacaaaacagggcttgtgctgcaaatggctcttgatccaaacgatgtgacattcacttactctcacttcgcagtgccgcagaccaaaggcaacaatgtggttatcacaagctacatgacaaacagaggcttcttcgaggataaaaaggcaacatttgcgccaagcttcttaatgaacatcaaaggcaataaaacatccgttgtcaaaaacagcatcctggagcaaggacagctgacatggctccaagtagcgaagcgagcaggactgggcggcggccaaagcggtcggacagtgctccgagaacgggtgcgcatagaaattgcatcaacgcatatagcgctagcagcacgccatagtgactggcgatgctgtcggaatggacgatatcccgcaagaggcccggcggtagcatgccagttccctgagaaaaacgactttcgcttctctggttttctgtctacgaagagtgactgccacatagtaggccctcaaccaatatttgctgaacataatcaagcagagggatgtagacttgaacacttttgctccacccccacccttgtgtccatgctcaattttcttggacgcaggacaaagaagccaggtactagttcagagaacaagaaactgctacattacggtgcattggcaaaactacaaccatatttcggtgcaggaagaagggatcatcagaagggtggacgcggatctgtcaacatgggtaaaggagaccccaacaagccgcggggcaaaatgtcctcgtacgccttcttcgtgcagacctgccgggaagagcacaagaagaaacacccggactcttccgtcaatttcgcggaattctccaagaagtgttcggagagatggaagaccatgtctgcaaaggagaagtcgaagtttgaagatatggcaaaaagtgacaaagctcgctatgacagggagatgaaaaattacgttcctcccaaaggtgataagaaggggaagaaaaaggaccccaatgctcctaaaaggccaccatctgccttcttcctgttttgctctgaacatcgcccaaagatcaaaagtgaacaccctggcctatccattggggatactgcaaagaaattgggtgaaatgtggtctgagcagtcagccaaagataaacaaccatatgaacagaaagcagctaagctaaaggagaaatatgaaaaggatattgctgcatatcgtgccaagggcaaaagtgaagcaggaaatttggccctggttggccaacaggctcaaagaagaagaacgaaccagaagatgaggaggaggaggaggaagaagaagatgaagatgaggaggaagaggatgaagatgaagaataaatggctatcctttaatgatgcgtgtggaatgtgtgtgtgtgctcaggcaattattttgcttaagaatgtgaattcaagtgcagctcaatacgtagcttcagtataaaaactgtacagatttttgtatagctgataagattctctgtagagaaaatacttttaaaaaatgcaggttgtagctttttgatgggctactcatacagttagattttacagcttctgatgttgaatgttcctaaatatttaatggtttttttaatttcttgtgtatggtagcacagcaaacttgtaggaattagtatcaatagtaaattttgggttttttaggatgttgcatttcgtttttttaaaaaaaatatttgtaataccaattatgtatattatttcaaaaaaaaaaaaaaaaaaa

SEQ ID NO: 123899 - DNA, 704 bp, Homo sapiens
ttttcttgagttacctcccgcagccgcagccgccgtgctcagcgcgagccccggagcccttgagcgcgaggcgcggagcccccggagcccccaaaccgcagacacatccccgcgccccagagccccggcctgcgcgcccagccgggcccgcgcgatgccctcagaccggcctttcaagcagcggcggagcttcgccgacccgctgtaaggaggtacagcagatccgccgaccagcaccccagcaaaattccggtggatcatcgagcgctacaagggtgagaagcagctgcccgtcctggacaagaccaagtttttggtcccggaccatgtcaacatgagcgagttggtcaagatcatccggcgccgcctgcagctgaaccccacgcaggccttcttcctgctggtgaaccagcacagcatggtgagtgtgttccacgcccatcgcggacatctacgagcaggagaaagacgaggacggcttcctctatatggtctacgcctcccaggaaaccttcggcttctgagccagcagcccctgcctgtctgcccatctgcccctcacccacccgaggctctgcccaccgcctggacctgcccacccctgaaagactggcccctggctccccgcccctcggtctccacgtggtgtatggatctgtggtcattgtccctctgcagaataaagattgctcaggcctgcctga

SEQ ID NO: 123900 - DNA, 794 bp, Homo sapiens
tccgcgaccagcaccccagcaaaatcccggtgatcatcgagcgctacaagggtgagaagcagctgcccgtcctggacaagaccaagtttttggtcccggaccatgtcaacatgagcgagttggtcaagatcatccggcgccgcctgcagctgaaccccacgcaggccttcttcctgctggtgaaccagcacagcatggtgagtgtgtccacgcccatcgcggacatctacgagcaggagaaagacggaggacggcttcctcctatatggtctacggcctcccagggaaacctttcggcttctgagccaagcagtaggggggctcggcctggggagtcggggggccccggtcaggccctggcccagagagctcctgggtctggaaacttggagcctggcctcttaacccgtggtgggctgggcagggcatgtgccccccctaaatcaaagggcacctaaacccaaccctactctgccccctgggtggaatccctgggccggtccgtgttaagggttggtccctctgggtgctggctggtgggatgggggagggtggggagcagctcccagcaccccctcctgtgtggttcatctttttttttaggcccctgcctgtttgcccatttgcccctcacccacccgaggctttgcccaccgcctggacctgcccacccctgaaagactggcccctggctccccgcccctcggtctccacgtggtgtatggatctgtggtcattgtccctctgcagaataaagattgctcaggcctgcctggcaaaaaaaaaaaaaaaaa

SEQ ID NO: 123901 - DNA, 2133 bp, Homo sapiens
gtgaagcggccgggttgggcgattaacaggccgtggttaggaaggacggagaaggggcgttcgctcctttgggacttttcatgcctcgtttttttttcagatgtggcttggtctgggcgcaaggtcccagcagccagcttaagcttactcttctgtgaaaggggaaagtatcccctgtggaaagcggttaaacttgtggagggggtgcgggacgtgagttcttccccatgccaggcgaatggtgtggccttgagctggtccaggagccggctcgacgtgtctgagggaggcccggagggggcggggaggtggcccacagaacgcgggttctgtaaagagacgttgggaagattcgattccgagaagaggaagaaccggattgaaagagagccaggccgctgagggggagggggctgctaagatggcgtcggcctcctccgggccgtcgtcttcggtcggtttttcatcctttgatcccgcggtcccttcctgtaccttgtcctcagcagcatctggaatcaagagacccatggcatctgaggtcttggaagctagacaggattcttacatctcattggtgccttatgcctctggcatgcccatcaagaaaataggccatagaagtgttgattcctcaggagagacaacatataaaaagacaacctcatcagccttgaaaggtgccatccagttaggcattacccacactgtggggagcctgagtaccaaaccagagcgtgatgtcctcatgcaagatttctacgtggttgagagtatcttctttcccagtgaagggagcaacctgacccctgctcatcactacaatgactttcgtttcaagacctatgcacctgttgccttccgctacttccgggagctatttggtatccggcccgatgattacttgtattccctctgcagtgagccgctgattgaactctgtagctctggagctagtggttccctattctatgtgtccagcgacgatgagttcattattaagacagtccaacataaagaggcggaatttctgcagaagctgcttccaggatactacatgaacctcaaccagaaccctcggactttgctgcctaaattctatggactgtactgtgtgcaggcaggtggcaagaacattcggattgtggtgatgaacaatcttttaccaagatcggtaaaaatgcatatcaaatatgacctcaaaggctcaacctacaaacggcgggcttcccagaaagagcgagagaagcctcttcccacatttaaagacctagacttcttacaagacatccctgatggtctttttttggatgctgacatgtacaacgctctctgtaagaccctgcagcgtgactgtttggtgctgcagagcttcaagataatggattacagcctcttgatgtcaatccataatatagatcatgcacaacgagagcccttaagcagtgaaacacagtactcagttgatactcgaagaccggccccccaaaaggctctgtattccacagccatggaatccatccagggagaggctcgacggggtggtaccatggagactgatgaccatatgggtggcatccctgcccggaatagtaaaggggaaaggcttctgctttatattggcatcattgacattctacagtcttacaggtttgttaagaagttggagcactcttggaaagccctggtacatgacggagacactgtctcagtgcatcgcccaggcttctacgctgaacggttccagcgcttcatgtgcaacacagtatttaagaagattcccttgaagccttctccttccaaaaagtttcggtctggctcatctttctctcggcgagcaggctccagtggcaactcctgcattacttaccagccatcggtctctggggaacacaaggcacaagtgacaacaaaggcagaagtggagccaggcgttcaccttggtcgtcctgatgttttacctcagactccacctttggaggaaatcagtgagggctcgcctattcctgaccccagtttctcacctctagttggagagactttgcaaatgctaactacaagtacaaccttggaaaagcttgaagttgcagagtcagagttcacccattaagcgcaaagcctcagaagacctgg

SEQ ID NO: 123902 - DNA, 2010 bp, Homo sapiens
gattaacaggccgtggttaggaaggacggagaaggggcgttcgctcctttgggacttttcatgcctcgtttttttttcagatgtggcttggtctgggcgcaaggtcccagcagccagcttaagcttactcttctgtgaaaggggaaagtatcccctgtggaaagcggttaaacttgtggagggggtgcgggacgtgagttcttccccatgccaggcgaatggtgtggccttgagctggtccaggagccggctcgacgtgtctgagggaggcccggagggggcggggaggtggcccacagaacgcgggttctgtaaagagacgttgggaagattcgattccgagaagaggaagaaccggattgaaagagagccaggccgctgagggggagggggctgctaagatggcgtcggcctcctccgggccgtcgtcttcggtcggtttttcatcctttgatcccgcggtcccttcctgtaccttgtcctcagcatctggaatcaagagacccatggcatctgaggtgccttatgcctctggcatgcccatcaagaaaataggccatagaagtgttgattcctcaggagagacaacatataaaaagacaacctcatcagccttgaaaggtgccatccagttaggcattacccacactgtggggagcctgagtaccaaaccagagcgtgatgtcctcatgcaagatttctacgtggttgagagtatcttctttcccagtgaagggagcaacctgacccctgctcatcactacaatgactttcgtttcaagacctatgcacctgttgccttccgctacttccgggagctatttggtatccggcccgatgattacttgtattccctctgcagtgagccgctgattgaactctgtagctctggagctagtggttccctattctatgtgtccagcgacgatgagttcattattaagacagtccaacataaagaggcggaatttctgcagaagctgcttccaggatactacatgaacctcaaccagaaccctcggactttgctgcctaaattctatggactgtactgtgtgcaggcaggtggcaagaacattcggattgtggtgatgaacaatcttttaccaagatcggtaaaaatgcatatcaaatatgacctcaaaggctcaacctacaaacggcgggcttcccagaaagagcgagagaagcctcttcccacatttaaagacctagacttcttacaagacatccctgatggtctttttttggatgctgacatgtacaacgctctctgtaagaccctgcagcgtgactgtttggtgctgcagagcttcaagataatggattacagcctcttgatgtcaatccataatatagatcatgcacaacgagagcccttaagcagtgaaacacagtactcagttgatactcgaagaccggccccccaaaaggctctgtattccacagccatggaatccatccagggagaggctcgacggggtggtaccatggagactgatgaccatatgggtggcatccctgcccggaatagtaaaggggaaaggcttctgctttatattggcatcattgacattctacagtcttacaggtttgttaagaagttggagcactcttggaaagccctggtacatgacggagacactgtctcagtgcatcgcccaggcttctacgctgaacggttccagcgcttcatgtgcaacacagtatttaagaagattccctgcgttcaccttggtcgtcctgatgttttacctcagactccacctttggaggaaatcagtgagggctcgcctattcctgaccccagtttctcacctctagttggagagactttgcaaatgctaactacaagtacaaccttggaaaagcttgaagttgcagagtcagagttcacccattaagcgcaaagcctcagaagacctggaacaagattctgccatctctgtgatcccaagatgtcagcccttgccccagcaatgctgaattttcttctacttggtcatcaaa

SEQ ID NO: 123903 - DNA, 449 bp, Homo sapiens; identical to SEQ ID NO: 118755

SEQ ID NO: 123904 - DNA, 1992 bp, Homo sapiens
atggcgtcggcctcctcccaaccgtcgttggcggtcggtttttcatcctttgatcccggggccccttcctgtaccgcgtcctcagcatctggaatcttgagccccacggcatctgaggtgccttatgcctctggcatgcccatcaagaaaacaggccatcgaggtgtcgattcctcaggagagacaacatataaaaagacaacctcaacagccttgaaaggtgccatccagttaggcattacttacactgtggggagcctgagtaccaaaccagagcgtgatgtcctcatgcaagatttctacgtggtggagagtatcttcttccccagtgaagggagcaacctgacccctgctcatcactacaatgccttccgtttcaagacctatgcgccggttgccttccgctactttcgggagctatttggtatcccgcccgatgattacttgtgctccctctgcagtgagccgctgattgaactctgtagctctggagctagtggttccctgttctatgtgtccagcgacgatgaactcattattaagacactccaacataaagaggcggagtttctgcagaagctgcttccaggatactacttgaacctcagccagaaccctcggactttgctgcctaaattctttggactgtactgtgtgcagacaggtggcaagaacattcggattgtggtgatgaacaatcttttaccaagatccgtcaaaatgcatatcaaatatgacctcaaaggctcaacctacaaacgccgggcttcccagaaagagcgagagaagcctcttcccacatttaaagatctagacttcttacaagacatccctgatggtctttttttggatgctgacacgtacaatgctctctgtaagaccctgcagcgtgactgtttggtgctgcagagcttcaagataatggactatagcctctggctgtcaatccacaatatagatcatgcacaacgagagcccttaagcagcgacactcttcaagtgtcaatcgacactcaaagactggctccccaaaaggctctgtattccacagccatggaattcatccagggagaggctcggctgggcgacaccatggaggccgatgaccatatgggtggcatccctgctcagaatagtaaaggggaaaggcttctgctttatattggcatcattgacattctacagtcttacacgtttcttaagaagttggagcactcttggaaagccgtggtacatgatggggacgctgtctcagtgcatcgcccaggcttctacgctgaacggttccagcacttcatgtgcaacgcagtatttaagaagatccccttgaagccttctccttccaaaaagtttcggtctggcttatctttctctctgcatacgggctccagtggcaactcctgcattacttaccagccattggtctctgaggaacacaagtcacaagtgataaaggtgcaagtggagccaggtgttcaccttggtcgttctgatgttttacctcagacctcagaatccacctttggaggaaatcacagcccattagggcttaagtgcgtcacagacagcttcatcgagttgagtattcatggctggcgatttccctctgaggtagctatgaagactagctgcacagccccactcgctgtcccttggggcatggtggcacaaaccctacttctgcttttagcttttgtcactgactcttcttcaagagtgcactttccaatttccagactgatccactactgcttcaacatcaaagaagtctatggattattgtctaaatttcccaaaagtatgtccacctgtgtttttgataaacaagggcagaaaccaagctttagtcagcttcttagccctagttcctggaacacaggccctgtctccaaataccgtcacaatgtggttacagctttacttgatgaattcaggggagacaaaattcagtccataacagggactgagctggatgagcaggaggacttgtaa

SEQ ID NO: 123905 - DNA, 3714 bp, Homo sapiens
attaacaggccgtggttaggaaggacggagaaggggcgttcgctcctttgggacttttcatgcctcgtttttttttcagatgtggcttggtctgggcgcaaggtcccagcagccagcttaagcttactcttctgtgaaaggggaaagtatcccctgtggaaagcggttaaacttgtggagggggtgcgggacgtgagttcttccccatgccaggcgaatggtgtggccttgagctggtccaggagccggctcgacgtgtctgagggaggcccggagggggcggggaggtggcccacagaacgcgggttctgtaaagagacgttgggaagattcgattccgagaagaggaagaaccggattgaaagagagccaggccgctgagggggagggggctgctaagatggcgtcggcctcctccgggccgtcgtcttcggtcggtttttcatcctttgatcccgcggtcccttcctgtaccttgtcctcagcatctggaatcaagagacccatggcatctgaggtgccttatgcctctggcatgcccatcaagaaaataggccatagaagtgttgattcctcaggagagacaacatataaaaagacaacctcatcagccttgaaaggtgccatccagttaggcattacccacactgtggggagcctgagtaccaaaccagagcgtgatgtcctcatgcaagatttctacgtggttgagagtatcttctttcccagtgaagggagcaacctgacccctgctcatcactacaatgactttcgtttcaagacctatgcacctgttgccttccgctacttccgggagctatttggtatccggcccgatgattacttgtattccctctgcagtgagccgctgattgaactctgtagctctggagctagtggttccctattctatgtgtccagcgacgatgagttcattattaagacagtccaacataaagaggcggaatttctgcagaagctgcttccaggatactacatgaacctcaaccagaaccctcggactttgctgcctaaattctatggactgtactgtgtgcaggcaggtggcaagaacattcggattgtggtgatgaacaatcttttaccaagatcggtaaaaatgcatatcaaatatgacctcaaaggctcaacctacaaacggcgggcttcccagaaagagcgagagaagcctcttcccacatttaaagacctagacttcttacaagacatccctgatggtctttttttggatgctgacatgtacaacgctctctgtaagaccctgcagcgtgactgtttggtgctgcagagcttcaagataatggattacagcctcttgatgtcaatccataatatagatcatgcacaacgagagcccttaagcagtgaaacacagtactcagttgatactcgaagaccggccccccaaaagggctctgtattccacagccatggaatccatccagggagaggctcgacggggtggtaccatggagactgatgaccatatgggtggcatccctgcccggaatagtaaaggggaaaggcttctgctttatattggcatcattgacattctacagtcttacaggtttgttaagaagttggagcactcttggaaagccctggtacatgacggagacactgtctcagtgcatcgcccaggcttctacgctgaacggttccagcgcttcatgtgcaacacagtatttaagaagattcccttgaagccttctccttccaaaaagtttcggtctggctcatctttctctcggcgagcaggctccagtggcaactcctgcattacttaccagccatcggtctctggggaacacaaggcacaagtgacaacaaaggcagaagtggagccaggcgttcaccttggtcgtcctgatgttttacctcagactccacctttggaggaaatcagtgagggctcgcctattcctgaccccagtttctcacctctagttggagagactttgcaaatgctaactacaagtacaaccttggaaaagcttgaagttgcagagtcagagttcacccattaagcgcaaagcctcagaagacctggaacaagattctgccatctctgtgatcccaagatgtcagcccttgccccagcaatgctgaattttcttctacttggtcatcaaaaaaggagtgtaatagaagtgaggggagctgctcctccatcttcttcctgaagaagaaccttctctccttcctcttcctcatgaatgggccttagtgcctcagagagttgaggaccgcagcatcccctccactccagagttgggtggtacggattttcaactggccaaccctttgcctccactattgaatttttttcagacccccattcttcatgctggaaatgggattgctggacttggcagctttctttcccctcgtctttgactaggaaccggactcttaatttcctcaggacagactagctggcacattatccctaccttagttctttctctctgactcctggaagaatactcctgtaatctctgtaaaggtttttgggggataagggtgtttaaccacctcccagctttcttcttcttttttttttctgaaaaaaggaaaaagcacacagcacacaatttcaagccattttcagatcagaactccagaagtgttgacaagatgcctattcgtagagttccctcagaagagccatggtgtttatgaagagaagagtagtgattgctctgccagaagcagctcctctttaaactcctcctctcttgatgaatttcttaaggctgaaggaatgaagagagtgggacatggggtaatctttatcccttttgttaaaacaggaggcagccatgggctgggagatcatagcccttcctaggcagaatcctgttcactgccaggctatagtaattattactattttgcaatttgaaatatattctggttgtttttctaaatgtgaagacttaccaaatgaattttagatcattctccagaggagattttttttgctcttctcatcttttccaacagtgttctcctgtttgtggagctaaggtaaagaggggacacttctgtctgtttaacagacagtccatatctgtgaggccagcaaatattttcttaaactcatggggagacagcagattcttgccttggtgaggtcattgctgtgccatatgtcctacccccctgtcttcatgcagggaagttggaaatgggggctacatatgccctctcctccccgtctacaagagttgtggttttccatctgatccttccactcttgtcaggggaagaagggggcctggtatctcaggcagattgttgaattcctgttctatcccttctctatcccaccctgccttgataatatgttagcccataccccaaataactgtctatattagacacccccagccagtttctggctgcctgtctttgctgccatgttttttacaagaaggaaagaattcttgctatttttttttcataatttactatttatgatgtatttaagtgttttattaaggacagagttctgttaggggtgggagggaatatttgagggagggctgggtcttagggaaaggaatggggaagcaacatttttattaagtgttactatttgcctctactttgtattgttcagaaatggcaaatacaatataaaagtgatatatggttttaatgtaataaactttaatgagttattta

SEQ ID NO: 123906 - DNA, 1015 bp, Homo sapiens
cagaggtgccaggggtaacttagaagtaggagccttttattttcttatttatttatttatttatttatttattttttgagacagagtctcgccctgtcatccaggctggagtacagtggtgcaatctcagctcactgcaacctctgcccaccgggttcaagcaattctccctgccttagccccctgactagctgggattacaggcacccgccaccatgcccggctaatttttgtagttttagtagagatggggtttccccatgttggccaggctggtctcaaactcctgacctcaggtgatctgtccgccttggcctcccaaagtgctgggattacaggcgtgagccaccatggccgacacaaaaaatatttcttaaatgatgatgatgatgtgatagaaatctacacgattactcagacagatcaagagcaggctggagtaccacaacaatgccgcccggggctccaacttaccactagcgtccgggaggaagaccaggcagcggtcgccgcggcggcagctagacgagaaacggactcggctgcaatcgcccagcggagcccgcggcagtcgcatctctgcactaatcgcgtcttctttcttcttcgttggcccctaactaactacactactctaaacggacgaaggccatcacacgagcgccacgacgatcgcgacgactccgacgacaacgatgtacagacagaagaagagttcatatgcaatcggcagggccttgggcccacagccagtcggttgcccagtcgttgtgggggagggaggggtgctgtcaatgcaaggtcaaggcagcaagaggtgaaccacaaaggctctcttttggcaactgctgggatgccgagctgcaaccggtcaggcagagctctaaccggtcaggcagagctctttttcacaggctcccaggcgcaaccgggcaggtgcctgcggtgtcctggcggcagcgcagagaagggtgaacggggcccccttggctcagaggcaccaaaaccaagctga

SEQ ID NO: 123907 - DNA, 1074 bp, Homo sapiens
ggaattcccgggtcgacgatttcgtggctgaagtctgcgtggagcagtgcaccttcatggactccaagatgaagcccctgtggatcatgtacagcaacgaggaggcaggcagcggcggcagcgtgggcatcatctttaagaacggggatgacctccggcaggacatgctgaccctgcagatgatccagctcatggacgtcctgtggaagcaggaggggctggacctgaggatgaccccctatggctgcctccccaccggggaccgcacaggcctcattgaggtggtactccgttcagacaccatcgccaacatccaactcaacaagagcaacatggcagccacagccgccttcaacaaggatgccctgctcaactggctgaagtccaagaacccgggggaggccctggatcgagccattgaggagttcaccctctcctgtgctggctattgtgtggccacatatgtgctgggcattggcgatcggcacagcgacaacatcatgatccgagagagtgggcagctgttccacattgattttggccactttctggggaatttcaagaccaagtttggaatcaaccgcgagcgtgtcccattcatcctcacctacgactttgtccatgtgattcagcaggggaagactaataatagtgagaaatttgaacggttccggggctactgtgaaagggcctacaccatcctgcggcgccacgggcttctcttcctccacctctttgccctgatgcgggcggcaggcctgcctgagctcagctgctccaaagacatccagtatctcaaggactccctggcactggggaaaacagaggaggaggcactgaagcacttccgagtgaagtttaacgaagccctccgtgagagctggaaaaccaaagtgaactggctggcccacaacgtgtccaaagacaacaggcagtagtggctcctcccagccctgggcccaagaggaggcggctgcgggtcgtggggaccaagcacattggtcctaaaggggctgaagagcccttgaactgcacctaacgggaaagaaccgacatggctgccttttgtttaca

SEQ ID NO: 123908 - DNA, 1521 bp, Homo sapiens
ctactgtgtctggtcctcattggctggagtcggactgcatgatctaagctgatcccgattggctacttcaaatggagcagaggtgggggctacagcggcaggaagagcagtttcagaactaagggcaccaaataaagaacagatgtaggatgttacagattgggaatgggtgtggattacagattgagaatggatgtgagttactgattgggaatggctggaaggctgtttactgtaaacctgcagtccccactcaaccccagcaccctgctggctgaagtctgcgtggagcagtgcaccctcatggactccaagatgaagcccctgtggatcatgtacagcaatgaggaggcaggcagtggtggcagggtgagcgtcagccttaagagggatgatgacctctggcaggacatgctgaccatgcagacgatccggctcatggacgtcccagacaccatcgccaacatccaactcaacaaccgcaacatggatggaggcaacgaagagttcaccctctcctgtgctggctactgtgtggccacgtacgtgctgggcatcggtgatcggcacagcgacaacatcatgatccgagcgagtgggcagctgttccacattgatttttgccactttcgtcagcgtgtcccattcatcctcacctatgactttgtccatgtgattgagcaggggaagactaataatatgagaaatttgaaaggttccggggctactgtgaaagggcctaacaccatcctgcggcgccacgggcttctcttcctccacctctttgccctgatgcaggcagcaggcctgcctgagctcagctgctccaaagacatccggtatctcaaggactcccttgtgcatcctctctagactgagttctggcagctccccgagggggccagggtaccctctagattcagggatgcttgctctccacttttcaagtgggtcttgggtacaagaattccctcgcctctgtcctggcttgttccaggaaggctgtctataggtccctgtatgccgcattcctgtgggagaaactccagctgtgtctgcagtggagtgccagagggaaacaaggattccttttccaaggtccttcacgatcacagatactaccttctttttggggtacaggtgcagacttttcctacagcacgaagtactgcaattgtaactctgctgtgagaaacttccgacacattcagtgccagcgttcttgcttctggatccaggataaccaaggcaagtctcatcgctgagtcctggagcagtgtcatagcaagctctgagcagctctgagctagctcttgcagggaaacatcttagatcaggacatgggcaattccgcactattcgagagtgtgatttgtcatccactttaaatatcatggggaactgtgcactctggaggcgtctatgaagagacattcgttgtagctgttttgtgccttgtaggccctgcacgtaacgcagagatcctgcctcccagccccactccatgacagcgcacgccat

SEQ ID NO: 123909 - DNA, 801 bp, Homo sapiens
gtggaagaactgagtaagaaactggctgactctgaccaagccagcaaggtgcagcagcagaagctgaaggtggggcagctgggggaatgggtctggcctctggacaagggagggaagctattctctaagctctggggccgtggggggttggtttataagtggttcctgctaatctataaaatcagctatgccactggcattgttggctacatggctgtcatgtttaccctctttggtcttaacttattattcaagatcaaaccagaagatgccatggactttggcatctcccttctcttctatggcctctactatggagttctggaacgggactttgcagaaatgtgtgcagactacatggcatctaccatagggttctacagcgagtcgggcatgcctaccaaacatctttcagacagtgtgtgtgctgtgtgtgggcagcagatctttgtggacgtcagtgaagaggggatcattgagaacaccggtgctcagcttccacgagttctgcatccgtggctggtgcatcgtgggaaagaagcaaacgtgtccctactgcaaagagaaggtagacctcaagaggatgttcagcaatccgtatcctttattggggtcgttgttgggagtgggctgtgggaagaaagtactggccagtgtgacctgcatttgggtcctcctggggccctcacttctgcccccaaccagaacatgtcaaaccatgaacaacaaaaagattatgaaggtgatgatgaggataaagaggatgatgacagacaccatggcatcatgaacccttactga

SEQ ID NO: 123910 - DNA, 1352 bp, Homo sapiens
tttcgtgggcgagccgtgaagatggcggcagtggtggaggtggaggttgtaggtggtgctgctggggaacgggagctggatgaggttgatatgtcagatctctctccagaagagcaatggagggtcgagcacgcacgcatgcatgccaagcaccgtggccatgaagctatgcatgctgaaatggtcctcatcctcatcgcaaccttggtggtggcccagctgctcctggtgcagtggaagcagaggcacccacgctcctacaatatggtgaccctctttcagatgtgggttgttcccctctatttcacagtgaagctgcactggtggaggttcctagtgatctggatcttgttctctgctgtcacagcctttgttaccttccgagccacccgaaaacctctagtacagacaaccccaaggttggtttataagtggttcctgctaatctataaaatcagctatgccactggcattgttggctacatggctgtcatgtttaccctctttggtcttaacttattattcaagatcaaaccagaagatgccatggactttggcatctcccttctcttctatggcctctactatggagttctggaacgggactttgcagaaatgtgtgcagactacatggcatctaccatagggttctacagcgagtcgggcatgcctaccaaacatctttcagacagtgtgtgtgctgtgtgtgggcagcagatctttgtggacgtcagtgaagagggggatcattgagaccacgtataggctgtcctgcaatcatgtctcccacgagttctgcatccgtggctggtgcatcgtgggaaagaagcaaacgtgtccctactgcaaagagaaggtagacctcaagaggatgttcagcaatccctgggagaggcctcacgtcatgtatgggcaactgctggactggcttcgatacttggtagcctggcagcctgtcatcattggtgtagtccaaggcatcaactacatcctgggcctggaatagtgatgaagagcatcagtgaaaaccccaccccacacgccatggacctcagggcactctcctccctgcccacaaagacctcctgggtgggaaagactcaaaggggcgcttagtccatttcaggaaccctccggctgtgtcggactggggagtgatttgatggagagccagccagtggggctgtcagcagtggggggctttttaaaagaaaactattttgatgaatatatttaaaaaacctttttttattgtggagcataggaattgcccccctccaggcttcaccctccctgcctaagcagggtgggggcagagccatgacatttttggtttaaaggagccatgtatt

SEQ ID NO: 123911 - DNA, 267 bp, Homo sapiens
actctgtgcctcactggggaaaaataactaaacattggcaaaggagattctaagaagccaagaggcaaaatgtcatcatatgcattttttgtgcaaacttgtcgggaagagcataagaagcagcacccagatgcttcagtcaacttctcagagttttcttacaaaaaggatattgctgcatattgagctaaagggaagcctgatgcagcaaaaaagggatttatcaaggctgaaaaaagcaagaaaaagaaggaagaggaggaagat

SEQ ID NO: 123912 - DNA, 639 bp, Homo sapiens
atgggcaaaggagatcctaagaagctgagaggcaaaatgtcatcatatgcattttttgtgcaaacttgtcaggaagagcataagaagcagcagccagatgcttcagtcaacttctcagagtttttaagaagtgctcagagaggtggaagaccatgtctgctaaagagaaaagtgaagacatggcaaagctataaattcatacaattatcagagtttggttttggtcaagtcataattgtgagtgaagaaccatggaaggagaacatttcttgctcatcaactactttcataaaatcaacaatttgcttaagtactacgctagttcctggggagttcctggggaacaatgagaataatgtttcttcagtctctaaggactcagctccttacatgagctttggtggagcggggtcagagactaactggcaaactgagcctggggtggaggtggagggagagaagacaaccacaccccctttctcacggcaggcttccagtctgccccagggccaagctgcacaggaagaagaatcgcctctaaatcaacttccgaattctgttcaacatcttggactggatattctaattattgaattgagactgtggcttaaagtgaccatagattggcctattaattaa

SEQ ID NO: 123913 - DNA, 1268 bp, Homo sapiens
aagacgacaagaacggacgcgtgggcccgtgactttactcttttagagcgccctgaatgaccggtcttggcaagttttgattgcttgccatagccccttcaaggaataaaatctctcggccatattcttgtctgtcttttacggaggttgatgtcgctactgtgttaaataaccagtactttggttttcattcccttactaagtactttaaggtcttatatgtcataattttattgctaacatcaaatatttattttattttttagaaaaataactaaacatgggcaaaggagatccctaagaagcccgagaggcaaaatgtcatcatattgcatttttttgtgcaaacttgtcgggaggagcataagaagaggcacccagatgcttcagtcaaccttctcagagttttctaagaagtgcttcagagaggttggaagaccatgtcttgctaaagagaaagggaaattttgaagatatggccaaaagcgggacaaggcccgttatgaaagaggaaatgaaaacctattatccctcccaaagggggagaccaaaaaagaagtttcaaggatcccaatgcaccccaaggagggcctcccttcgggccttctttcctcttcttgctctgagtatcgcccaaaaatcaaaagggaggaccatcctggcctgtccattggtgatgttgcgaagaaactgggagagatgtgggaattaacactgctgcagatgacaagcagccttatgaaaagaaggctgcgaagctgaaggaaaaatacgaaaaggatatagctgcatatcgagctaaaggaaagcctgatgcagcaaaaaagggagttgtcaaggctgaaaaaagcaagaaaaagaaggaagaggaggaagatgaggaagatgaagaggatgaggaggaggaggaagatgaagaagatgaagaagatgaagaagaagatgatgatgatgaataagttggttctagcgcagttttttttttcttgtctataaagcatttaacccccctgtacacaactcactcccttttaaagaaaaaaattgaaatgtaaggctgtgtaagatttgtttttaaactgtacagtgtctttttttgtatagttaacacactaccgaatgtgtctttagatagccctgtcctggtggtattttcaatagccactaaccttgcctggtacagtatgggggttgtaaattggcatggaaatttaaagcaggttcttgttggtgcacagcacaaattagttatatatggggatggtagt

SEQ ID NO: 123914 - DNA, 2909 bp, Homo sapiens
tgccaaagggaattctttattgtaaacaagatataaagtacaacaaaagaaatattgtgcaaattgtaagtcacaaggattttttttaattaaaacttttgttttccaagggtccaagttttgatgtcagaaatctacacccaatatacaaaaacaatgttaaatgggaagatatagtgacatttttcactatatattttaagcaatgtacttttgttttgccactgtgtatatcatccactatataacagaataaaagagaaatactgttaacaaaagtgaatgttctaataatttttctacccaactacctccacatccccaaaaaactcctataaattaacaggacgaacatttgtccacctgtgaataatggtcactaattttctaattcaataaagcacacattatatcctcataacataaaggtactttactgatgacataagccatctttttcaagaagttatctaagattcttaatatcccttctttacaatatatatttcatcttcagttttttttctaaacaaagtgcagtgtatcttagagtctacagaaaacacattggtatacaattttcaaatctacacaagaaactgcaggcaaactaaagttcaaagcataatgaaatgcctagatacagtcatttgttaaactttcaaaacaaaaatgcaaaaacaaattgtagctatgcttcaaagcaattaaattaaggaggattccaattctttgggccctcttagcaatatacagtcgttcaattccaaatattcacaatagtgtaaaaatgatagttctagatatatttaatcactacatccacgatgttgactggaaagactaggaataataaagaagataactctagaaaaagatgacaatatttgtaataatacaaactcattttacatctccatgtctgtaccgtaatgtttatttccttccagcctccatattcttgaaaccagtgctttagaagaatcacattgaaaagttggtctcaagtataaacagcaaaagtaaagtaacaaatatgcacacagattcaaaatctgtgctacctgtgttgacctcatctgaaaccttcaaaaaatattcaaaggaataaaagctttctcatctctcttatgtgataagaaatgaaacctgcctttctgtgacctgcctgtggccgaagcccttttagtcacctaacccaggcggggccttcgtgccaggctgtggggcttctgctttaagcccacgttgtggggccacagacttgcagtggaagcatttttacatcaccactggctcccgctgagaccaaagttagttctgactcttcactttccggtctgtcactgtgtgggagcaggggttggaggtagagcaatgtcatttagcttgctcacttccatctgccagtttggtagcttcttggctgatagatggcgccgggcatgcttggtcaaatggtcactcctcatgaaccgccggtcacacatggggcacgcaaatttcttctcacccgtgtgggttcgcctgtgtctggacagttcatcagaacgggcaaacctcctttcacaacctttccagctacagctgaaaggcttttctcctgtgtgcgtcctcgtgtgggccttcagatgggaacttttaaagtatgtcttgccacatcctgggtggctacagatgtgactccttatccttgatgaatcaatctgaggagtgacttttgctgctgaaggggaaaacccaggagcaggggcaatgggagagagtctggtgccattcgggctcaccaccggaggctttgaactctgcacaacgggctggggtaccacaaacatgacagcgcctttggggacttgtgtgcccatgaacacaacaggggggcaaacggctggtggctggctgggaggagtgctgggaacgactgttgtcacaacagggttgttggcaggaaggggaaccatctggcagatgaccggcataggtggcactccccctgcagatactgcaggtggagagaccaacactgacttctgttgtggggacacaggggctggctgagacctgcagatgaccgtctctgaggaaggcacagaaaagtcataaagtgcagcacttgctttctcatcaacatctgccactgtgtttctctcacatttggatctgtttggtgacacagcggcacatggtatgttctttcttgcagcctcaacatttaggtgggttcttcttctaaaagaattgttctgatagttgaggatgctggctgctttcattgggcaggtctggtggttacatagctgggcatcagctgtatgacgaatcacacttgttgcctgagctttggggagtttgggggcagatactgggctcttttcttcctctttgaaaggtgcggcaatgtgaggtttggcagtatctgagagtgacttgaagtgtacagtagatggcgctggtgccatcagatttgacacttgagagggttcaaagtcagaaggactgtaaggtggagtcaaacaaaatgctgggattgtatgaaaatcaggtgttcccggaagcagattctcttcctctgacaaatcagatactggtgtaacaggtctgttttcaacgtatttcttaaaatcagacttccaactgcagctcattgacataagtgcttctacagcttcaaaatcacttttctctgcagttttgttccaggaatacatactctcttttggcctttcagaaatcatttccattctttcctccgcagtctgctggagagaggcaccgaagttgagcatggttggctgcttggccgccggcggcaagctgactggctgctaggctgctggctgcttggccacagacgggcgcacggagacactcgacgccgctcccgccgccgccgcgctcagcgccgtctg

SEQ ID NO: 123915 - DNA, 1755 bp, Homo sapiens
atgaaaatgcaccatatgtttgaggaacagcaagcggtttgctgtggctgtgggcaagggctgagcggctacctgaatggggagggggcagacggcgctgagcgcggcggcggcgggagcggcgtcgagtgtctccgtgcgcccgtctgtggccaagcagccagcagcctagcagccagtcagcttgccgccggcggccaagcagccaaccatgctcaacttcggtgcctctctccagcagactgcgccctgatgcttttcatccaagttgaagtccttactaattctattgcaatggtgtcagttcatttggagaaacagccactcaagctagttttaggagaactcgggttcaggagcccagcaggggaagaacaagctaccccagttgtgggaggcgagggccttgggtgcattgaagattcagctgccgtggctgaggggggcattgctattggaggcatcgtgggcattaatactgctttacaagaggtcctgaagcctcatactatcaagatgcaaaggaacaatgcacagctcagcagaagaaaggaaccaaaagaggggctgtgtggggaaaggggacaggatagaatgtccagggcaaaaggctcttcctccaaagggaaggagctgccacctggatgccggagggtcacaatgaagcccttgttagtgagagaaacccaagaagggcaagctgctgagagaggagcagaggagcaactccagactcttggcccctttgcggtctatcgggactcaccctccaaaaatttctataaaagggataaaatgctcaagggtttagaggaggctaaggttaattttgtctggagaaccaatgagggcttcctggaggaggatgctggacaagagttcggtatacagaaagctgtcacaccggccctctgcccttccagaaaggcagaggttccactgagctgtttaacactcaagctatccgaggacggcaaggctaaaaaggcaccctataacacaggcccgcttgggctcctgcatttgtctatgtgctcccactcccgtaaggggtttgagcagctgtggcaactgaacagcgggaaacttctgcaggggccacgggacagcgtggagggctctgcgcgcagggcagagactgcagttcactgccctgcggttttgcacttcgccccggccctgctcttggctgcgctccgatgtcagcgtgacctggagtcagctgccgcgccctcccacacccgctcctgccagcacccccgtctgctttccggagctgttcagactgcaggcttttctaatccaccaaaagtggtaattcaaattaaatggaatttccttgtcatgttgctgaattttccgggttccactaaattaattgctaggttaaagcagcaaatgaactacaaggaaatggcaagtcagaggcttacccaatccatgttgcctcatcgtagtaggttaattggtgctggcccttgcaacagatgtgtccacccagaacctgtgattgtgaccttatttggacaaaaggtttttgcacgtataattaagaaaaatcaaacctgccttctgtgcagtcagatctggtgtgcccattaccagcagggttggatatgtgcctggttggctggttttgggaaaatctacattttttccaccattggagtaatagatacactcagcagcggccacatccacctccagccaaactgtacagcacgtgactcagcatcctgggaatctccggcctag

SEQ ID NO: 123916 - DNA, 771 bp, Homo sapiens
atgtggagactagtcatccaggacgcaaaagatgaaaatggagttttagtgggtaatagggtcttagcacactcctctctagcggttctctcctgtctggcgcttaacaaccgaagaataagtggatggaccccggtggcccctcgggcagccctccaggattcatgggccgcagaggaacgtcaacccccttcccactggctgataatgccccgaggggcagccccccaggtgcccatgtggttgagcgagtggatgcgcgtcttccccggcagagtgcaggatgccggcgacacatttgcctgggaacagtgggagggtcccctttcctccggggccggtgaactactcgcctctccgcctgcaggctccggagcaggtgaccggatcttcccttggcccttctcccgccggttctcggaccactccctctggaaggaagtctctccgcccttcctcttcctccccgcccccgtcccgctggtgtggctgcaggctcgagctggggtcactcggcggccagtgtgcgcaggtctcctggtcgccggccagagggcgaaagcattcacccgaggcccccagcttcgcggctgccttggctgcgagcaacgagggaagaggaggcaggcgctccaaaactgggcgaagattcctatcctaatttctaactcgagcctcccaccgtcagtgcgcttaatggcgctgctggccggatggataatcgagctctctggagggacagacgcggccgccatccctaataaatcgtga

SEQ ID NO: 123917 - DNA, 781 bp, Homo sapiens
attcatgggccgcagaggaacgtcaacccccttcccactggctgataatgccccgaggggcagccccccaggtgcccatgtggttggtgggtgggatccagatctccgcagagcccctgttacaggtttctcttgttcggggtcttgtagccagagaggggcggctgactgggagtccttcccgcgttcccctccctgcagagcgagtggatgcgcgtcttccccggcagagtgcaggatgccggcgacacatttgcctgggaacagtgggagggtcccctttcctccggggccggtgaactactcgcctctccgcctgcaggctccggagcaggtgaccggatcttcccttggcccttctcccgccggttctcggaccactccctctggaaggaagtctctccgcccttcctcttcctccccgcccccgtcccgctggtgtggctgcaggctcgagctggggtcactcggcggccagtgtgcgcaggtctcctggtcgccggccagagggcgaaagcattcacccgaggcccccagcttcgcggctgccttggctgcgagcaacgagggaagaggaggcaggcgctccaaaactgggcgaagattcctatcctaatttctaactcgagcctcccaccgtcagtgcgcttaatggcgctgctggccggatggataatcgagctctctggagggacagacgcggccgccatccctaataaatcgtgaataacgaatgagggaaccaaaaaaaaaaaaaaaaaaaaaaaaaaagtcgtatcga

SEQ ID NO: 123918 - DNA, 415 bp, Homo sapiens
  misc_feature (1)...(415): n = a,t,c or g
ngtgttgtgggacgcactacatcagagaccagactggacgagatagctagagacttgggccggatagctgcggtgccaatcccccctggggggccttgttcaacttttctgcttgcagcctcatcttccccttcggagtccacaataaggacatattcagctttgaagaggtcactttgctgcatcccttgaagtttgtttgcttcgaattccctttcttgtaaaatcgttccactgacctctgaaggacaagtcaatttcgcttggtctctctcttgttggctcccagcattcaaggtcaagtagtcattggatttagacgtcagtttctcctctaaattcttgtttaataagcttcttttttcacgcttttcaagttccatattgaaagagaatgagaaagagagaaagactg

SEQ ID NO: 123919 - DNA, 373 bp, Homo sapiens
gcttttgcagcaatccctacaaacacattgcttttggaacagaaggcactagatgaaccagccgagactgaaagtgtctccaaggacaacacattataaccaccagtggagactcctacaactcttccaagagcagctggtcgagaaaccaaatatgcaaatctctcctcaccaacttctacagtatctgagagtcagctgactaagcctggagtaattcgcccagtacctgtaaaatccagaatattactgaaaaaagaggaggaagtctatgaacccaaccctttcagtaaatacttggaagataacagcgacctcttttctgaacaggatgtaacagtccctcccaagcctgtctcgctccatcctttat

SEQ ID NO: 123920 - DNA, 459 bp, Homo sapiens
  misc_feature (1)...(459): n = a,t,c or g
agcaaacaaacttcaagggatgcagcaaagtgacctcttcaaagctgaatatgtccttattgtggactccgangggaagatgaggctgcaanagaaaagttgaacaaggccccccaggggacttnggcaccgcagctgtccggcccaagtctctagctatctcgtncagtctggtctctgatgtagtgcgtccaaaacacaggggactgatctcaagacctcatcacatcctgaaatgcttcatgggatggcccctcagcaaaagcatgggcagcaatacaagaccaagtcaagctacaaggcttttgcaagcattccctacaaacacattgcttttggaacagaagactccctacaactcttccaagagcagctggtcgagaaaccaaatatgcaaatctctcctcaccaacttctacagtatctgagagtcaagctgactaagccctggangtaatt

SEQ ID NO: 123921 - DNA, 472 bp, Homo sapiens
cccttgaagttggtttgcttcgaattccctttcttgtaaaaatcgttcccctgacctctgaaggacaagtcaatttcgcttggtctctctcttgttggctcccagcattcaaggtcaagtagtcattggatttagacctatttacagtttctggactcttatcacttgattcttctggaattttaacaaggaatttagaggtgtcagccaactgagtatgggttggtagtcttctgacagtggggacaaatgtgaagatcagaggtttggcttcagaaccaccagcagagaccgtcagtttctcctctaaattcttgtttaataagcttcttttttcacgcttttcaagttccatattgaaagagaatgagaaagagagaaagaatgagagacacagaggatcaaattctgtatagaaaatgattcgacgtgcttacacggacgcgtgggtcgacccgaaatatacgtgtcg

SEQ ID NO: 123922 - DNA, 1625 bp, Homo sapiens
cacagtcaaaactcctacaactcttccaagagcagctggtcgagaaaccaaatatgcaaatctctcctcaccaacttctacagtatctgagagtcagctgactaagcctggagtaattcgcccagtacctgtaaaatccagaatattactgaacaacgaggaggaagtctatgaacccaaccctttcaggtaaatacttggaagataacagcgacctcttttctgaacaggcactagatgaaccagccaagactgaaagtgtctccaaggacaacacattagaaccaccagtggagctctattttcctgcacagctcaggcagcaaactgaagagctctgtgctaccattgataaggtcttacaggattccttgtctatggcgccctccctctctcctacaaaacaggctagtagcagccttgcttacatgaatgtagagagaacaccatcacctactttgaagagcaataccatgctctccctgctacaaaccagtacatccagttctgtgggtcttcctcctgttccaccaagctcttctctttcctctttgaagagtaaacaggatggtgacctcaggggtccagaaaaccccagaaacattcacacgtacccttctacattagcctcctctgcattatcttctctatctcctcctattaatcaaagagctacgttctcttcttcagagaaatgtttccatccttccccagctctttcaagcctgataaacagatctaaaagagcatcatcccaactatctggccaggagctgaatccttcagctcttccttcactccctgtctccagtgctgactttgcctctcttcccaacttgaggtcctcctctctccctcatgccaatctgcccaccctggtgccccagctcagtccctcagctctgcacccacattgcggaagtggtaccttgccttcaagacttgggaaatctgaaagcaccacccccaaccacaggtcacctgtttcaaccccatcactttccatatctctaacaaggacagaggagctgatttcaccttgtgcattgtcaatgtcaacaggcccaaaaaataagaaatcaaagactcctacaactcttccaagagcagctggtcgagaaaccaaatattctaaatccaatgactacttgaccttgaatgctgggagccaacaagagagagaccaagcgaaattgacttgtccttcagaggtcagtggaacgattttacaagaaagggaattcgaagcaaacaaacttcaagggatgcagcaaagtgacctcttcaaagctgaatatgtccttattgtggactccgaaggggaagatgaggctgcaagcagaaaagttgaacaaggccccccaggggggattggcaccgcagctgtccggcccaagtctctagctatctcgtccagtctggtctctgatgtagtgcgtcccaaaacacaggggactgatctcaagacctcatcacatcctgaaatgcttcatgggatggcccctcagcaaaagcatgggcaggcttctgcatacaaaggggaggaatccaatgaagaagattggacgattttgaagagcagtagaatgaccaatcccagaaagcttagtgataataagatctaa

SEQ ID NO: 123923 - DNA, 765 bp, Homo sapiens
agcgagatagccaggcccctctatactctaatcaaggagacccggagggcaaatactcatctagtagaatgggaaccagaggcagaaacagccttcaaaaccttaaagcaggccctagtacaagctccagctttaagccttcccacaggacaaaacttctttttatacatcacagagagagcagggatagctcttggaatccttactcagactcgtgagacaaccccacaaccagtggcatacctaagtaaagaagttgatgtagtagcaaaagtctggcttcactgtttaagggatggggaaccaatcaagcatgactgccaacaaattatagtccagatttatgccgcccgagatgatctcttagaagtccccttagctaatcctgaccttaacctatatattgatggaagttcatttgtggagaatgggatacgaagggcaggttatgccatagttagtgatgtaactgtacttgaaaactctttggcagcagtgactctccaaaaccgccaaggcctagacctcctcactgctgagaaaggaggactctgcaccttctcagggaaagagtgttgtttttacactaaccagtcagggataagttcccctctggaggacactacaactgcagggccctttcttcaccccatccagcaggaagtagctagagctatcatcggccaattcccaacagcatttggggtgtcctgtttagaggggagattgagaggtgaagccagctggacttcctgggtcgagtag

SEQ ID NO: 123924 - DNA, 540 bp, Homo sapiens
atggccagaccactctatactctaatcaaggagacccagaaggcaaatactcatctagtagaatgggaaccagaggcagaaacagccttcaaaaccttaaagcaggccctagtagaagctccatccttaagccttcccacaggacaaaacttctctttatacgtcacagagagagcaggaatagctcttggagtccttactcaaactcgtgggacaaccccacaaccagtggcatacgagccgggcgatcagaagatccagatcaagagccagagggtggagctggtggagagcctcacgcggcaggtagacagccacgtggagccgttccacccgcagcaggagcagggcgacgcagcgcgacggcggcaagacctccccatcgaccccagcgagccctcctactgggagatgatccgctgcgacaacgaatgccccatcgagtggttccgcttctcgtgtgtgagtctcaaccataaaccaaagcgcaagtggtactgttccagatgccggggaaagaacgatgggcaaagcccttga

SEQ ID NO: 123925 - DNA, 681 bp, Homo sapiens
tcagattccaggaatacatctcagttgtgacagccaatctctaaacgtcgctaaatgcccctggggctcaaaaatcttgcccagttgagaatcagtgcatttccgtaacctctcgtagtctgacacagttttctgccagatgttacatttatcctgctgattggtccattttagagagagccgattggtctgttttacagagcgctgaatggtctgttttgacagggtgctgactggtgcatttacaatccctgagctagacaaagaggttctccacatccccactagattagctacatagagagtgtcgattggtgtatttacaaatcctgagctatcaggatcatctgaaaacttccccaggtctgccttgatctgctttaaatcagagagggagaaggggacatgcacctgggttgggccaagttctctgccccctacagcttgaaggggacataaccgattgccatcatcacctttactttttaaatgggtttggttttgcttcatgttgggaagcttggttcctcctggctgaggaatggtagccaggaaactgctggtcaaatcatcagccctttgtcctcctggcatgacacaggagctggtgctgccctcgatttctcgccgggccttagctgcctccccgtgcggtagggctccagacgtgcagccccccat

SEQ ID NO: 123926 - DNA, 527 bp, Homo sapiens
tttcgtgctcagaggacggcggccacggaagcggcctttgggtttggtggcgcacagaggggtgcggagcgggcggaagaggcgtctgtgtcgcagcttggtctcagaggagcatcgctggggaatttttctaagcactttaaatttttacttagctgtgtttatgggaagtgattttctatgtgtactcccctcccccaactaactctcattccttctttatatgatagaacaacgactatcgtctattccacaagatgagtaacagccaccctcttcgcccctttactgcagggggggaaattgatcatgtgcacattttgtctgaacatattggtgccttgttgattggggaagaatatggcgacgtcacattcgtggtggaaaagaaacgttttcctgcccacagggtaattttagcagccaggtgccaatattttcgagcattattatatggtggaatgcgagagtctcagcctgaagcagaaattcctctccaagacaccactgcagaagcattcacaatg

SEQ ID NO: 123927 - DNA, 2868 bp, Homo sapiens
atgcttcctgccttcgaacatcagaccccaagttcttcagcttttggactcttgaacctacagcagtggtttgtcaggggctctcgggcctttggccacagactgaaggctgcgctgtcgggttccctacttttgaagttttcagactcggactggcttccttgctcctcagcttgcagagggcctattgtgggacttcaccttgtgatcgtctatgtcaagtctcaccagaacgcttaccgccataaaaacatccaacttaagcagactttgctgagctgtaacaccacaaaggtccgcagcttcattattgaagtcagtgagaccaggaacccaccagcaggaacaaactccggacacatcttggggacttgtccaggatatcgctatgcgaaaggcaaagaaacaggcaaagaaatcatcaagggaccacaaaaccccccaggctatcggttatgtccccttcaagctgtagggggaggggaatttggcccaacccaggtgcatgtccccttttctctctctgatttaaagcagatcagggtagacctggggaagttttcagatgatcctgataggcaatatcccttaaggcctgaagctcatgaaggattacaggatattctcagatatttaaaagttcaagggttagtaagaaaatgcagcagtccctgcaatacccgaattctaggagtacaaaaaccaaaaggtcagtggagactagtgcaagatcttagattcatcaatgaggcagtaattcctctacattcagttgtacccaactcctataccctgctctctcaaataccagaggaagtggaatggttcactgttttggacctgaaggatgccttcttctgcattcccctgcactctgtctgccagtttctctttgcctttgaggatcccacagaccacacgtcccaatttacatggacggttttgcctcaagggtttagggatagccctcatctgtttggtcagatattggcccaagatctaggccacttctcaagtccaggcactctggtccttcagtatgtggatgatttacttttggctaccagtttggaagcctcatgccagcaggctactctagatctcctgaaccttctagctaatcaagggtacaaagcatctaaaccgaaggcccagctctgcctacaacaagtcaaatatctagacctaagcttagccagagtaaccagggccctcagcaaagaacgaatacagcctatactggcttgtcctcgccctaagacattaaaacagttgcgggggttccttgggatcaccaacttttgccaactatggatccctggatacagtgagatggccaggccactctatactctaatcaaggagacccagagggcaaatagtcatctagtagaaagggaacgagaggcagaaacagccttcaaaaccttaaagcaggccctagtacaagctctagccttaagccttcccacaggacaaaacttctctttatatgccagagagagagcaggaatagctcttggaatccttactcagactcacgggacaaccccacaaccagtgacatacctaaggaaattgatatattcatttgtggagaatgggatgcgaagggcaggttatgccatagttagtgatgtaacagtacctgaaagcaagccccttcccccagggaccagcacccagttagcagaactagtggtgcttacccaagccttagaactgagaaagaaaaaaagaataaatgtgaacacagatagcaagtacgcttatctaatcctacatgcccatgctgcaatatggaaagaaagggagttcctaacatctgggggaacccccaataaataccacaaggaaatcatggagttactgcatgctgtacaaaaacccaaggaggtggcagtcataccctgccaaagccatcaaaaaggtgaagagaaaaggcagaaggaaaccgtcgggcagatgctgagggccaaaattgctgccaggcggaacctcccaacagaaatacctatggaaggacccttggtatggaacaaccctgtccaagagattaagccccagtattccctgaccaaaacagaatggggactttcacaggggcatagttttctccccctggggtggttaacgacattagaggggaaggctggtagagccaccccgaatccccgaaacgtctacttcccactacaccttcgtggactgcgaacgggacggctaccgctctcccagagcacccgggcccaagaaatgaccctcgtcaggccccgtcccagctcctccccgcccccggaaaaagcggcggaggggcgggggcggcgatgctcctctgagaccaagctgcgacacagacgcctcttccgcccgctccgcacccctctctgcgccaccgcccccttggccgcttccgtggccgccgtcctcgccgccgccccggctgctgcggcgcgcgtccgctttcacgcactccgccgtggccgcgcacgcgccactgcgcgctggcgtcacttagcaaccgatcgacagcgggctgctgggtccggcgatgcaggcccagaaagtcgcctaaggcagcttccgcggctttttcgcatcggcccgaccctctgcccctccagaacagggggccccagggtgtggctgccctgccggcacctggctccggtcaccacacgtcactgtatggcgtcaccggcgcacgtcactacggatgagaaggtcctgggcgcctgtggagtgacctcgtccagaccgccgcagacccgatcggcaagttcttggaggtgcaggaaggttctccaaggagtaggaccagaaagggatgagagcgcgagcgcggttaatgtcgaggctgctaagtga

SEQ ID NO: 123928 - DNA, 340 bp, Homo sapiens
ggcacgagggcaaatcagggcccatgacgggggtggttctggtggctgttggggaggtggctatgaagatcctgcttctctgcctctgcctcatcctcctcagagtgaggtcttgcaggaggaaggcagcaagggcagcattgggcatggaggctgcagacgctgtcacggactaatctccagactccagactgcttccagatgcctcctcatccagttcctccacagtctgagcggccgtgtttcctctgcaggctttgcatggtctgtcccctgctggactctcctgatccctcctttccctgtcacccaacatctccccaaaccctacgggccaagg

SEQ ID NO: 123929 - DNA, 1302 bp, Homo sapiens
atgtgcattaatgttggtgctggctgcaatgggctggacaagacagcctttggacccacagttggcacttgcaggaccttcggctcctcagtgctcacgatcaccccatggccccaggaccacagcaccaacctcacctggcaggtgaagttccctggagctggtgtgactacagagagaaccatccagctcagtgtctcctactccagactccgtttccagatgcctcctcatccagttcctccacagtctgagcagccgtgtttcctctctggtgctggagaacaaggggaaaatgccacagcctggaatggaggccttgcacagtctgttcctggccagactctccacccaaagtctctgcaggccaagccctctgtggctctgagactttgcccctcacccagacacctgacatccaagtcccagcaactctggaatctggccatcctgcgaacctgctacgtgtcagcagcctggaaaagcagaaagtcactcatcttttcctggacatggggaactgtcatctccctgggccctaggacccctcacttctcagagatcaccatcatcccacttccctggagccacggctccagtatcaccttccaagtgactttcccaaggtttcatgtgaccacagagatgaccatccaactcaatgtctcctcacctgtagccttggagaatgccacctccctgtcagtcctgaagaaccaatccctgcgttttgtttatgtgactgacagcaacccacctgccaggctgagctggacctgggaaggccaagccctgaatctctcccagtcgtcagaatcagccgtcctggagctgcccccagtggagtcttgtgatggaggggaatttgtctgccaagctcagcaccctttgggctcccagcatgtctccattagcctctctgtgcagagtgactccgttatctctatagaagaaggcgttttacagaccctgggtttcacactgattaggggaatcctcatggggaccagctgcacattcatctgtggattcacctggatctgctgcactagcccagtcattcctaaaccagggacacagtcctgcttcagcaccagggacagcgccactctccctgatgcctgtggctcgccaggaccaaaacgtgtctggatgtgcagcgagagccaccagcctctttgcgcggtccctgatgaagatgagcaggagctccactacgctgtcctacacttccacaaggtgcaacctcaggaaccaaaggtcaccgacactgagtactcagaaatcaagatacacaagtga

SEQ ID NO: 123930 - DNA, 386 bp, Homo sapiens
  misc_feature (1)...(386): n = a,t,c or g
ccgctcaccaggccctggcgacctgagcatctacgacaactggatccggtacttcaaccgcagcagcccggtgtacggcctggtccccagggcctctggtgactgcagtggagaagtttgaggcagaagctgcagccttgggccaacgcatatcaacactgcagaagggcagccctgaccccctgcaggtccggatgctcaatgaccagttgatgctcttggaacggacctttctgaaccctagagccttcccagaggaacgctactacagccatgtgctctgggcacctcgcacgggctccgtagtcacattcccgggcctatccaatgcctgctccagggccagggacacagcttctggatctgaagcttgggctgagggccan

SEQ ID NO: 123931 - DNA, 825 bp, Homo sapiens
ctacacagtgtccagtctggaccatggagtgagcaactcgggctccttcaaaggagcacactccagcagcgtcttcaggctgatcttgatgatgccggtcagcaccgacaccttgttgaactccacagggctgaacacatcaatacgttcagagaatagcttctggatattgctcaagaggttggtgtccatcggggcacagccagacttgggggtatagctgggggcgtagcggccctgctgccgagagctgctgtacacggagaaagtcctcttgctggagtcgctgctctgggccttgcgaacaccctcttcgtacaggagccccaccttgccgcaggcttcagcagccatcaggctgtggcccggacagcggggagtgtgattctccggctcagtgacagcttcttcctgcccttcaaagtcagtgactacagtgagacactccgcagcttccttcctccaacagcccttcataagtaatgtttcaagggccactttgatgaagaaagtctttttctctttttcctccattccaactctgtgtcctaatctgaactccagatcgttccctgtcttcatgagctcttcacctttgtgcacagctgcacttttgtccaagtcagaaccctgggagagcagctcaggaggcatcaggacgaccgtgtagtgaaagctcatgtggtcatagtggtaggtgatgcagaagttgtgcacgtctctgatgaagatgcccaggtgtaagaagaagagcatcagcgcagccgtggtgagcatcatgccttttgggaagaagaacgtggcgatgcggtcttgcagccgcat

SEQ ID NO: 123932 - DNA, 433 bp, Homo sapiens
ctggggcaagcctcgtaaggactggaccacgggtgggcaggagaccggtggagaacccgccctgttgttggggctggggagggccgcgcaccgagactaaattctccttccggccagatccgctcaccaggccctggcgacctgagcatctacgacaactggatccggtacttcaaccgcagcagcccggtgtacggcctggtccccaggcttcagcagccatcaggctgtggcccggacagcggggagtgtgattctccggctcagtgacagcttcttcctgcccctcaaagtcagtgactacagtgagacactccgcagcttcctgcaggcagcccagcaagatcttggggccctgctggagcagcacagcatcagcctggggcctctggtgactgcagtggagaagtttgaggcaaaagctgcagccttg

SEQ ID NO: 123933 - DNA, 999 bp, Homo sapiens
atggcactttcaaaagagagaagtacagtaacccgaacacagtgggcaagaaagacaatgctacaaggtgagactatacagataagtgagtcagtcagcacatatctgagaccctacagtgtatcaggcactgttctgggcactaatatgagcaagacttcagccaggatctaccccacctaccacacagcctttgacacctttgactatgtggacaagtttttggacccgggcttcagcagccatcaggctgtggcccggacagcggggagtgtgattctccggctcagtgacagcttcttcctgcccctcaaagtcagtgactacagtgagacactccgcagcttcctgcaggcagcccagcaagatcttggggccctgctggagcagcacagcatcagcctggggcctctggtgactgcagtggagaagtttgaggcagaagctgcagccttgggccaacgcatatcaacactgcagaagggcagccctgaccatgtgctctgggcacctcgcacgggctccgtagtcacattcccgggcctatccaatgcctgctccagggccagggacacagcttctggatctgaagcttgggctgaggtccagagacagctcagcattgtggtgacagccctggagggctcggtggaagccctgcatgaggttctacagctgcctgctgccctgcgcgcctgcccgcccctccgcaaggccttggcggtagatgctgccttccgagagggcaatgctgcccgcctgttccgtctgctccagaccctgccctacctgccaagttgcgctgtgcagtgccatgtgggccatgcccgccgggaagccctggcccgcttcgctcgtgcctttagcacccccaagggccagaccttgcctctgggcttcatggtcaacctcttggcctggatggactcagggaagcacgggacctgtgccaggcccacgggctgcccttggacggagaggagagagttgtgttcctga

SEQ ID NO: 123934 - DNA, 747 bp, Homo sapiens
atgcctcctgagctgctctcccagggttctgacttggacaaaagtgcagctgtgcacaaaggtgaagagctcatgaagacagggaacgatctggagttcagattaggacacagagttggaatggaggaaaaagagaaaaagactttcttcatcaaagtggcccttgaaacattacttatgaagggctgttggaggaagagcaagacttcagccaggatctaccccacctaccacacagcctttgacacctttgactatgtggacaagtttttggacccgggcttcagcagccatcaggctgtggcccggacagcggggagtgtgattctccggctcagtgacagcttcttcctgcccctcaaagtcagtgactacagtgagacactccgcagcttcctgcaggcagcccagcaagatcttggggccctgctggagcagcacagcatcagcctgggtatgcacagccctgaccctgaggtccggatgctcaatgaccagttgatgctcttggaacggacctttctgaaccctagagccttcccagaggaacgctactacagccatgtgctctgggcacctcgcacgggctccgtagtcacattcccgggcctatccaatgcctgctccagggccagggacacagcttctggatctgaagcttgggctgaggtccagagacagctcagcattgtggtgacagccctggagggtgcggcagccaccctgaggcctgtggctgacctctga

SEQ ID NO: 123935 - DNA, 2689 bp, Homo sapiens
gccaagagtccgcaggatgcagtggacgaaggtgttggggctggggctgggggctgctgccctcttggggctggggatcatcctcggccactttgccatccccaaaaaagccaactcactggccccccaggacctggacctggagatcctggagaccgtcatggggcagctggatgcccacaggatccgggagaacctcagagaactctccagggagccacacctggcctccagccctcgggatgaggacctggtgcagctgctgctgcagcgctggaaggacccagagtcaggcctggactcggccgaggcctccacgtacgaagtgctgctgtccttccctagccaggagcagcccaacgtcgtggacatcgtgggccccactgggggcatcatccactcctgccaccggactgaggagaacgtgaccggggagcaaggggggccagatgtggtacaaccctatgctgcctatgctccttctggaaccccacagggcctcctcgtctatgccaaccggggcgcggaagaagactttaaggagctacagactcagggcatcaaacttgaaggcaccattgccctgactcgatatgggggtgtagggcgtggggccaaggctgtgaacgctgccaagcacggggtagctggggtgctggtgtacacagaccctgccgacatcaacgatgggctgagctcacccgacgaaacctttcccaactcctggtacctgcccccctcaggagtggagcgaggctcctactacgagtattttggggaccctctgactccctaccttccagccgtcccctcttccttccgcgtggaccttgccaatgtctccggatttcccccaattcctacacagcccattggcttccaggatgcaagagacctgctctgtaacctcaacggaactttggccccagccacctggcagggagcactgggctgccactacaggttgggtcccggcttccggcctgacggagacttcccagcagacagccaggtgaatgtgagcgtctacaaccgcctggagctgaggaactcttccaacgtcctgggcatcatccgtggggctgtggagcctgatcgctacgtgctgtatgggaaccaccgagacagctgggtgcacggggctgtggaccccagcagtggcaccgccgtcctcctggagctctcccgtgtcctggggaccctgctgaagaagggcacctggcgtcctcgcagatcaatcgtgtttgcgagctggggggctgaggagtttgggctcattggctccacggaattcacagaagagttcttcaacaagctgcaggagcgcacggtggcctacatcaacgtggacatctcggtgtttgccaacgctacccttagggtgcaggggacgccccctgtccagagcgtcgtcttctctgcaaccaaagagatccgctcaccaggccctggcgacctgagcatctacgacaactggatccggtacttcaaccgcagcagcccggtgtacggcctggtccccagcttgggttctctgggtgctggcagcgactatgcacccttcgttcacttcctgggcatctcctccatggacattgcctatacctatgaccggagcaagacttcagccaggatctaccccacctaccacacagcctttgacacctttgactatgtggacaagtttttggacccgggcttcagcagccatcaggctgtggcccggacagcggggagtgtgattctccggctcagtgacagcttcttcctgcccctcaaagtcagtgactacagtgagacactccgcagcttcctgcaggcagcccagcaagatcttggggccctgctggagcagcacagcatcagcctggggcctctggtgactgcagtggagaagtttgaggcagaagctgcagccttgggccaacgcatatcaacactgcagaagggcagccctgaccccctgcaggtccggatgctcaatgaccagttgatgctcttggaacggacctttctgaaccctagagccttcccagaggaacgctactacagccatgtgctctgggcaccttcgcacgggctccgtagtcacattcccgggcctatccaatgcctgctccagggccagggacacagcttctggatctgaagcttgggctgaggtccagagacagctcagcattgtggtgacagccctggagggtgcggcagccaccctgaggcctgtggctgacctctgaccccagccctctttcttcagccctccctttactccaaccctctcctgcctgctttcctgagatgtcctggtcttccttggtgccagaagagggcactaccacaggaccctctcaagcttctcaggcaacagcttgaggtccctgaggggagtggcaagccctaatgcaactcaccctcatcctggtgcttaagtggcaaagggtgggcagcaggggacagggatgggatggcaaaaccaccaactgcccttggtggcaggtgggtggagatgggatgcgtgccaacctcagatgccaactcaggtcatcaaggccaaggaccagtggcgaaagtgagtcttggggtaccttaggccttggctagtctgcgttcctctccctgcatgctgtgtatcctaactccctacaacagcccctcaaataaatcacatctagtgactggtaccaac

SEQ ID NO: 123936 - DNA, 1965 bp, Homo sapiens; identical to SEQ ID NO: 121511

SEQ ID NO: 123937 - DNA, 375 bp, Homo sapiens
atggaatactatgcagccttaaaaaaggatgagttcatgtcctttgtagggacatggatgaagctggaaaccatcattctgagcaaagtgttgccaaggacagaaagtcaaacaccacatgttctcactcacaggagccctcctcgtaaggggaccctgggcctgaactccaaaacctgggtttcactttgcatggggaccagtgtgatggttaattttatgggtcaacttgaccgggccacagagtgcctagatatttggtcaaacattattctggtggttctgtgctggtatccacagctgaaagacctgaagatgtattacatcacaggactctttgccgacacttcccagtaccagtctggagtccagtag

SEQ ID NO: 123938 - DNA, 381 bp, Homo sapiens
atggaatactatgcagccataaaaaaggatgagttcatgttctttgtagggacatggatgaaggtggaagccatcattctgagcaaacttttgcaaggacagaaaaccaaacacagcattttctcactcatagccctttctgaattcgcctggactcccagtcgcgctcgctggccgacgcggtcgattcaccagacagcgagtgggcgtgagaacgcagctcttcggccgcttccccagtacgtggatcccggagcgcggcttttttacctgggagctgttcttacccggccacgcttagcagatgccaaaagccagaccctgcacgactcagtcatgagacagagggagagacctggcgggtgcccactccacctttag

SEQ ID NO: 123939 - DNA, 684 bp, Homo sapiens
atggaatactatgcagccataaaaaatgatgagttcatgtcctttgtagggacatggatgaagctggaaaccatcattctcagcaaactgtcgcaaggacaaaaaaccaaacaccacatattctcactcatagaagctcaagcccaggtgtcgccgccacccccttaccctgcaccccaggagctcacccagcccctcctgcagcagccccgcgcccctgaggcccctgcccagcagccccaggcagcctcctcactgccacagtcagactttcagcttctcccggcccagggctcatctttgaccaacttcttcccagatgtgggttttgaccagcagtccatgaggccaggccctgcctttcctcaacagttacctgcggtcaaccaccatctaaaaatagagtctgctggtcagcagcacgcggtggactggatgccccgtagcggctactgcaaggaagcgagggaacgccaaggggtgctcgttacaggtgacagcccctgtccgggtagcattcgcatctcctcggaacaccagccccatgagatgttccagacaaaagattcaggggacagtttgagaagtgctgactaccacgccgacctcttggaaatgggctggcgtttcaaagatttgaagaagtccttcagtgcagacatgtcttcactgtttctccagtag

SEQ ID NO: 123940 - DNA, 3177 bp, Homo sapiens
atggaatactatgcagccataaaaaatgatgagttcatgtccttcgtagggacatggatgaagctggaaaccatcattctcagcaaactactgcaaggacaaaaaaccaaacaccgcatgttctcactcataggttctattattgtcaaggtcccatcttcacttcaagctcatttacagttatcagggaaagaggttgatgtgaactcagaagtccatgttcaggaaatggctgaagctcgtaaagatgatgttgtaacagtgactgatgcagaaaaagcattagacaaaatccagcatctctttatggttaaaactctcagcaaaatcggcatacaagggacatacctcaatgtaataaaagccatctatgacaaacccacagctaacataatactgaatggggaaaagttgaaagcattccctctgagaaatgaaacaagacaaggatgccctctctcaccactcctcttcaacacagtactgaaagtcctagccagagcagtcagacaagagaaggaaataaagggtatccaaattggtaaagaggaagtcatactgtcactgtttgcagatgacatgattgtacatctagaaaaccccattgtctcagcccaaaatctccttaagctgatagacaatttcagcaaagtctcaggatacaaaatcaatgtgcaaaaatcacaagcattcttatacaccaataacagacaaacagagagccaaatcatgagtgaactcccattcacaattgcttcagagagaataaaatacctaggaatacaacttacaagggacgtgaaggacctcttcaaggagaactacaaaccactgctcaatgacataaaagaggatacaaacaaatggaagaacactccacgctcatgggtaggaagaatcaatatcatgaaaatggccatactgcccaaggtaatttatagattcaatgccatccccatcaagctaccaatgactttcttcacagaattggaaaaaactactttaaagttcatatggaaccaaaaaggagcccgcattgccaagtcaatcctaatttatagattcaatgcccaagaattggaaaaaactactttaaagttcatatggaaccaaaaaggagcccgcattgccaagtcaatcctaagccaaaagaacaaagctggaggcatcacgctacctgacttcaaactatactacaaggctacagtaatcaaaacagcatggtactggtaccaaaacagagatatagaccaatggaacagaacagagccctcagaaataatgccacatatctacaaccatctgatctttgacaaacctgacaaaaacaagaaatggggaaatgattccctatttaataaatggtgctgggaaaactggctagccatatgtagaaagctgaaactggatcccttccttataccttatacaaaaattaattcaagatggattaaagacttaaatgttagacctaaaaccataaaaaccctagaagaaaacctaggcaataccattcaggacatagccatgggcaaggactttatgtctaaaacaccaaaagcaatggcaacaaaagccaaaattgacaaatgggatctaattaatctaaagagcttctgcacagcaaaagaaaccaccatcagagtgaacaggcaacctatagaatgggagaaaatttttgcaatctactcatctgacaaagggcgaatatccagaatctacaatgaactcaaacaaatttacaagaaaaaaacaaacaaccccatcaaaaagtgggcaaaggatatgaacagacacttctcaaaagaagacatttatgcagccaaaagacacatgaaaaaatgctcatcatcactggccattagagaaatgcatatcaaaaccacaatgagacaccatctcacatcagttagaatggcgatcattaaaaagttaggaaacgactggtgctggaggggatgtggagaaataggaagacttttacactgttggtgggactgtaaactagttcaaccattgtggaagtcagtgtggcgattcctcagggatctagaactagaaacaccatttgacccagccagcccattactgggtatacacccaaaggattatagatcatgctgctataaagacacatgcaccacacgtgtttattgaggcactattcacaatagcaaagacttggaaccaacccaaatgtccatcaatgagagactggattaagaaaatgtggcacatatacaccatggaatactatgcagccataaaaaaggatgagttcatgtcctttgtaggggacatggatgaagctggaaaccatcattctgagcaaactaaccaaactaaccacaggaacagaaaaccaaacaccgcatgttctcactcatagtattggaagttctggccagggcaatcaggcaagagaaagaaataaagggtattcaattaggaaaagaggaagtcaaattgtccctgtttgcagatgacatgattgtatatttagaaaaccccatcatgtcagccccaaatctccttaagctgataagcaacttcagcaaagtctcaggatacaaaatcaacgtgcaaaaatcacaagcattcctatataccaatatcagacaaatagagagccaaatcatgagtgaactcccattcacaattgctacaaagagaataaaatacctaggaatccaactttcaaggaatgtgaaagagctcttcaaggagaactacaaaccactgctcaaggaaataaaagaggacacaaacgattggaagaacattccatgctcatggataggaagagtcaacattgtgaaaatggccatgctgcccaaagtaatttatagattcagtgctatccccatcaagttaccaatgactttcttcacagaattggaaaaaactactttaaagttcatatggaaccaaaaaagagcctgcattgccaagacaatcctaagcaaaaagaacaaagctggaggcatcacgctacctgacttcaaactatactgcaaggctacagtaaccaaaacagcatggtactgggtaccaaaacagatatatagaccaatggaacagaacagagacctcagaaataataccacacatctacaaccatctgatctttcacaaacccgacaaaaacaagcaacgaggaaaggattccctatttaa

SEQ ID NO: 123941 - DNA, 384 bp, Homo sapiens
atgtatgttcatgtctttgaccttgcactacgccaatgtaggctccaggcagatattcgaggtgcctttgaaaagctccagggcactgtggccagggttcacattggccaagttatcatgtccatctgcaacaagctgcagaataaggagcatgtgattgaatccctgctcagggccaagttcaagttccctggctgccagaagatccacatttcaaagaagtggggcttcaccaagttcactgcggatgaatttgaagacatggtggctgaaaagcggctcatcgcagatgactgtggggtcaagtacatccccatcatggccctctggacaagtggcgtgccctgccctcgtgagggcttccactgtgctgccccctcttaa

SEQ ID NO: 123942 - DNA, 573 bp, Homo sapiens
ttttttttttttttcttccggtggctggtctccggcggccccgtccccgactgggccccgtgcctccccgcccccgcgtccccccgccgcaagaccgagccgccaccatgaagaaattctttcaggagttcaaggccgacatcaagttcaagagcgcgggacccggtcagaagctcaaagagtccgtgggggaaaaggcccacaaagagaagcccaaccagccagcccccaggccgccccgccagggacccaccaatgagggcacagatggcagccgctgctgccctcagcccggctggagcagaagcagtcccgggcctggggcccccacatcgcaggacaccatccgaaaccaggtgagaaaggaacttcaagccgaagccaccgtcagcgggagccccgaggccccagggaccaacgtggtatctgagcccagagaggaaggctctgcccacctggctgtgcctggcgtgtacttcacctgtccgctcactggggccaccctgaggaaggaccagcgggacgcctgcatcaaggaggccattctcttgcacttctccaccgacccagtgg

SEQ ID NO: 123943 - DNA, 1479 bp, Homo sapiens
atgaagaaattctttcaggagttcaaggccgacatcaagttcaagagcgcgggacccggtcagaagctcaaagagtccgtgggggtttggggaagaccaaatgggttgatgtcagtcaaggggaactgtgaatgtgggaacctgtggcttctgtacccagaggtggcggcactggcggctgaggctgaaggccctgaagtgggttcggtggaggatcagaggagacagcagggctactttgtgcgcctcggctccctgtcagcacggatccgccacctggcctacgagcactctgtggggaaactgaggcagagcaaacaccgtgcccaggacaccctggcccagctgcaggagacgctggagctggtagaccacatgccgtgtggggtgacccccaccgccccggcccggcctgggaaggtgcacgagctgtggggggaatggcgccagcgccctccggagagccgccgccggagccaggcagagctggagacgctggtgcttgcccgcagcctgacccacgagctgcagggcacggtagaggctctggagttcagcgtgtggggcctgcccgccggcgcccaggagaaggtggctgaggtgcggcgcagtgtggatgccctgcagaccgccttcgctgatgcccgctgcttcagggacgtgccagcggccgcgctggccgagggccggggtcgcgtggcccacgcgcacgcctgcgtggacgagctgctggagctggtggtgcaggccgtgccgctgccctggctggtgggacccttcgcgcccatccttgtggagcgacccgagcccctgcccgacctggcggacctggtggacgaggtcatcgggggccctgacccccgctgggcgcacctggactggccggcccagcagagagcctgggaggcagagcacagggacgggagtgggaatggggatggggacaggatgggtgttgccggggacatctgcgagcaggaacccgagacccccagctgcccggtcaagcacaaccctgatgcccgagctggacttctgacccatgggccagtggaggcggggtaggaaaggccacctgcacacacccgatccctgctgccccctggtggcccccacgtaagctcgaggccttggccttgacccttctttggaatcaggccccaaatccggatactctgaccaccattttggtattggactctcccattttttccttgaacacatggacaaagaggccccgggggagcagggcctcgaaccctattcaggccaacttgagccacaagctgggttcttcacctatgtcctgctccctggctccatgaagcgaatccaaatctttccaagaggctgggcacagtggctcacgcctgtaatcccagcactttgggagtctgaggcaggtggatcatctgaagtcaggagttcgggatcatcctggccaacatgatgaaaccctgtctctacttagaaagaaag

SEQ ID NO: 123944 - DNA, 644 bp, Homo sapiens
cgggccttagctgccttcccgcggggcagggctggggacctgcagcccgccaagcctgagcctcccacccgctccatgggctcctgtgcggcccgagcctccccgacgagcaccaccccctgctccacggcgcccagtcccatcgaccacccaagggctgaggagtgcaggcgcacggcaccaggactggcaggcagctccacctgcagctctggtgcgggatccactaggtgaagccagctgggctcctgagtctggtggggacgtggagaacctttgtatctagtggggtccccttccgcactgtggaagctttgttccttcgctctttgcaataaatcttgcttctgctcagtctttgggtccacactgcttttatgagctgtaacactcactgtgaagatctgcagcttcactcctgaagccagcgagaccacgagcccaccgggaggaacgaacaactccagacgtgctgccttaagagctgtaacactcaccgtgaaggtctgcagcttcactcctgaaccagcgaggccacgaacccaccagaaggaagaaactccgaacacatgcggtggcacgggggggccccagggcatcctgtggttctctccagctgtccagcagaagcgtttctgccccat

SEQ ID NO: 123945 - DNA, 458 bp, Homo sapiens
ttttttttttttgggtttccatgtattttattccattccactcataccaagagacaattctttttgaggtgtgtttagctctctagacttaattactgctgtgtttgtcacattggctgaattgagatcggtgacataaggattcctgggagcctgcgctgggcgcgaatttaagatggctcctccatgatcttcactctctgggtgaaaactgtcggtcagcccatgcccaggattgttgatcagtgctgaaggtcctgaggctgtttttagcatagtctaaaacgcgagggtccgtggcttcattcttgaagtcagtgagaccaagaacccaccaattccggacacattgggaacttagagcagtgcttgggacatggttatcagcgttagctatttccttaaactagcgtgaagtcgactttaaccttccagcagtgtgagtgagggccctgacc

SEQ ID NO: 123946 - DNA, 2665 bp, Homo sapiens
gcggggctggcacccgggccgaggctctgattctggggggaggccgactccaccctggctggaggaactgggtgctcctgcccgctggcccctcgcgcgtgaggatctatctcaggctaagaaatggcatttcaaaaggcagtgaaagggacgattcttgttggaggaggtgctcttgcaactgttttaggactttctcagtttgctcattacagaaggaaacaaatgaacctggcctatgttaaagcagcagactgcatttcagaaccagttaacagggagcctccttccagagaagctcagctactgactttgcaaaacacatctgaatttgatatccttgttattggaggaggagcaacaggaagtggctgtgcgctagatgctgtcaccagaggactaaaaacagcccttgtagaaagagatgatttctcatcagggaccagcagcagaagcactaaattgatccatggtggtgtgagatatctgcagaaggccatcatgaagttggatattgagcagtataggatggtaaaagaagcccttcatgagcgtgccaacctgctagaaattgctccccatttatcagctccattgcctataatgcttccagtttacaagtggtggcagttaccttactactgggtaggaatcaagctgttatgatttggttgccaggaaagcaaattgcctaaaaagcagttatgtcctcagcaaatcaagagcccttgaacatttcccaatgctccagaaggacaaactggtaggagcaattgtctactatgacggacaacataacgatgccacggatgaaccttgccattgctctgactgctgcccaggtatggggctgccacagccaattacatggaggtagtgagcttgcctcaagaagacagaccccccagacagggaaaagtgcatgtgagcggcgcacggtgcaaaggatgtccctcaacagggcaggaatttgacgtgagagccaaatgtgttatcaatgccacgggacctttcacggactctgtgcgcaaaatggatgataaagacgcagcagctatctgaccagccaagtgctggtgtccatattgtgatgcctggttattacagcccagagagcatgggacttcttgacccagcgaccagtgatgggcgagttattttcttcttaccctggcaaaagatgacgatcgctggcactactgatactccaactgatgttacacaccatccaattccttcagaagaagatatcaacttcattttgaatgaagtgccgtaattacctgagttgtgatgttgaagtgagaagaggggatgtcctggcagcatggagtggaatccgtcctcttgttacagaccccaaatctgcagatactcagtctatctcccgaaatcatgttgttgatatcagtgagagtggccttattactatagcaggtggaaagtggacaacttatcggtctatggcagaagataccataaatgctgctgtcaaaactcataatttaaaagcaggaccaagtagaacagttgggcttttccttcaagggggtaaagattggagccccacactctacattaggcttgtgcaggattatggacttgaaagcgaggtggcacagcatcttgccgccacctatggtgataaggcctttgaggtggccaaaatggcaagtgtgactggcaaaaggtggcctattgttggagtacatcttgtgtcagaatttccatatattgaagcagaggtgaaatatgggattaaggagtatgcctgcactgctgtggatatgatttcacgtcgtactcgcctggcctttctaaatgtccaggcagcagaggaagccctacccaggattgttgaactgatgggcagggaactgaattgggatgattataagaagcaggaacaacttgaaacagccaggaaggtttctatattatgaaatgggctataaatctcgatcagaacagttaacagatcgctctgaaattagcctactgccttcagacattgacaggtataagaagagatttcataagtttgatgcagaccagaaaggctttattaccattgttgatgttcagcgtgtattagagagtatcaatgtccaaatggatgaaaatacactccatgaaattctaaatgaagttgatttgaataaaaatggacaggttgaactcaatgaatttttgcagctgatgagtgctattcaaaaaggaagggtatctggaagccggcttgctatactaatgaaaactgcagaagagaacctcgacagaagagttccaattccagtggaccgtagttgtggaggattgtgagtctgggcagtaaatccacagccaacaaacatagaaacgacaaatccccatgtaacaaccagagatgactgaaaccactctgaaataatgaatgtggatagctgcctttttttaacactagaaaacattccaaaactttaaggtgttggtgtatttgccagctttatttgctgtactttatttgtatttgccattcagtctagcttttaagtatatttttttctttttctcattttcaatgcacattagttttgcatctgttttgtgacctgttagatgtgacacattctctttttgtttattcccttattctaaatgagttctaaaaacataatattttggc

SEQ ID NO: 123947 - DNA, 3486 bp, Homo sapiens
atgctcaaaccccttatgggagggggagcacacagaagggcagctgcaggagccaggaaatgggatggtactgctatcattgcatctacctctggattagaggttctttgggtcactacctctagatcgaagactgttgagagcgtcggactggcaaagccaggacaacataacgatgcacggatgaaccttgccattgctctgactgctgccaggtatggggctgccacagccaattacatggaggtagtgagcttgctcaagaagacagacccccagacagggaaagtgcgtgtgagcggcgcacggtgcaaggatgtcctcacagggcaggaatttgacgtgagagccaaatgtgttatcaatgccacgggacctttcacggactctgtgcgcaaaatggatgataaagacgcagcagctatcttgccaagcaaagtgctggtgtccatattgtgatgcctggttattacagcccagagagcatgggacttcttgacccagcgaccagtgatgggcgagttattttcttcttaccctggcaaaagatgacgatcgctggcactactgatactccaactgatgttacacaccatccaattccttcagaagaagatatcaacttcattttgaatgaagtgcgtaattacctgagttgtgatgttgaagtgagaagaggggatgtcctggcagcatggagtggaatccgtcctcttgttacagaccccaaatctgcagatactcagtctatctcccgaaatcatgttgttgatatcagtgagagtggccttattactatagcaggtggaaagtggacaacttatcggtctatggcagaagataccataaatgctgctgtcaaaactcataatttaaaagcaggaccaagtagaacagttgggcttttccttcaagggggtaaagattggagccccacactctacattaggcttgtgcaggattatggacttgaaagcgaggtggcacagcatcttgccgccacctatggtgataaggcctttgaggtggccaaaatggcaagtgtgactggcaaaagggtgggcctattgttggagtacgtcttgtgtcagactttccatatattgaagcagaggtgaaatatgggattaaggagtatgcctgcactgctgtggatatgayttcacgtcgtactcgcctggcctttctaaatstccaggsagcagaggaagccctacccaggcttbttgaactgatgggcagggaactgaattgggatgattataagaagcaggaacaacttgaaacagccaggaagtttctatattatgaaatgggctataaatctcgatcagaacagttaacagatcgctctgaaattagcctactgccttcagacattgacaggtataagaggagatgtcataagtttgatgcggaccagagaggctttatgaccgttgttgaggtgcagcgtgtattagagagtatcaatgtccaaatggatgaaaatacactccatgaaattctaaatgaagttgatttgaataaaaatggacaggttgaactcaatgaatttttgcagctgatgagtgctattcaaaaaggaagggtatctggaagccggcttgctatactaatgaaaactgcagaagagaacctcgacagaagagttccaattccagtggaccgtagttgtggaggattgtatttctgtgtccggaattggtgggttcttggtctcactgacttcaagaatgaagccgcggaccctagcggagtgaagctgcagaccttcacggtgagtgttacagctcttaaggtagcacgtctggagttgtttgtttctcccggtgggctcgtggtcttgctgggttcaggagtgaaactgcagatcttcgcgcccaacatggcgatgcacaacaaggcggcgccgccgcagatcccggacacccggcgggagctggcggagctcgtgaagcggaagcaggagctggcggcaacattggcaaaatttggagcgacagatctatgcttttgagggaagctacctggcagacactcagatgtatggcaatattatttcgtggctggattcggtatctgaccaaccaaaaaaaccttccattggcaaaattgatctgaaggaaccggaagtttaaggaagcttgagcgtctcgttcagtaaatcctcggttacctcagcagctctgatcattcagtatatggctgtttacctgtctacctgcaagaataagctgcacccaggggagccagggaagttgggacgggaaagttgacactttctccagattttccacattcagggaaaaatggagcccagccaggaggaccctgaggattctggatggatctgtgcagggaagtgaaaccttcagaaggctgcttcttctacttcctcaggggagtcaccacagcagccataaaaagcgaaagaataaaaaccggcacagccccgtctggcatgtttgattatgactttgagattgatctgaagttaaacaaaaaaccacgagctgactattagaagacacattagtgccagaagccttccaggctgtagagccctggcttcccttctctgacctcacaaagataaacatccttcacctgagttcgtggccatccacctctgctctcccagacccagtgcctgtgactttgagtagtttgttctaaatgtggtgacaaacaagtcatttctgtaagacattgggtcttactttatgtcatttttagtaacagaactgcaggaagatcaagacaatgttgtaatcccggcaagttgctaactgtgcgtttctcccttcttagaatgaatgtctcccccaaaactggctggcaccagcttcatctgtgatacccttcaagaaatgttcctctggttttgttttatgctgaaagtagaacacaagtcacatttcagatgggagggctgtaaatatctgggcattttcttatattgttttatgttttcttgtttttctcttgttgtttttatcttattttctttgggggtttttttgtaatgcctttgtaccagcctccatacctttcccctgcctgaccatatcctggatccatcctcctttccatgccagttgcccaatattccataactggaaaaataatcctggtttatccataagtaaaaatgggaaacttgcctcctgttttttgcaagggggaggtaaagagtgtttagtaattacctcatcttaaatctttctgagttggtagtagactcatgttcaaggaacccaggaaaatggaaaaccataagtttaaatcagttctttttaaataactttttattcttttgtataaataaaatttcacaggcttcaaattctcatgctttacttttaaacccgagattgtttttttcacttatttattcatatcatgcctttatggaaatttctttttctgtattttctctctttgctggtattcacctgattaaatattgctctaaaaatcacc

SEQ ID NO: 123948 - DNA, 593 bp, Homo sapiens
tattagcagtgcggtggaattcgagacttcccagctgtctggcttgtggactgagcaatctgcggcccggtctcgaggggaaaatatagtctgtggtccgcaaggccccagaggagcccttgggttcccgcagaaccgactgggtctccagtagtctctgaggagccgctcgaccttctcccgaccctggatctgaggcaggagatgcctcccccgcgggtgttcaagagctttctgagcctgctctttcaggggctgagcgtgttgttatccctggcaggagacgtgctggtcagcatgtacagggaggtctgttccatccgcttcctgttcacggttgtgtcgctgcttgaacctctttctgtcagcattctggctggggcttctgtacctggtctctcctttggagaatgaacctaaggagatgctgactctaagtgagtaccacgagcgcgtgcgctcccaggggcagcagctgcagcagctccaggccgagctggataaactccacaaggaggtgtccactgttcgggcagccaacagcgagagaggggccaagctcgtgttccagaggctgaatgagggatttgtgc

SEQ ID NO: 123949 - DNA, 1151 bp, Homo sapiens
atgcggcgaagctcccgcccgggctcggcctcgtcctcgcgcaagcacacgcccaactttttcagcgagaacagctcaatgagcatcacctcggaggacagcaaagggctccggtcagcggagcccgggcctggggagcccgagggcagaagagcccggggcccgagctgcggcctgctcttccaggggctgagcgtgttgttatccctggcaggagacgtgctggtcagcatgtacagggaggtctgttccatccgcttcctgttcacggctgtgtcgctgctgagcctctttctgtcagcattctggctggggcttctgtacctggtctctcctttggagaatgaacctaaggagatgctgactctaagtgagtaccacgagcgcgtgcgctcccaggggcagcagctgcagcagctccaggccgagctggataaactccacaaggaggtgtccactgttcgggcagccaacagcgagagagtggccaagctcgtgttccagaggctgaatgaggattttgtgcggaagcccgactatgctttgagctctgtgggagcctccatcgacctgcagaagacatcccacgattacgcagacaggaacactgcctacttctggaatcgcttcagcttctggaactacgcacggccgcccacggttatcctggagccccacgtgttccctgggaattgctgggcttttgaaggcgtccaaggccaggtggtgatccaactgccggggccgagtgcacactgagcgacatcactctgcagcatccaccgcccagcgtggagcacaccggaggagccaacagcgccccccgcgatttcgcggtctttttcctcctttcattcttcacccaccagggcctccaggtttatgatgaaactgaagtttccttggggaaattcaccttcgatgttgagaaatcggagattcagactttccacctgcagaatgaccccccagctgcctttcccaaggtgaagatccagattctaagcaactggggccacccccgtttcacgtgcttgtatcgagtccgtgcccacggtgtgcgaacctcagagggggcagagggcagtgcacaggggccccattaaacatgctgatttttggagtagaattgaaaaaaaaaaaaaaaaaaa

SEQ ID NO: 123950 - DNA, 395 bp, Homo sapiens
  misc_feature (1)...(395): n = a,t,c or g
cggcaagnggtggagcctgggaagcggctgatcgacagaattgttgaaaccatttgcagttgttttcagggccctcagactgatgaaggggttcagttacaaataattaaggctcttctgactgcagtgacttccccacacattgaaattcatgagggtactatcctgcagacagtgagaacatgttacaatatctatttggccagcaaaaatctcatcaatcaaaccactgccaaggctacccttactcagatgctgaacatgccaggagtgattctggaaaagtaagcacagaaaatggagacgcacccagagaaagaggctcatcactgtcagggactgantgacggagcccaggaggtggtgaaggacatcttggaagatgtagtcacatc

SEQ ID NO: 123951 - DNA, 1701 bp, Homo sapiens
atgctgggaacgtcagttgaagacatagcccaattcctgcaccaggaggagcgcctggattccacccaagtaggcgattttctgggagatagcgcaaggttcaacaaggaggtgatgtatgcctacgtggaccaacttgacttctgtgaaaaagaatttgtctcagccctgcggacattcctagaaggtttccgcctacctggagaagcccaaaagattgaccgattaatggagaagtttgccgcaagatacatagaatgcaaccaagggcaaactctgtttgctagtgctgacactgcttatgtcctagcgtattcaattattatgctgactacagacttgcacagtcctcagatcttgaaatgcatcagccagctggagctcgctcagctgataggaaccggtgtgaagacgcgctacctgtctggatctgggcgtgaaagagaagggagcctgaagggccacacattggcaggagaagagttcatgggccttggcctcggtaatttggtgagtggcggagtggataaaagacagatggccagcttccaagaatcggttggtgagaccagctcgcagagtgtggttgtagctgtggacaggatttttactgggtctaccagactggatggaaatgcaatagttgactttgtccgctggctgtgtgctgtgtccatggatgaactggcttccccccaccatcctcgcatgttcagcttgcagaagattgtggagatatcatactacaacatgaatcggatccgactacagtggtctcgaatatggcatgtgattggagatcacttcaataagacaagctgtgaccgtctccgggagctgcatgtgtcagaggttttcaccgtcatcaccgaaacgcgcgagacgaaagggcctcgtgatacgcctatttttatagaaacgctggtgaaagtaaaagatgctgaagatcagttgggtgcacgagtgggttacatcgaactggatctcaacagcggtaagatccttgagagttttcgccccgaagaacgttttccaatgatgagcacttttaaagttctgctatgtggcgcggtattatcccgtattgacgccgggcaagagcaactcggtcgccgcatacactattctcagaatgacttggttgagtactcaccagtcacagaaaagcatcttacggatggcatgacagtaagagaattatgcagtgctgccataaccatgagtgataacactgcggccaacttacttctgacaacgatcggaggaccgaaggagctaaccgcttttttgcacaacatgggggatcatgtaactcgccttgatcgttgggaaccggagctgaatgaagccataccaaacgacgagcgtgacaccacgatgcctgtagcaatggcaacaacgttgcgcaaactattaactggcgaactacttactctagcttcccggcaacaattaatagactggatggaggcggataaagttgcaggaccacttctgcgctcggcccttccggatggctggtttattgctgataaatctggagccggtgagcgtgggtctcgcggtatcattgcagcactggggccagatggtaagccctcccgtatcgtagttatctacacgacggggagtcaggcaactatggatgaacgaaatagacagatcgctgagataggtgcctcactgattaagcattggtaa

SEQ ID NO: 123952 - DNA, 495 bp, Homo sapiens
gaatcggatgcacaaggacatcaagtggctgccaggttctcccacgttctgcagaaggatgccttccttgtgttccgctccctgtgcaagctgtccatgaaaccccttggtgaaggccctccagacccaaactccccagtgggccccaccctgccagccgtccccaccaaggccagggtcccgttgctgcccagccaggagctcagcctgaggaagaaaggcctggagtgcctcgtgtccattctcaagtgcatggtggagtggagcaaagacctgtatgtgaatcccaaccaccagaccagcctcggtcaggagaggctcacggatcaggaaataggggatgggaaaggccttgacatggcaagacggtgtagtgtgacgtccatggagtccacagtgtcctcggggacccagacaactgttcaggatgaccctgagcaatttgaggtcatcaagcaacaaaaagaaatcattgaacacggcatcgagctgtga

SEQ ID NO: 123953 - DNA, 3558 bp, Homo sapiens
atgcattatgttttgaattcctcttcaatggaaacctttgtcggggagcaaaactacgaaggttcttcgcggctgtgtgtctgtaagcgcacccgagaagcagacgacccgtcagcgcgcgacagcgtgtgtgagggtgtccgggctcggtttaacatatgcggcatcaaccaaattgtactaaagtgccccatatggggttgtgaaaaccccgcccaaatgggttgtccacctgttggaaaggccgaccggtgcggccttcttgctaattcggccacctgcgaaaaggggatgttctgccacgccgatttagttgggataacgcccacggtttttcccagtcacccacgttgtaaaacgacggccagtgccaagcttgcatgccagcaggatgtggatctggaccgccagtctttaagcagcatagataaaaatccctctgagaggggacagagccagctctctaacccaacagatgacagctggaagggtagaccatacgcaaatcagaaactgtttgccagcctcctcatcaagtgtgtggtccagttggaattgatacagaccattgacaacattgtgttctaccctgcgacgagcaaaaaggaggatgcagagcacatggttgccgcccagcaagacacgctggatgcagatatccacatagagacggaggatcagggcatgtataagtacatgtcttcccagcacctcttcaagctgttggactgtttgcaggaatcccattcattctcaaaggccttcaactccaattacgagcagcggactgtcctgtggcgagcaggttttaagggcaagtctaaacccaatcttctaaaacaagaaaccagcagcctggcctgttgtttgaggatcctgtttcgaatgtatgttgatgagaaccgcagggattcctgggaagaaatacagcagagacttttaactgtttgcagtgaagctcttgcctatttcatcactgtgaattctgagagccatcgggaggcctggacaagtctcttgttgttacttctaactaaaaccctcaaaataaatgatgaaaagttcaaagcacatgcttcaatgtactacccctacttgtgtgaaattatgcagtttgacctgatccctgagctccgagcagttctgcggaagttcttcctacggataggtgttgtgtataagatatggataccagaagagccatcacaggctcgctgtcgcgccattttgccggggtttgaatgtgaggcggagcggcggcaggagcgggtagtgccagctacggtccgcggctggggttccctcctccgtttctgtatccccacgagttcatacaacaaatgcttactaaatatgtactgtgtgccagatcctatagcaatggaactcagcgatgcaaatctgcaaacactaacagaatatttaaagaaaacacttgatcctgatcctgccatccgacgtccagctgagaaatttcttgaatctgttgaaggaaatcagaattatccactgttgcttttgacattactggagaagtcccaggataatgttatcaaagtatgtgcttcagtaacattcaaaaactatattaaaaggaactggagaattgttgaagatgaaccaaacaaaatttgtgaagccgatcgagtggccattaaagccaacatagtgcacttgatgcttagcagcccagagcaaattcagaagcagttaagtgatgcaattagcattattggcagagaagattttccacagaaatggcctgacttgctgacagaaatggtgaatcgctttcagagtggagatttccatgttattaatggagtcctccgtacagcacattcattatttaaaagataccgtcatgaatttaagtcaaacgagttatggactgaaattaagcttgttctggatgcctttgctttgcctttgactaatctttttaagatttgtgataatgccgcactctatgcacaaaagtacgatgaagaattccagcgatacctgcctcgttttgttacagccatctggaatttactagttacaacgggtcaagaggttaaatatgatttgttggtaagtaatgcaattcaatttctggcttcagtttgtgagagacctcattataagaatctatttgaggaccagaacacgctgacaagtatctgtgaaaaggttattgtgcctaacatggaatttagagctgctgatgaagaagcatttgaagataattctgaggagtacataaggagagatttggaaggatctgatattgatactagacgcagggctgcttgtgatctggtacgaggattatgcaagttttttgagggacctgtgacaggaatcttctctggttatgttaattccatgctgcaggaatacgcaaaaaatccatctgtcaactggaaacacaaagatgcagccatctacctagtgacatctttggcatcaaaagcccaaacacagaagcatggaattacacaagcaaatgaacttgtaaacctaactgagttctttgtgaatcacatcctccctgatttaaaatcagctaatgctatcatgagaagtttttctctcctacaagaagccataatcccctacatccctactctcatcactcagcttacacagaagctattagctgttagtaagaacccaagcaaacctcactttaatcactacatgtttgaagcaatatgtttatccataagaataacttgcaaagctaaccctgctgctgttgtaaattttgaggaggctttgtttttggtgtttactgaaatcttacaaaatgatgtgcaagtgaatcagttgaccaatataggaaacaaatcttcattctgctattccagagacttcagaattccaaaacaaccaagtttatcaagagtaagtaaaatcatctggatgttctacagaagtaatgaaagaagaatgtttggaatggttttggaaaaaattattattcctgaaattcagaaggtatctggaaatgtagagaaaaagatctgtgcggttggcataaccaaattactaacagaatgtcccccaatgatggacactgagtataccaaactgtggactccattattacagtctttgattggtctttttgagttacccgaagatgataccattcctgatgaggaacattttattgacatagaagatacaccaggatatcagactgccttctcacagttggcatttgctgggaaaaaagagcatgatcctgtaggtcaaatggtgaataaccccaaaattcacctggcacagtcacttcacaagttgtctaccgcctgtccaggaaggagctgtggcagctctcccgtagaagatggggtttgtattggcgcaccaagatctccaacagccagtgtgtgtttcccatctcttgtaggttccatcaatggcccggccccggccccacccccacccacggtccgaaccacaagttccggctggcactgcggcggagcctgcgctcgcaaggcacgccgggggcccagcgggaggagcgccctgtcccgcctggaccgcagcggcccgtcctga

SEQ ID NO: 123954 - DNA, 4617 bp, Homo sapiens
atgtttgttttgaaggtaggctgtccatctttgctgttgagagacccacgtcggtcattattacactatacctgtttcacatcagttcctgttcttgttcaggttggctgcaaccctaatgaagatgtggctatctttgctgttgactcattaaggcaactctccatgaagtttcttgagaagggtgaattagccaacttccgtttccagaaagattttctgaggccctttgagcatattatgaagaaaaacaggtctcccaccatccgggacatggcgatccgctgcattgcccagatggtgaactcccaggcggccaacatccgctcagcaactattttccagcaccattttcctgcagccatcgattcctttcaggatgctgtgaagtgcttatcagagttcgcctgcaacgccgcttttccctgacacgagcatggaagcgattcggctcatccgcttctgtggcaattatcttctctgagaggcctcgggtgctactagaatacacaagtgatgacatgaatgtagctcctggtgacagagtctgggtccgaggctggttccccatcttattcgaactctcctgcatcattaatagatgcaagttagatgtacgaacaaggggactcacagtcatgtttgagatcatgaagagctatggccacacctttgaaaagcactggtggcaggacctgttcagaatcgtgtttcggatttttgacaatatgaaactccctgagcaactgtcagagaaatctgagtggatgacaacaacctgcaatcacgcactttatgctatttgtgatggttttacccagttttatgaagctttgaatgaagttcttctttctgatgtatttgcacaattgcagtggtgtgtcaaacaagataatgaacagttggcgcgatcaggtacaaattgcttagaaaacttagtaatatccaatggagagaaattcagtcctgaagtctgggatgaaacctgcaactgtatgttggatattttcaaaacaaccatcccacatgttttgctgacatggagacctgtaggaatggaggaagattcatcagaaaagcatttggatgtggatctggaccgccagtctttaagcagcatagataaaaatccctctgagaggggacagagccagctctctaacccaacagatgacagctggaagggtagaccatacgcaaatcagaaactgtttgccagcctcctcatcaagtgtgtggtccagttggaattgatacagaccattgacaacattgtgttctaccctgcgacgagcaaaaaggaggatgcagagcacatggttgccgcccagcaagacacgctggatgcagatatccacatagagacggaggatcagggcatgtataagtacatgtcttcccagcacctcttcaagctgttggactgtttgcaggaatcccattcattctcaaaggccttcaactccaattacgagcagcggactgtcctgtggcgagcaggttttaagggcaagtctaaacccaatcttctaaaacaagaaaccagcagcctggcctgttgtttgaggatcctgtttcgaatgtatgttgatgagaaccgcagggattcctgggaagaaatacagcagagacttttaactgtttgcagtgaagctcttgcctatttcatcactgtgaattctgagagccatcgggaggcctggacaagtctcttgttgttacttctaactaaaaccctcaaaataaatgatgaaaagttcaaagcacatgcttcaatgtactacccctacttgtgtgaaattatgcagtttgacctgatccctgagctccgagcagttctgcggaagttcttcctacggataggtgttgtgtataagatatggataccagaagagccatcacaggctcgctgtcgcgccattttgccggggtttgaatgtgaggcggagcggcggcaggagcgggtagtgccagctacggtccgcggctggggttccctcctccgtttctgtatccccacgagttcatacaacaaatgcttactaaatatgtactgtgtgccagatcctatagcaatggaactcagcgatgcaaatctgcaaacactaacagaatatttaaagaaaacacttgatcctgatcctgccatccgacgtccagctgagaaatttcttgaatctgttgaaggaaatcagaattatccactgttgcttttgacattactggagaagtcccaggataatgttatcaaagtatgtgcttcagtaacattcaaaaactatattaaaaggaactggagaattgttgaagatgaaccaaacaaaatttgtgaagccgatcgagtggccattaaagccaacatagtgcacttgatgcttagcagcccagagcaaattcagaagcagttaagtgatgcaattagcattattggcagagaagattttccacagaaatggcctgacttgctgacagaaatggtgaatcgctttcagagtggagatttccatgttattaatggagtcctccgtacagcacattcattatttaaaagataccgtcatgaatttaagtcaaacgagttatggactgaaattaagcttgttctggatgcctttgctttgcctttgactaatctttttaagatttgtgataatgccgcactctatgcacaaaagtacgatgaagaattccagcgatacctgcctcgttttgttacagccatctggaatttactagttacaacgggtcaagaggttaaatatgatttgttggtaagtaatgcaattcaatttctggcttcagtttgtgagagacctcattataagaatctatttgaggaccagaacacgctgacaagtatctgtgaaaaggttattgtgcctaacatggaatttagagctgctgatgaagaagcatttgaagataattctgaggagtacataaggagagatttggaaggatctgatattgatactagacgcagggctgcttgtgatctggtacgaggattatgcaagttttttgagggacctgtgacaggaatcttctctggttatgttaattccatgctgcaggaatacgcaaaaaatccatctgtcaactggaaacacaaagatgcagccatctacctagtgacatctttggcatcaaaagcccaaacacagaaggacacaggggagacagagcgggggaaagagaaacggggaaccgcgagaacggagaagcgaaccaacaaaacccaaaacccaccagcccaaaaaggcggacgagacgcaaaacacgcaaacgggggaacgaaaggaagaaaaacagaggcggcaaacaaacgcaaaagaaagccaaacacgaaacaaggcgaggaaaaggtggggggggggaacgacgcgagaggggaacacgaagacgaaaaaagagggagagggacgcgcgcgaagcgaaaacgacggcaggaagaaggggaggcgaggcaaacaaacaacgcaaaacaggagagagaaaggagggggaacaaaacgcaagggggcgaaccgaaccgaaagaaaaagaggaaaacggacgaagcgggaaagcagagggaaagaaggagaggaggacaggcgccggaaatcccaggcgctcaggaggcagagacagaagaacagcttgagcctgacaggctcacggatcaggaaataggggatggcaaaggccttgacatggcaagacggtgtagtgtgacgtccatggagtccacagtgtcctcggggacccagacaactgttcaggatgaccctgagcaatttgaggtcatcaagcaacaaaaagaaatcattgaacacggcatcgagctgcttggcactgctgcaccaccaaaggcaaacttcattgaagctgacaagtattttcttccattcgagctagcttgccagtccaagtccccaagggtagtcagcacatcccttgactgcttgcagaaactcatcgcatacgggcacatcactggcaacgcccctgacagtggagcccctgggaagcggctgatcgacagaattgttgaaaccatttgcagttgttttcagggccctcagactgatgaaggggttcagttacaaataattaaggctcttctgactgcagtgacttccccacacaaaagaaattcatgagggtactatcctgcagacagtgagaacatgttacaatatctatttggccagcaaaaatctcatcaatcaaaccactgccaaggctacccttactcagatgctgaacgtcattttcacccgcatggaaaaccaagtgttgcaggaggccagagaactggaaaaaccaatccagtcaaaaccccagtcccctgtgatccaagctgcagcagtatccccaaagttcgttcgtttgaagcacagtcaggcacaaagcaaaccaacaactcccgaaaaaacagatttaaccaacggtgaacatgccaggagtgattctggaaaagtaagcacagaaaatggagacgcacccagagaaagaggctcatcactgtcagacatgttactttcctgcttactgtgtagtaacaacagtggtccaagtgtgatggcacctcgcatttggccccaagggaagggagtcgattgggagtggtga

SEQ ID NO: 123955 - DNA, 5983 bp, Homo sapiens
atgcaggagagccagaccaagagcatgttcgtgtcccgggccctggagaagatcctagccgacaaggaggtgaagcggccccagcactcccagctgcgcagggcctgccaggtggcgctcgcctggaaattgttgctaattgccccattggcagttgggaaggcaacgcctgttaagatgtggagcaataaagtggagcagctaactgtcatgaacatgcattctgcagaacaagaaacagatgaaattaaagcagaaatagaaaagcagaggcttggcactgctgcaccaccaaaggcaaacttcattgaagctgacaagtattttcttccattcgagctagcttgccagtccaagtccccaagggtagtcagcacatcccttgactgcttgcagaaactcatcgcatacgggcacatcactggcaacgcccctgacagtggagcccctgggaagcggctgatcgacagaattgttgaaaccatttgcagttgttttcagggccctcagactgatgaaggggttcagttacaaataattaaggctcttctgactgcagtgacttccccacacattgaaattcatgagggtactatcctgcagacagtgagaacatgttacaatatctatttggccagcaaaaatctcatcaatcaaaccactgccaaggctacccttactcagatgctgaacgtcattttcacccgcatggaaaaccaagtgttgcaggaggccagagaactggaaaaaccaatccagtcaaaaccccagtcccctgtgatccaagctgcagcagtatccccaaagttcgttcgtttgaagcacagtcaggcacaaagcaaaccaacaactcccgaaaaaacagatttaaccaacggtgaacatgccaggagtgattctggaaaagtaagcacagaaaatggagacgcacccagagaaagaggctcatcactgtcagggactgatgacggagcccaggaggtggtgaaggacatcttggaagatgtagtcacatctgccattaaagaagcagcggaaaagcatggtctgacagaacctgagagagttctaggtgaactggagtgccaggaatgtgctattcccccaggagttgatgaaaactcacagaccaacgggatagccgatgacaggcagtccttgtcgtcagcagataatctggaatcggatgcacaaggacatcaagtggctgccaggttctcccacgttctgcagaaggatgccttccttgtgttccgctccctgtgcaagctgtccatgaaaccccttggtgaaggccctccagacccaaaatcccatgagctgcgttccaaggtggtttccctgcagctgctcctctctgtgttgcaaaatgctggccccgtattcaggactcacgagatgttcatcaatgcaatcaagcaatatctctgtgtggccttgtccaaaaacggcgtctcttcagtgcctgatgtctttgagctctctcttgccatttttcttactcttctttcaaactttaaaatgcacttgaaaatgcagatagaggtctttttcaaagagattttcctgaacattttagaaacatcaacaagttcttttgagcacaggtggatggtcattcagactctgacgaggatctgtgcagatgcccagtgtgttgtggatatttatgtcaactacgactgtgatttaaatgctgctaacatttttgagcgccttgtaaatgatttatccaaaattgctcagggaagaagtggacatgagctgggaatgacacctctgcaggagctcagcctgaggaagaaaggcctggagtgcctcgtgtccattctcaagtgcatggtggagtggagcaaagacctgtatgtgaatcccaaccaccagaccagcctcggtcaggagaggctcacggatcaggaaataggggatgggaaaggccttgacatggcaagacggtgtagtgtgacgtccatggagtccacagtgtcctcggggacccagacaactgttcaggatgaccctgagcaatttgaggtcatcaagcaacaaaaagaaatcattgaacacggcatcgagctgttcaacaagaaacccaagagggggatccagtttctccaggagcagggcatgctgggaacgtcagttgaagacatagcccaattcctgcaccaggaggagcgcctggattccacccaagtaggcgattttctgggagatagcgcaaggttcaacaaggaggtgatgtatgcctacgtggaccaacttgacttctgtgaaaaagaatttgtctcagccctgcggacattcctagaaggtttccgcctacctggagaagcccaaaagattgaccgattaatggagaagtttgccgcaagatacatagaatgcaaccaagggcaaactctgtttgctagtgctgacactgcttatgtcctagcgtattcaattattatgctgactacagacttgcacagtcctcaggtaaaaaataaaatgacgaaagagcagtatattaaaatgaatcggggtatcaatgatagtaaagatctgccagaagagtatctctcaagcatctatgaagagatagaaggcaagaaaattgcaatgaaagaaacaaaagagctaacgattgcaaccaaatctactaagcagaatgtagctagtgaaaagcagcggcggctgctgtacaacttagagatggagcaaatggctaaaacagccaaagctctgatggaggctgtgagccatgccaaagccccgtttaccagtgccactcacctggaccatgtccggccaatgttcaaactggtgtggacgccactattggcagcctacagcatcggactccagaactgtgatgacactgaagtggcctccttgtgtttggaaggcatccgatgtgcaatccgaatcgcctgcatctttggaatgcagctggaacgagatgcctatgttcaggctcttgctcgcttctccctactcacagccagctccagcatcacaaaaatgaagcagaaaaacatcgacaccattaagacgcttatcacagtggctcacaccgatggcaactaccttgggaattcctggcatgagatcttgaaatgcatcagccagctggagctcgctcagctgataggaaccggtgtgaagacgcgctacctgtctggatctgggcgtgaaagagaagggagcctgaagggccacacattggcaggagaagagttcatgggccttggcctcggtaatttggtgagtggcggagtgaataaaagacagatggccagcttccaagaatcggttggtgagaccagctcgcagagtgtggttgtagctgtggacaggatttttactgggtctaccagactggatggaaatgcaatagttgactttgtccgctggctgtgtgctgtgtccatggatgaactggcttccccccaccatcctcgcatgttcagcttgcagaagattgtggagatatcatactacaacatgaatcggatccgactacagtggtctcgaatatggcatgtgattggagatcacttcaataaggttggctgcaaccctaatgaagatgtggctatctttgctgttgactcattaaggcaactctccatgaagtttcttgagaagggtgaattagccaacttccgtttccagaaagattttctgaggccctttgagcatattatgaagaaaaacaggtctcccaccatccgggacatggcgatccgctgcattgcccagatggtgaactcccaggcggccaacatccgctcaggctggaagaacatctttgccgtgttccaccaggcagcctctgatcatgatgggaacattgtggagctggccttccagaccacttgccacattgtcacaactattttccagcaccattttcctgcagccatcgattcctttcaggatgctgtgaagtgcttatcagagttcgcctgcaacgccgctttccctgacacgagcatggaagcgattcggctcatccgcttctgtggcaaatacgtctctgagaggcctcgggtgctacaagaatacacaagtgatgacatgaatgtagctcctggtgacagagtctgggtccgaggctggttccccatcttattcgaactctcctgcatcattaatagatgcaagttagatgtacgaacaaggggactcacagtcatgtttgagatcatgaagagctatggccacacctttgaaaagcactggtggcaggacctgttcagaatcgtgtttcggatttttgacaatatgaaactccctgagcaactgtcagagaaatctgagtggatgacaacaacctgcaatcacgcactttatgctatttgtgatgtttttacccagttttatgaagctttgaatgaagttcttctttctgatgtatttgcacaattgcagtggtgtgtcaaacaagataatgaacagttggcgcgatcaggtacaaattgcttagaaaacttagtaatatccaatggagagaaattcagtcctgaagtctgggatgaaacctgcaactgtatgttggatattttcaaaacaaccatcccacatgttttgctgacatggagacctgtaggaatggaggaagattcatcagaaaagcatttggatgtggatctggaccgccagtctttaagcagcatagataaaaatccctctgagaggggacagagccagctctctaacccaacagatgacagctggaagggtagaccatacgcaaatcagaaactgtttgccagcctcctcatcaagtgtgtggtccagttggaattgatacagaccattgacaacattgtgttctaccctgcgacgagcaaaaaggaggatgcagagcacatggttgccgcccagcaagacacgctggatgcagatatccacatagagacggaggatcagggcatgtataagtacatgtcttcccagcacctcttcaagctgttggactgtttgcaggaatcccattcattctcaaaggccttcaactccaattacgagcagcggactgtcctgtggcgagcaggttttaagggcaagtctaaacccaatcttctaaaacaagaaaccagcagcctggcctgttgtttgaggatcctgtttcgaatgtatgttgatgagaaccgcagggattcctgggaagaaatacagcagagacttttaactgtttgcagtgaagctcttgcctatttcatcactgtgaattctgagagccatcgggaggcctggacaagtctcttgttgttacttctaactaaaaccctcaaaataaatgatgaaaagttcaaagcacatgcttcaatgtactacccctacttgtgtgaaattatgcagtttgacctgatccctgagctccgagcagttctgcggaagttcttcctacggataagtgttgtgtataagatatggataccagaagagccatcacaggtacccagcagcactgtcaccagtgtggtagccctggctgcccaggccagtgctgcagctctgcgaaaatgttcagcatgccatttctgactggcacatctcgtgaagtttcatagaaacaaggagttggcatcttggatctcagaatggcctggaaacggatggcctctacgctgttccatcacagtctccaacctaaggcttatggtatttcattaaactgttgcatacccagttagcacagtaggtggggagtctgcttcatttctatcattccatttttctgattaaactgtcaaatctgtcattgcatatgccatcgttttctagcaaaatcccatgattggctataaacgttttgtaagaagtcactctccttgaaaatactgaacatagctgtataggtttgtgattattagagaatatgttaataaaacttcttgtaacggctaactgccacctaaaatatgctgggttttctgttgtttgagtgtgttagagaaatttgaatgtttttgtcagttacgagtcagcc

SEQ ID NO: 123956 - DNA, 782 bp, Homo sapiens
cactggctgggaaggcagggctgaggccgaggttccccaggacgacaggagggagccaaggcactctaagaggtggaagaagaggaccagaagctggtgagtgcatcactggagcccataggagggctcctgactgtcctcaaaagcctcagacctcagtgtccactttctccatccaagaaatggggctgtgatctctgcttatgacagcacaagcttgcacagaagtggaggcgggaaataagcacaagtgtgccttcccagcccggcctgggtccaggcagaacagctgatactggccccagtctgcccacccacccctgctggccaggaggctggcagaaccccagccccacctgcctggagcgcgtttgatttggactcgactgttgtaaagatggagaaaggctggatctgtagctaaaaatacactcggagccaagccagctgctcagagcttcctcgtaggctgggccgcgctgggcccactgaggaactgggcatgcccacccaggaggtagcgcccttacctgctagaggttgagggcctgagtcactcccccttccagtcgccaggaattccttagtgggaggactgtcagagtcaaactaggcctgcccctgccgttgacagaaggaaagattgtccttccagggggtgaaggtgggtcgccccatgtttgtcccagtccctggattatagaaaggcggacggcggatcagggcgttgtggcagaataatgtaactggccgattgcacaccagcgtgcgtcagctggcgt

SEQ ID NO: 123957 - DNA, 1807 bp, Homo sapiens
  misc_feature (1)...(1807): n = a,t,c or g
atgcccagttcctcagtgggcccagcgcggcccagcctccgaggaagctctgagcagctggcttggctccgaggtatttttagctacagatccagcccccctccatcaccacaacagtcgagtccaaatcaaacgcgctccaggcagcactacgccccatcggtgttcgagaagtacacggccagcgtgaccgttggcagcaaggaggtgaccctgaacctctacgacacggccgccttggcagggccttggccggctcttcactcctggaggccgctcaggggcgctggctgcggggccctagaggccaagccctatacaaagcagtgggctgctcttgggcctcccatggttccaggattgctgcgctacctgctgtggtctctgcagactctggccaccccgggccaacggccaagggaaggcccccacgcgcacacgccccgggcagaggccacggcaggccaagagccagcccgggacccaaagggctcggcaaggaaccccgaaccccaacgcccgcgggggaaaggggtccgggcagcacccaagcagggggtcaggggcatgagcatcccagcacagccccacgcctccacccgggcaggctcggagcggcgttcggaagcagcgccgcctgctgtcctccttcactggcagctgtgacagtgacctgctcaagttcaaccagctcaagttccggaagaaaaagctcaagttctgcaagagccacattcacgactggggcttgttcgccatggagccctcgggggatcctctagagtcagcctggattcatgcacgaaacgcacccacaaccacaccaagccaaactccccacccccccccgcgggaggccggcaacccgaacccgcccccccgggcccccgaggcgcgcggccccgggcacgacaaggcggcacaaaaggcctgcgtccacggaggccccaacacacagcatccccgcccgcagccggagcccgctgtccccccggccgcgctcgctcctcctcccaaacaccagctttcttcacaggcttcgagcccgtcgcggctgggccgggctgcagagagaccccacaaaacacagcaacgtcaaacgccaacacacaccgggccccgcgccgccgccaccgccgaacacgcaccacaagcgctcccccccccggcccccgcgccccactacaaccgcacccgacccgcccagctccgaaacccccccacccccaagaagggcagcgaagagccagcccagccaacgaagcacacccccgcgacgcccgccaagcgggaccccaagggcggaggtgcgcgccgccggccggcgcggcctctgcagccgcacagcggcggggaggaggacgagaaggagtcagngcaggcgtcctcgtcctcatccgcgtcatcatccacggggtcctcaaccacctcaccctcgtcccgcgcctccgacaaggaggaggaacaggagagccccgaggaggaagaggaggcggaggaggaggaggaggaggaagtccccaggagccagctctcctcctcctcaacctcatccacatcagataaggatgacgacgatgacgacagtgatgaccgggacgagtctgagaacgatcacgaggacacagccctgtcagaggcgagtgagaaggacgaaggggactcgggctctgctgtggtcttgggattctgtgggcggtcgctgctgccctctggtggtcagaccgtgccttgcttgcactgtgagaaccttgaccatggaactgccaggttggcggttttcctccacgaagtgaggtttacatga

SEQ ID NO: 123958 - DNA, 2076 bp, Homo sapiens
ctacgaggaattatgctgtggcaacgaggcatgaatcaggacagagggatgtcctattttacagacggcccagaagcaaagaagggtcttgcttcctggtccactacaactgcctagttgagccgtgacagcacggattactggttcctcacaacgaccatgggaagcgtagatggacttgctgattccccggctgggtgaactgaggtgccccacctggtcaaacttgcgctgcttcttctccagagtgctcacaagctgccgctgctgctccaggtccatggtggcgtcgtccagctcctgctgcagtcgactctgcctgttggccaccaatctggagcctcccatacaattttctactcctttgaaaagaaaaggctcatccatcttcacaaccaggttctccactttcaacagccatggcacggaagacattgaactaatactctgggcctgggcagtctgcagtgtcacaggccacgcccgttccctggcagctgcctcctcctccagctgctcacgcagcccggctgcctcagcctccatggctcgcacccgggaccccaaggccaatttcgccctggtctcctcctgcagcagctcctgggcatcgtgcagctgggcttctgtgctgctcagctccttgctaagacggatggttttggactcagcctcgttcagcgccccagacacattctccagttcagcctgtgaaagttctgaaagctttgtccctgcttgtaccatttcttccacacgaatgtccaaaggcatgcaccatttgtggcgaacccatttctgttgactcacatccagatttccaccaaacatcctgccatcgtaggaacaacggagctcctgctgtgcgttggtggagtccagcgtgtcctccagctcgccccgcagcgcctccagctcctcgcccaggtcccggcgctgcttctccgccttggtcctggccacacgctcagactccaggtcctcctgggcctcggccagggctgcttgagcctcccgcagggatttcagcagctgggcccgggccccaccctcgtcttctgcccgctgccggaactcctggaagaggatgcggttggggaagccctggcgacagatgcggatgccctccaggaccccgttgcagcgaagctggtccagcaccagccgtggctccagcttcccggccttggtaaacagccgccaccactgccagtgtctcagcttgaggtaggccgcgcagttccgctgcatcaccctcagggcgctctgctgctgctggcgcttctggaaggcctgcagtctctgcttcccagagttcacagcccattcctccatgacacatttcgcaggcaccgtcccgtgcctgcgtccctgcagctgaactccttcgagcagctctgcataactacaccacagaagctgcagcagctcttcaaccacaccatgttcgtgtctccccctgctgtcaatgtccaggccaaccccgctggactcctggccctgctggatgaggagtgctggttcccgaaggccacagacaagtcgtttgtggagaaggtagcccaggagcagggcggccaccccaagttccaagcggccgaggcacctgcgggatcaggccgacttcagtgttctccactacgcgggcaaggtcgactacaaggccaacgagtggctgatgaaaaacatggaccctctgaatgacaacgtcgcagccttgctccaccagagcacagaccggctgacggcagagatctggaaagacgtggagggcatcgtggggctggaacaggtgagcagcctgggcgacggcccaccaggtggccgcccccgtcggggtatgttccggacagtgggacagctctacaaggagtccctgagccgcctcatggccacactcagcaacaccaaccccagttttgtccggtgcattgtccccaaccacgagaagagggccgggaagctggagccacggctggtgctggaccagcttcgctgcaacggggtcctggagggcatccgcatctgtcgccagggcttccccaaccgcatcctcttccaggagttccggcagcg

SEQ ID NO: 123959 - DNA, 536 bp, Homo sapiens
tgttggttgtatgggttgctctaagggaccttggagacaggcctttcaggtggatgttcatgtttctgaccttgcactaccccaatgtaggctccaaacaggcatgcgaggtgcctttggaaagccccagggcactgtggccagggttcacattggccaagttatcatgtccatccgcaccaagctgcagaacaaggagcatgtgattgaggccctgcgcagggccaagttcaagtttcctggccgccagaaggtatgtagtgctgcagcccccttctcccacctttgccccaggcctcctgactcagttctttccattgctccttagatccacatctcaaagaagtggggcttcaccaagttcaatgctgatgaatttgaagacatggtggctgaaaagcggctcatcccagatggctgtggggtcaagtacatccccagtcgtggccctctggacaagtggcgggccctgcactcatgagggcttccaatgtgctgcccccctcttaatactcaccaataaattctacttcctg

SEQ ID NO: 123960 - DNA, 544 bp, Homo sapiens
tcagatgaatatgatcaactctgctctgaagccctggtgggggcccaaatttgtgccaagaagtacatagtaaaatgctgcggcaaaaatggctttcatatccgagtgcggctgcaccccttccacgtcatctgcatcaacaggatgttggcctgtgctgggactgacaggctccaaacaggtatgggaggtgccattggaaagcccgcaaggcactgtggccaggattctcattggccaagttatcatgtccattcgcaccaagctgcagaacaaggagcatgtgattgaggccctgcgcagggccaagttcaagtttcctggccgccagaagatccacatctcaaagaagtggggcttcaccaagttcaatgctgatgaatttgaagacatggtggctgaaaagcggctcatcccagatggctgtggggtcaagtacatccccagtcgtggccctctggacaagtggcgggccctgcactcatgagggcttccaatgtgctgcccccctcttaatactcaccaataaattctacttcctgtc

SEQ ID NO: 123961 - DNA, 465 bp, Homo sapiens
agtttattcaattagtcatctattgctgaacaattcagttgtgtagtctttagctattataattcgttgctggaccttctttctgtatctttagcggtagcaaatctctgctactgggaggtttgatgaatgattctgcaaattaaggaagtgatcatggtgaacaatatggtttatgagaccttcaagatagtaatcttatacggcccttaagtactgaccctgatttctttttctggctcatatggtgttgagggtaaattacaagagggagctgaaaagttctgagcaaaagatctgatggaggagccctgcagacactgctaatggccttcgtagcatccatctctttcttgctcactgccagaaccctgcctcttgtacagggcagcaacattttcaaccgaaactactcccagcctcccagggatggccaggtaacacagtccgaattccaccgcagtg

SEQ ID NO: 123962 - DNA, 3054 bp, Homo sapiens
gtcctacttacattgtaaatgggccacaatggaagagctcgaaaaggatcctcgcatcgcacagaagatcaagcgatttaggaataaacaagcccagatgaagcacatttttacggagcctgatgaagacttgttcaatccagactatgtagaagttgatcgcatcttggaggtggcccacaccaaggatgcagaaacaggggaggaggtaacacattacctggtgaagtggtgctcactaccatatgaagaaagcacgtgggagctagaggaagatgtagatcctgcaaaagttaaagaatttgaatctcttcaagttctccctgaaattaagcatgtggagcggcctgcttcagactcctggcagaaacttgagaagtctcgcgagtataagaacagtaaccagctccgggagtaccagctggaagggatgaactggcttctttttaactggtataacagaaaaaactgtattttggctgatgagatgggcctagggaaaaccatccagtccatcacattcctttcagaaatatttctgagaggaatccacggcccttttctcattatcgcccctctctccaccatcactaactgggagcgggagttccggacatggacagagatgaatgccattgtgtaccacggcagccagatcagcaggcagatgatccagcagtatgaaatggtgtacagagacgcccagggaaaccccctttcaggagtcttcaagttccacgtcgtcatcacaacatttgaaatgatcctagcagactgcccagagttgaagaagattcactggagctgtgtgataattgatgaagcccacagactgaagaataggaactgcaaacttctggagggtctaaagcttatggccctggaacataaagtgcttctcactggaacacccttgcagaactctgtggaggagctcttcagtttgttaaattttctggagccatcacagtttccttcagagaccgctttcttggaggaatttggagatctgaaaacagaggagcaggtaaagaaactgcagtctatcctaaaaccaatgatgcttcggcggctgaaagatgatgtggaaaagaaccttgctcccaaacaagagacgatcattgaggtggaactgaccaatatccagaaaaagtactaccgtgccatcctcgagaagaacttttccttcctgaccaagggggcaaatcagcacaacatgcccaatctcatcaacaccatgatggagctgaggaagtgctgtaaccatccctacctgatcaatggtgcagaggagaaaattctagaagatttccgaaaaacccacagccctgatgcccctgactttcagctgcagggtgatgattcaggcaggcaggaaagcttgtgttgattgataaactactccctaagctgattgcaggtggccacaaagtactcatcttctcccagatggtgcgctgcctcgacatcctagaagattacctcatccagagaaggtacacctatgagcgaattgatgggcgagtacggggaaacctgcgccaggcagccatcgaccggttctgtaagccagattcagaccgctttgtctttcttctgtgcaccagagcgggaggcctggggatcaatctcacagctgctgatacctgcatcatatttgattctgactggaacccacaaaatgacttgcaggtccctgaaggcagaattcagaaagtgtgggagcagatgtcctggccaagagcacagccacaagataatgcagctgctgcatgtctgcaggattttggaagtcagttgggagtccagagtgaggagacaggccctttccacaatcgccagaagcaggactcaggaaactcccacactgctccgaggggaagagaatcattcatcaaacctcccagtagcagagatttgctaccgctaaagatacagaaagaaggtccagcaacgaattataatagctaaccgaaagacgctgatgacacatcaatctacatgttttatcaaaaggtcggcgacaactcaatcgacagctggaaaaacgcgggccgtgtctttaaagacagcgataagttcgacgccaacgatccgatcctgaaagatcagacgcaagaatggtccggttctgcaacctttacatctgacggaaaaatccgtttattctacactgactattccggtaaacattacggcaaacaaagcctgacaacagcgcaggtaaatgtgtcaaaatctgatgacacactcaaaatcaacggagtggaagatcacaaaacgatttttgacggagacggaaaaacatatcagaacgttcagcagtttatcgatgaaggcaattatacatccggcgacaaccatacgctgagagaccctcactacgttgaagacaaaggccataaataccttgtattcgaagccaacacgggaacagaaaacggataccaaggcgaagaatctttatttaacaaagcgtactacggcggcggcacgaacttcttccgtaaagaaagccagaagcttcagcagagcgctaaaaaacgcgatgctgagttagcgaacggcgccctcggtatcatagagttaaataatgattacacattgaaaaaagtaatgaagccgctgatcacttcaaacacggtaactgatgaaatcgagcgcgcgaatgttttcaaaatgaacggcaaatggtacttgttcactgattcacgcggttcaaaaatgacgatcgatggtattaactcaaacgatatttacatgcttggttatgtatcaaactctttaaccggcccttacaagccgctgaacaaaacagggcttgtgctgcaaatgggtcttgatccaaacgatgtgacattcacttactctcacttcgcagtgccgcaagccaaaggcaacaatgtggttatcacaagctacatgacaaacagaggcttcttcgaggataaaaaggcaacatttgcgccaagcttcttaatgaacatcaaaggcaataaaacatccgttgtcaaaaacagcatcctggagcaaggacagctgacagtcaactaa

SEQ ID NO: 123963 - DNA, 402 bp, Homo sapiens
caagtgcagagctctttgctccaggagtgaggagactgggaggtgaaatggggaaatggaagggtttggaggcagagctgaaaacagggttggaaggatttcctgaattagaagacaaacgttagcatacccagtaaggaaaatgagtgcaggggccaggggaacccgtgaggatcactctcaaatgagattaaaaacaaggaagcagagaatggtcagagaatgggattcagattgggaacttgtggggatgagagtgaccaggttgaactgggaagtggaaaaaggagtttgagtcactggcacctagaagcctgcccacgattcctaggaaggctggcagacaccctggaaccctggggagctactggcaaaattttctggaatggggccggatttttg

SEQ ID NO: 123964 - DNA, 1713 bp, Homo sapiens
atgtttgagaaagctgccagacaggagtggatccaggtcgcaaaaagtgtcaccagagtggctatgagttcctacacctttcagaagaacccagacttaataagcgttggtgaggatgtggagaagaaattggagctctcatacgctgctgtcaccatggcctggggccagtatggcgattatggatacccataccagcagtatcatgactacagcgatgatgggtgggtgaatttgaaccggcaaggcttcagctaccagtgtccccaggggcaggtgatagtggccgtgaggagcatcttcagcaagaaggaagctgactctgtcagcagagccagtgccacaggaccagattcagggcagttcttcctcctggagagggtggggacctgcaagaccacagcagaagcccagccccagagggatgatccctacttggttaccaggactgtggaggggctcagccggactgtagaaggggtggggagaggactcacacaggcagcagcaggtgagggtgccggggctgtggaggctgcttggacagcctttgtgggccattctcatccacccccatggcctctgatgaggaaactgaggctattagagggcacgaaacccgcccagatgatacagctaagaacagtggagccatccagcagcatagccaatgctcttggccactctactatctgctccccacagtgtgaaaaggtaccagacgtgctccaacaatgggctggtggcaggattccagagccgctacttcgagtcagtgctggatcgggagtggcagttttactgttgtcgctacagcaagaggtgcccatattcctgctggtgagtctggcagccgaccaaaccctcatgactcctggggtgggagaggcacctaggaagtgctctagcttcagaaaaggaaacagaaccatagagccggcactgactggcccaaagtcacccacctactctgtgggaatgccaagtcttaagcttaggcctaatgactcccatcccagtgctgttctccttctccccaacttctggctaacaacagaatatccaggtcactatggtgaggaaatggacatgatttcctacaattatgattactatatccgaggagcaacaaccactttctctgcagtggaaaggaaagaagagagaagagaaagaaaagggattggagataagaaacacacagaacctactgtcttagtctgggctgctataccacattaccttagactgggtaacttacgaacaatagaaatttattttcacagttctggaagctggaaagtccaagatcaagtggacccagaagaagagccagccaggcaaaaccacagggatcgcgtaccttgccatacaccccctctaggtggtcaagaaggtgactctcagccagtggtgatgagagcaaaggatcactatgagctggagaaacagaaggcattaggacaggtagaagatgaagaagacttatgccagcagcagagactgcctgagcaaacctatggaagtgaggaggctcctcaagaagccaagaaaaaccttgggtctcctgaacccaattctcaggctggagcccagaagccaatctctatggccaccaacagagctgtctttgatgttacgtgcaacttcagtccacactggcttcagtgccttcagagcaggtctctatctcctgaagatccaggtctttga

SEQ ID NO: 123965 - DNA, 1808 bp, Homo sapiens
  misc_feature (1)...(1808): n = a,t,c or g
aaaaaatatacgtcgccagcccgcggtagtaaactttgatcctttaaaacggcccccccnnnnnnnnnnnnnncagcatagtgaacgttaatatttttatttcttttgtaatgaagagtacaaatggttgggagcaggacatcacaggaggaggaaagatagcgccatctctgtcagaagaactcctgagccacacacaggaaggaaagttgatccccaggggcagcctttcccaccaaaaaaatcagggcccaatccagggagagtttgccagtagctccccagggttccagggtgtctgccagccttcctaaggaatcgtgggcaggcttctaggtgccagtgacttcaaactccttttttccacttcccaagttcaacctggtcactctcatccccacaagttcccaatcttgaatccccattctcttgaccattgttgggctgcctagtctctcatcacataaaagactgctcgttctaagagatatgtacgtggcctaggcactcatttgtcctcctgaggtatgctagcgtttgtcttctaattcaaggaaatccttccaaccctgttttcaagctctgcctccaaacccttccatttccccatttcaccctcccagtctcctcactcctgggagcaaagcagctctgcacttgggattggctaagcatgcatgggctcaagtgggagcaggggagtgggaagatgtccctcagggcagaaagcttgcttttgggtggggaacctacgtatcattcatacaggcttagctgtagagaaccttcactgcacctctcctccagttctgcctctcccctccactatgcttgaacttgcagttcattctgcagtaaaaagcagtagccaggctgcagctggtgctcccagaagcccggctgtaagcatgcgcactgtatatgtggtgtgcaaggaagccatcatcagtcatataaagcagttgcttatgaaacatgtgaaaagtgagaaacatggtttaattgtggattttattagaagtgtgatactagtcagaaaggcccaggaagttggcattgcagttaccagctcagggagaaggaaagagagcagcagaaacttctataggagatccaactgatgttaacatatgtggacaccctcctgtcccctggcccctttcctttcacccagatttggtatgtggcaaatctaaacatttgcaaattcacagtcgtattcagtcatccggcacattatgaacttccactgggcgatccctttccactgcagagaaagtgggttgttgctcctcggatatagtaatcataattgtaggaaatcatgtccatttcctcaccaaaatgacctgaaatattctggttgttaggccagcaggaatatgggcacctctttgctgtaggcgacaacagtaaaactgccactcccgatccagcactgactcgaagtagcggctctgggaatcctgccaccagcccattgttggagcacgttctggtaccattccatgccagccctgttgatctcctcccaccagcactccgtgggggttccccgaggctctgtggcgtgggcatgcaggcgtagttccattgtctgtcagaaccttccttcttgctgaagatgctcctcacggccactatcacctgcccctggggacactggtagctgaagcccttgccggttcaaattcacccacccatcatcgctgtagtcatgatactgctggtatgggtatccataatcgccactactgcccccaggccatggtgactaggggcagaagtccccaaagaagactgaggtc

SEQ ID NO: 123966 - DNA, 622 bp, Homo sapiens
aatctttcagataggcacagaggctcacacctggaatcccagcactttcagagactgaagcaggaggatcttttgagcccaagaattcaagaccagcctgggcaacattgggaaaccttgtctcatatcaacattgtcgtcattggacacgtagattcgggcaagtccaccactactggccatctgatctataaatgcggtggcatcgacaaaagaaccattgaaaaatttgagaaggaggctgctgagatgggaaagggctccttcaagtatgcctgggtcttggataaactgaaagctgagcgtgcaacgtggtatcaccattgatatctccttgtggaaatttgagaccagcaagtactatgtgactatcattgatgccccaggacacagagactttatcaaaaacatgattacagggaacatctcaggctgactgtgctgtcctgattgttgctgctggtgttggtgaatttggaagctggtatctccaagaaatgggcagaccccgagagcatgcccttcctggcttagccagaagagatatgaggaaattgttaaggaagtcagcacttacattaagaaaattggctacacccccgacacagtagcatgtgtgcca

SEQ ID NO: 123967 - DNA, 1175 bp, Homo sapiens
gtagtgcagacccaaatcagcaaaactgctgatgagctgatttcctactggggaacaagcttcccacctccctttgctgcatccttaaccttgtatgagcttgaatattgtatcaccattgatatctccctgtggaaatttgagaccagcaagtactacgcgactgtcattgatgccccaggacacagagacttcatcaaaaacatgattacagggacatctcaggctgactgtgctgtcctgatttttgctgctggtgttggtgaatttgaagctgtcacctttgctccggtcaatgtcacaactgaagtcaagtctgttgaaatgcaccatgaagttttgagtgaagctcttcctggggacaatgtggacttcgatgtcaagaatgtgtctgtcaaggaggttcatcatggcaacgttgctggccaaatcagtgctggctgtgctcccgtactggattgccacatggctcacattgcatgcaagtttgctaagctgaagaaaaagactggtagcacttctggtaaaaagctggaagatggccctactttcttgaagtctggtgatgctgccatcgttgatatggttcctggcaagcccatgtgtgttgagagcttctcagtctacccacctctgagtcgctttgctgtttgtgatatgagacagacagttgctgtgggtgtcatcgaagcaatggacaagatggctgcgtggagctggcaaggtcaccatgtctgcccagaaagctcataatgctaaatgaatattatccctaatacctgccaccccactcttaatcagtggtggaagaacggtctcagaactgtttgtttcacattggccatttaagtttagctgttaaaagactggtttaatgataccaatgcatcgtaaaaacctttcaaaggaaagggagaatgttttgtgggccccttttgggtttatttttttggcgcggggccgttttaaagttattaagttttttaaaatcccgacttttttaatgggaaccaacttgaccaaaaaatttgtcacaaaaattttgggaacccattaaaaagggtaaatggggaaaaaaaaactgtgggggggcgggccgtttttaaagataccttggggggccccaaagtttaccccggcttagcaaaggaatttcttttttccctataagggag

SEQ ID NO: 123968 - DNA, 618 bp, Homo sapiens
atggtgcaggcccggccaggagcccaccccaccctgctgccagggcccaccgcagcctgggtcagtggcttctccgggggtggcagcgacctgacaggggcccgggaggcccaggagcgaggccgctggagtcccactgagagctcgtcagcctccgtgtcgcctgtggctaaggtctccaaattcacactctcctcagagctggagggcggggactaccccaaggagagggagaggaccggcggaggcccgggcaggcctcctgactggacaccccatgggaccggggcacctgcagagcccacacccacgcacagcccctgcaccccacccgacaccttgccccggccgccccagggacgccgggcagcgcagtcctggagcccccgcttggagtccccgcgtgcaccggccaaccccgagccttctgccaccccgccgctggaccgcagcagctctgtgggctgcctggcagaggcctctgcccgcttcccagcccggacgaggaacctctccggggaacccaggaccaggcaggactcccccaagccctcaggaagtggggagcccagggcacatccacatcagcctgaggacagggttccccccaacgcttag

SEQ ID NO: 123969 - DNA, 406 bp, Homo sapiens
  misc_feature (1)...(406): n = a,t,c or g
caatgaacaagccgtgcagtgagacccccaagaggcccatttcccccaataaaaaagatttgggagtctgnnnnnnnnnnnnnnnnnnnnnnnnnnnnnnnnnnnnnnnnnnnnnnnnnnnnnnnnnnnnnnnnnnnnnnnnnnnnnnnnnnnnnnnnnnncttnnnnnnnnnnntaggggggggcccccaaatacccccgggaagaaaaaaaaannnnnnnnnnnnngaggggggaaaaaaaaaccccccggggggggagnnnnnnnnnnnncttttttnnnnnnnnnnnaaaaacccccacccccccnnnnnnnnnnntaccggggggnnnnnnnnnnnnnntttttagannnnnnnnnnaaaaaaaacatttttttttgtgggnnnnnnnnnnntaaacaaat

SEQ ID NO: 123970 - DNA, 2122 bp, Homo sapiens
atgagaggggtttcctgtctccaggtcctgctccttctggtgctggcctgcgggcagccccgcatgtccagtcggatcgttgggggccgggatggccgggacggagagtggccgtggcaggcgagcatccagcatcgtggggcacacgtgtgcggggggtcgctcatcgccccccagtgggtgctgacagcggcgcactgcttccccaggagggcactgccagctgagtaccgcgtgcgcctgggggcgctgcgtctgggctccacctcgccccgcacgctctcggtgcccgtgcgacgggtgctgctgcccccggactactccgaggacggggcccgcggcgacctggcactgctgcagctgcgtcgcccggtgcccctgagcgctcgcgtccaacccgtctgcctgcccgtgcccggcgcccgcccgccgcccggcacaccatgccgggtcaccggctggggcagcctccgcccaggagagtggcgaccgctacaaggagtaagggtgccgctgctggactcgcgcacctgcgacggcctctaccacgtgggcgcggacgtgccccaggctgagcgcattgtgctgcctgggagtctgtgtgccggctacccccagggccacaaggacgcctgccagggtgattctgggggacctctgacctgcctgcagtctgggagctgggtcctggtgggcgtggtgagctggggcaagggttgtgccctgcccaaccgtccaggggtctacaccagtgtggccacatatagcccctggattcaggctcgcacccacagccgcaaggcactggattctggcagcaccctgaaggagctgggaaagccaggaccacccgttccaatagatagaggtcagtttccacagctgcagaaggaaaagaaacaaaacctggaaaattcaaaacctactctggagctgacaggggctatcagcagaagggaagggaagataagggaaggtggagaacagaccatgctgcagtacagcttggccaccactggtgtggtcatcaggcaccagcccaaggagttcgcccgggccatccctaagcccaacagcagcccccagggctcttcacaggtcataagcccctctgagcggcgacagtcctcgcatccagcccggcacggcggccagaagaccccaaatgcggagcctgcccaagatggcggccacgactacgccgcgacaagacggccccgagctcggtgtgcccgagcttggagcccgccggaccgcaccaacacggggacctcccctctgccagtcccaagacggcgccaccgcctccaaaggccatgcccgccgtcgggatggcggccgcacgcccctcgataccgcccgcttccagatcacttaaaatggcggcggctgcggggcggcacggggcggggctgcgccgggggaagggacgcggcgcggggcatgctgggccacgcgcgggctgccgggaacggggcggagcgcggctgcgccggcgcgtcgaggggagaggcagcagctcgcgatggacgtgttcctcatgatccggcgccacaagaccaccatcttcacggacgccaaggagtccagcacggtgtttcgaaactgaagcgcattcgtcgagggcaatcctcaaagcggcctcctgacgagcagcggctgttacaaggaatgaccaactcttggattgatgggcaagacactgggcgagtgtggctttcaccagtcaaaacaggcaccggccacaggccccagccacagtggggtctggccttccggcgagctctgctgcttcctccacagatgacacctttgaggccctgtgcatcgagccgttttccagcgccgccagagctggcccgatgttgatggaaggccccagggatttggggaaggcagtgcccaattgaacaaggccgtgcaagttgagaccccccaagaagggcccattttcccccaattaaaaggagatttggggagtctgcctggttgctgcctctttttcccgcccctccctgggatgggtcccactccctgtgggctccttttggggcttgtgcttggcagttcctgtgctgtcctgtctcccagatcctgagaccctggctgagaacttggccca

SEQ ID NO: 123971 - DNA, 697 bp, Homo sapiens
atggcgcacgctgggagaacggggtacgataaccgggagatagtgatgaagtacatccattataagctgtcgcagaggggctacgagtgggatgcgggagatgtgggcgccgcgcccccgggggccgcccccgcaccgggcatcttctcctcccagcccgggcacacgccccatccagccgcatcccgggacccggtcgccaggacctcgccgctgcagaccccggctgcccccggcgccgccgcggggcctgcgctcagcccggtgccacctgtggtccacctggccctccgccaagccggcgacgacttctcccgccgctaccgcggcgacttcgccgagatgtccagccagctgcacctgacgcccttcaccgcgcggggacgctttgccacggtggtggaggagctcttcagggacgggagcgtcaaccgggagatgtcgcccctgtgtggacaacatcgccctgtggatgactgagtacctgaaccgggacctgcacacctggatccaggataacggaggctggccatgggactttctcataggtgccaccacccctgtgaccatcccctacctgccttatcattccaccgaagaatgccagctaataaatgtgaagggaacagcagaatttaaaataccctttgccaagcccgatgaaatgattcaggcaaagatcattgatggatgttaa

SEQ ID NO: 123972 - DNA, 422 bp, Homo sapiens
cctgtagcctgaagaactggagagaggttctggctttgctactgacatactcaggcacagagaaatttcccgagctctgtggacctgatggagaaggtgatggttcttaacaggagcttggagcaactgcggggtcctcatggggttctgctgtcttgggccaacagtctccccctttccccttcccccggattgttgtgggagctaccctccactctaaagagacatcatcttacagattgggatcccagccttctcaccaggtcccaactccatctccaaggccaagggttttcacccctcagtcatcaccagcgatgcccttggcaccttcccatcctagcccttatcagggtcccaggacacagaatataagtgactacagggcacctgggccccaggccatccagcctttgcctttg

SEQ ID NO: 123973 - DNA, 852 bp, Homo sapiens
ggtgatgttcagcggacactcatccaagtggactttggcgatggtatcgcggtgtcttacgtcaatctcagctccatggaagatgggatcaaacacgtctatcagaacgtgggcattttccgtgtgaccgtgcaggcacttgtccggctgcccccccacatctcacagtgtgacgaagtcttccggttcttcgaggctcgacccgaggatgtcaaccctccaaaagaccaggctctcctgcttggggaactgggtccggccgtggagctgtgtctgaaggaggagcgctttgctgatgccattatcctggcccaggctgggggtacagatctgctgaagcaaacacaggagcgctacttggccaagaagaaaaccaaaatctcctcgcttctagcctgtgttgtgcaaaagaattggaaggatgtggtgtgtacctgtagcctgaagaactggagagaggcactggctttgctactgacatactcaggcacagagaaatttcccgagctctgtgacatgctgggaactcgcatggaacaggagggcagcagggcactaacctccgaagccagactctgttatgtgtgctcagggagtgtggagcggctggtggagtgctgggcaaaatgccaccaggctttgtcccccatggctctgcaggacatgcatgttatcagcaccgatgagaatcaggtgttcgcagcggtccaagaatggaaccagaatgacacgtacaacctctacatctcagacacacgtggtgtctacttcaccctggccttggagaatgtccagagcagcagaggccctgagggcaacatcatgatcgacctctatgaggtcaccatctag

SEQ ID NO: 123974 - DNA, 868 bp, Homo sapiens
ggaattcgtctccccctttccccttcccccggattgttgtgggagctaccctccactctaaagagacatcatcttacagattgggatcccagccttctcaccaggtcccaactccatctccaaggccaagggttttcacccctcagtcatcaccagcgatgcccttggcaccttcccatcctagcccttatcagggtcccaggacacagaatataagtgactacagggcacctgggccccaggccatccagcctttgcctttgagccctggggtaaggcctggacctcaagattcctggaaagaagccccagcccccaggggaaacctccagaggaacaagctgccagagacatttatgcccccagcaccaattactggtcccagttaatgagcctcacccctgagctacaagggattcttccctcacagcccccctgtctccagtgtgagtcatgctcccccaggagttccaggagaactcagcctgcaggtgacaaggacaatgtattcccctcccttgggaaacctcccagccctccttgtgtgcaggtcatggtagatgggcctcattcctcaaggcatgtgctgagggagactgggtgcaggtaccaggtgtccttactgcagagaaagggaggctgctcatctccccaactctgctgtaatgggaacagtgtgactgtgagtcactggggactagtccttagggaagccatgagaaggacagcttgcccctctggcctttctccctgcttctttatcagcagcttcagcacctgccacctgagaagatggaaaggaaggagctgcccccagagcatcagtccttgaagagcagctttgaggcgcttctccaacgctgctccc

SEQ ID NO: 123975 - DNA, 2328 bp, Homo sapiens
atgaagctgaaggaacttgagcggccagctgtccaggcatggagcccagccagccaataccctttgtatctggccacaggaacatctgcccaacagctagattcctccttcagcacaaatggcacattggaaatatttgaggttgatttcagggacccttctctggacttgaaacacagaggagtcctttctgccttgagcaggtttcacaagctggtctgggggagctttggcagtgggcttctggaaagctccggggttattgttggcggcggggacaatggcatgcttattctatacaatgtgacccacatcctgtcttcggggaaggagcctgtgattgctcagaaacagaagcacacgggggctgtcagagccctcgacttgaatcctttccagcctccagaggacatcaaggcactgtcttggaaccggcaagcccaacacattctgtcttctgctcaccccagtggcaaggcagttgtgtgggatctcaggaagaatgaacctatcatcaaagtcagtgatcacagcaacaggatgcactgctcaggcctggcctggcatcctgacatagccacccagttagtgctgtgctcagaggatgatcgacttcccgtgattcagctgtgggacttgcgctttgcctcctcgcccttgaaggtgctggagagccacagcagggggatcttgtcagtgtcatggagccaggctgatgctgagctgctgctcactagtgctaaggacagccagatcttgtgccggaacctggggagcagtgagccttgcccccgcctagtcttcatcagtcaagtcaccacagaatctgaattcctgatgcgatcagctgagctgcaggaggccttgggatcaggaaatctactgaattactgtcagaacaagagccagcaagctttactgcaaagtgaaaagatgctgtggcagttcctgaaggtgaccttagagcaagactccagaatgaaattcctaaagcttttaggatacagtaaagatgagcttcagaagaaggtggccacatggttgaagagtgacgtggggctaggtgagagtcctcagcccaagggaaatgacctcaacagtgacagacaacaggccttctgcagccaggcctccaaacacaccacaaaggaagcctctgcttcctcagccttctttgatgagctggtccctcagaacatgactccttgggagatccccatcacaaaagatattgatggactcctaagccaggctctcctgcttggggaactgggtccggccgtggagctgtgtctgaaggaggagcgctttgctgatgccattatcctggcccaggctgggggtacagatctgctgaagcaaacacaggagcgctacttggccaagaagaaaaccaaaatctcctcgcttctagcctgtgttgtgcaaaagaattggaaggatgtggtgtgtacctgtagcctgaagaactggagagaggcactggctttgctactgacatactcaggcacagagaaatttcccgagctctgtgacatgctgggaactcgcatggaacaggagggcagcagggcactaacctccgaagccagactctgttatgtgtgctcagggagtgtggagcggctggtggagtgctgggcaaaatgccaccaggctttgtcccccatggctctgcaggacctgatggagaaggtgatggttcttaacaggagcttggagcaactgcggggtcctcatggggtgagcccaggccctgccacaacctacagggtcactcagtatgccaacctcctggcagcccagggcagcctggccactgccatgagctttctacccagggactgtgctcagctgccagagacatttatgcccccagcaccaattactgctccagttatgagcctcacccctgagctacaagggattcttccctcacagccccctgtctccagtcagcttcagcacctgccacctgagaagatggaaaggaaggagctgcccccagagcatcagtccttgaagagcagctttgaggcgcttctccaacgctgctccctgtctgcaactgacttaaagacaaaaaggaagctggaagaggcagcccagcgtctggagtatctatatgagaagctctgtgaggggacactctcacctcatgtcgtggctgggctccatgaggttgcccgatgtgtggatgcaggaagctttgagcagggccttgcagtgcatgcccaggtggcgggctgtagcagcttcagcgaggtgtccagcttcatgcctatcctgaaggctgtcctcatcatcgctcataagctgctggtctaa

SEQ ID NO: 123976 - DNA, 3750 bp, Homo sapiens
ggtcagtgtcatggagccaggctgatgctgagctgctgctcactagtgctaaggacagccagatcttgtgccggaacctggggagcagtgaggtggtatataagctaccaacacagagcagctggtgctttgatgtgcagtggtgccctcgggacccttcagtgttctctgctgcctccttcaacggctggatcagtttgtactctgtgatgggtaggagctgggaagtccagcatatgagacaggctgacaagatctcctcttccttcagcaaaggccagcctctcccaccactgcaggtgccagagcaagtggcacaagcaccactgatacctcccctgaaaaaaccccccaaatggattagaagaccaacaggtgtttcatttgcttttggagggaagctggttacttttggcctccccagcacccctgcccatctggtgccacagccttgcccccgcctagtcttcatcagtcaagtcaccacagaatctgaattcctgatgcgatcagctgagctgcaggaggccttgggatcaggaaatctactgaattactgtcagaacaagagccagcaagctttactgcaaagtgaaaagatgctgtggcagttcctgaaggtgaccttagagcaagactccagaatgaaattcctaaagcttttaggatacagtaaagatgagcttcagaagaaggtggccacatggttgaagagtgacgtggggctaggtgagagtcctcagcccaagggaaatgacctcaacagtgacagacaacaggccttctgcagccaggcctccaaacacaccacaaaggaagcctctgcttcctcagccttctttgatgagctggtccctcagaacatgactccttgggagatccccatcacaaaagatattgatggactcctaagccaggctctcctgcttggggaactgggtccggccgtggagctgtgtctgaaggaggagcgctttgctgatgccattatcctggcccaggctgggggtacagatctgctgaagcaaacacaggagcgctacttggccaagaagaaaaccaaaatctcctcgcttctagcctgtgttgtgcaaaagaattggaaggatgtggtgtgtacctgtagcctgaagaactggagagaggcactggctttgctactgacatactcaggcacagagaaatttcccgagctctgtgacatgctgggaactcgcatggaacaggagggcagcagggcactaacctccgaagccagactctgttatgtgtgctcagggagtgtggagcggctggtggagtgctgggcaaaatgccaccaggctttgtcccccatggctctgcaggacctgatggagaaggtgatggttcttaacaggagcttggagcaactgcggggtcctcatggggtgagcccaggccctgccacaacctacagggtcactcagtatgccaacctcctggcagcccagggcagcctggccactgccatgagctttctacccagggactgtgctcagccaccagttcagcagctaagagatcggctttttcatgctcaaggttctgctgtcttgggccaacagtctccccctttccccttcccccggattgttgtgggagttaccctccactctaaagagacatcatcttacagattgggatccccagccttctcaccaggtcccaactccatctccaaggccaagggttttcacccctcagtcatcaccagcgatgcccttggcaccttcccatcctagcccttatcagggtcccaggacacagaatataagtgactacagggcacctgggccccaggccatccagcctttgcctttgagccctggggtaaggcctgcttcatctcagccacagctattaggagggcaaagggtgcaagttcctaacccggtgggattccctgggacatggcctcttcctggttcccctctacccatggcatgcccaggcatcatgcgacctggctctacctccctgcctgagactcctagactgttccctctgcttcctctgagaccactaggtcccggccgcatggtctcccacaccccagcccctcctgcaagcttccctgtgccataccttccaggggacccaggtgccccatgctctagtgtcctcccaaccactggcatcttgactcctcacccaggacctcaagattcctggaaagaagccccagcccccaggggaaacctccagaggaacaagctgccagagacatttatgcccccagcaccaattactgctccagttatgagcctcacccctgagctacaagggattcttccctcacagccccctgtctccagtgtgagtcatgctcccccaggagttccaggagaactcagcctgcagcagcttcagcacctgccacctgagaagatggaaaggaaggagctgcccccagagcatcagtccttgaagagcagctttgaggcgcttctccaacgctgctccctgtctgcaactgacttaaagacaaaaaggaagctggaagaggcagcccagcgtctggagtatctatatgagaagctctgtgaggggacactctcacctcatgtcgtggctgggctgcatgaggttgcccgatgtgtggatgcaggaagctttgagcagggccttgcagtgcatgcccaggtggcgggctgtagcagcttcagcgaggtgtccagcttcatgcctatcctgaagtctgtcctcatcatcgctcataagctgctggtctaaaccaagcagcctttctttgctaggaagccacttctgctgttacataactcctccctgcagaagaggggacttctgcaacagattctgtttctttttcccgactcttttccttgctgccaggtatgtgatgctgtatgcttggctccaaaccagctgagtgcctgctttttactcctttatgtctgggccttctagggatctgtccaaggacacttttcagggcggggaagccaggggcataggaatcagttctttcactcttccctaatacttacactctgtaaggacctggggcaggatatcttctcccccagggatcttctatttaagtggcttctgagagggtgaacaggattgttacttttaagcctacctctgctgtgacccatcatgtgggtcttttgtttctcccttctgtggtttatgagcctgcccttaccttttccctgcctctgacttggtatttccaggtccgtatttctctgtagcccagggtctggggtagagctgactgctgttcaccctttgaacaactcatggacgtgagggatgggtgctgagcagaaccaagagaggcaactttggcgctgttaaaatggaatttctcatctgccggcattattaagggtgggctaggttgggatggaaggtgaaagggatgaactgccttttgctggaagctgtcttaggctgtgagacaggagcaggggaaccaccagcctatggggaactgcaccttgactcacacctatgttggagcattaccacaaggccattccttctgtgatgataaagcccagttctggaattggagccatattaaggaatgattctcttccagcgctgctcctcaagggttgggggtccttatccctcacagccaccacatgtctcagggctaccttctccgattggatttgcatttgtggcactgtctttgatgcagtgatgtacttaatggtgcaataaagctgcttcgatttggaaaaaaaaaaa

SEQ ID NO: 123977 - DNA, 543 bp, Homo sapiens
ttttttggtcaggtcctacagcagtggttctcaaaatatttatttttcaacatttaggtccctttgataggcatggcaaaaagcccccaaaagtacctctctgctgctttcttcataccaatagagaaacagtctgcccatgttatcatttctgtactgctgtaacccacagcgtgaaatagactttacattcatgctttgtgagactgccttcctgacccgcttgtaggctgcttttgagaaccactaccccagacaacagggcatgtgtgtttaactggaaaatgtggaacacagtgctgagtacagatggcacttcctaagaaatggatggaaacgtctcccttggcactccccactgatgcagggtttgcctcccttcttctccagttgcaggctcctttagctgcaccatgaagtttacagtccgggactgtgaccctaacactggagttccagatgaggatgggtatgatgatgagtatgtggtgagtcttcccagcatagagactttctttgacaccttcacaacactaagtgact

SEQ ID NO: 123978 - DNA, 1173 bp, Homo sapiens
agaagcagagacagaatattttgttcgatgtatcaagcacatgtttaccaatcacatcgtgttccagcttttccatttactgacttttcagtttgactgcaccaacactctcaatgaccagctgctggaaaaagtgacagtgcagatggagccatcagagtcctatgaagtgctgtcttgtatcccagcccccagccttccttataaccaaccaggaatatgttacactcttgttcgtttgcctgatgatgaccctacagcagttgcaggctcctttagctgcaccatgaagtttacagtccgggactgtgaccctaacactggagttccagatgaggatggtaatgatgatgagtatgtgctggaagatctcgaagtgactgtgtctgaccatattcagaaagtactgaagcctaacttttgctgctgcttgggaagagggtgggagataccctttgagaaagaggaaacctttgccctcagttctaccaaaacccttgaagaggctgtcaacaaatatcatcacatttctgggcatgcagccatgtgagaggtccgtataaagtacctgagaaccaggatttcccattcgctctatctggcaggtatattcagaggtggctatgatttatttggtgagggccaggctggccttagccgatggagtgaccatgcaggtgacggtcagatgtaaacacagaacacctgtagatattatcttagcttctgttggataaatgcttgctggacaagaggaaactgatgcacactacatggtcagtgggcttttaggctagtggcatcagtttcccagaatcagacttttgaagatgaatgactttggagaagcaaattaaacatttggccctgagccagcagatcaagcaaatgtctatctttgcgcatgggttgttttttttttttttctttttattctacttggtcagctttgggacgatagtgcagctttgggtgatcttgaaaatcaaatactatcctatactccagctgcttaacttcattttattctttaatgtgtacctgaaagctcctggcaatgctggaaaatttttatcccagaggggtgggggggaggggggaggggaagccagagtccacttttgtcacaattcatttttattaatagaaaataaacacttattccagtttcaa

SEQ ID NO: 123979 - DNA, 464 bp, Homo sapiens
agaaagcctgggggtgaacacgccctgaggagtcagggaagccagagccagcggctgaagggcccttgcgtgcggctgcagcacaactgcaggttgtcagagaaaaatctccagctcagacccggttgtgcacaaagctcagaatggagcggccagcagggcatgtggctagaggaagaacatggccacccacccctccctcctcgtgtgccaggtgggcttgctaggggcacaggtgcccagtgtcagggcagggatgccacagagccgcaggcagactgaaggggcccagggcatggtcaggaacgaagaaggagggagcctgaggctctcccaccaccaggcctgcaaagccactcacactcagcagtggacacttgaggtcacggcccaggtgggctgagggaccccaataccacctgccttgaatctcagcccctcgtgccaagcttggcgtaatgatg

SEQ ID NO: 123980 - DNA, 1795 bp, Homo sapiens
gtggcagccagatatcgggccatacggaggactgctgaacgtggtggtggacggcctgttcatcatcgggtggatgtacctgcctccccatgacccccacgtcgatgaccctatgagattcaagcctctgttcaggatccacctgatggagaggaaggctgccacagtggagtgcatgtacggccacaaagggccccaccacggccacatccagattgtgaagaaggatgagttctccaccaagtgcaaccagacggaccaccacaggatgtccggcgggaggcaggaggagtttcggacgtggctgagggaggaatgggggcgcacgctggaggacatcttccacgagcacatgcaggagctcatcctgatgaagttcatctacaccagtcagtacgacaactgcctgacctaccgccgcatctacctgccgcccagccgccccgacgacctcatcaagcctggcctcttcaaaggtacctatggcagccacggcctggagattgtgatgctcagcttccacggccggcgtgccaggggcaccaagatcacgggcgaccccaacatccccgctgggcagcagacagtggagatcgacctgaggcatcggatccagctgcccgacctcgagaaccagcgcaacttcaatgagctctcccgcatcgtcctggaggtgcgcgagagggtgcgccaggagcagcaggaaggcgggcacgaggcgggcgagggtcgtggccggcagggcccccgggagtcccagccaagccctgcccagcccagggcagaggcgcccagcaagggcccagatgggacacctggtgaggatggtggcgagcctggggatgccgtagctgcggccgagcagcctgcccagtgtgggcaggggcagccgttcgtgctgcccgtgggcgtgagctccaggaatgaggactacccccgaacctgcaggatgtgtttttatggcacaggcctcatcgcgggccacggcttcaccagccctgaacgcacccccggggtcttcatcctcttcgatgaggaccgcttcgggttcgtctggctggagctgaaatccttcagcctgtacagccgggtccaggccaccttccggaacgcagatgcgccgtccccacaggccttcgatgagatgctcaagaacatatcagtccctcacctcctgaccggacacatacttgccgccacatcccgggtggctctggggctctgaactctgacctgtgaatagaagcagcatgcactttggaaatgcgggcttttgaccagaacgcacacctcgtcggtgggcccagaccagccaccccccagcactttatgtagagagtgtgacgtaaacctgcatatttgtcagcgccatgatggaagaagctgagcatgtcttaccaaaaacagacagaacgagttctttatacagcagatgtaggggacagccgtgggaccgcgtgagaattgaagcggtggggttcccgcaccctgggctgggctggtggttttctcgggaagcaggaccctcctgactggtgctcttcctgtgagcggatagagtgatagactggggtcgtgtgtgagacgcatgtgctccaccccactccttttgggggaagccagggcaacagtggcctctgggagggggttcaggaagaggcgaacagttcaggcagcgcaggtgtgatggggcacattacgcagagcaagctcgggaagttggtaggatctcaggcttggggccgggactctggagtgaatccccatttctctaccggcttgcttggagtttgga

SEQ ID NO: 123981 - DNA, 1701 bp, Homo sapiens
ttatgatgatgttgtgttccctccttgttccgcgcgttgtggcggcttttctgcgcccttggtaactcggcatatctcttgtgggctcgctttctgtgccttgaggtttggccttgaacgggttgagtgggacattgccggttcttggtcggtgcgttgtgaagacggttttttctggggccacggcttccagtgccgcgggcccatgccgtgcaggtggctcgtcatagatgaacgaggccctgcaccgagtccgtacccggtagagcggtttaaaggcaaatgaactggaaagtttccctcttgtttctgctcagtttttatggcacaggcctcatcgcgggccacggcttcaccagccctgaacgcacccccggggtcttcatcctcttcgatgaggaccgcttcgggttcgtctggctggagctgaaatccttcagcctgtacagccgggtccaggccaccttccggaacgcagatgcgccgtccccacaggccttcgatgagatgctcaagaacattcagtccctcacctcctgaccggccacatccttgccgccacatcccgggtggctctggggctctgaactctgaccaaaaacagagagaacgagcctgaatacagcagatgtaggggacagccgtgggaccgcgtgagaattgaagcggtggggttcccgcaccctgggctggctggtggttttctcgggaagcaggaccctcctgactggtgctcttcctgaacgtgttctttgtcacttgtttggaaatgatgtgattgaagatttcagagaggtcattggaggcttttctgtgccggcactgaatgttcatttgcatgaggaagttgcaaacgacttctgcaggctgggccgtgacctcaagtgtccactgctgagtgtgagtggctttgcaggcctggtggtgggagagcctcaggctccctccttcttcgttcctgaccatgccctgggccccttcagtctgcctgcggctctgtggcatccctgccctgacactgggcacctgtgcccctagcaagcccacctgtcctgagaataaaactcctggaatcatgatcaagtccagtgttaacgtggcccaacctgtctgtacttctggggagagaccaggaacatcactggactcctcatccccgtaattatttagagaagatgcaagcagcagatagtctccatgcggctggtactttttttgttgttttttgagacagggtcttgctctgtcacctgggccactgccatctccgctggtctcggggttgccacatagcctgccagctgcggctgcttcctgggtgccctccagggagagcaggggatcgtgggtccccggcggtgggtgtttccttctccggggagagcaggggatcgtgggtccccggtggtgggtgtttccttctctaaggtttgctgctgtttccaggcctttctgtggggcctgggtcctgtcctggggccaagccacggggtcatcctcagctgcactgggcgtgccaaccacaaacgagtcacttgctacaagcagcaccatgcagcctcctgtctggacgagaccctgccccccacagactggagacgcaccccgatttcccaggtcacagggggaagtgtggatctgataagggactaaatgtggccgtctttcatatgtttctcttacatattttattttaaaatg

SEQ ID NO: 123982 - DNA, 3654 bp, Homo sapiens
gtggttatggagcagctgccgggggtgccaccaggccccccccaccccgttcgaccgccacccccgcctccaccacccatgcccctgcagctcgaggcccacctccgcagccatggcctggagcccgcggcccccagcccccgcctgcgacccgaggagagcctggatccgccaggcgccatgcaggaattgctcggggctctggagccgctgcccccggcgcctggggatactggcgtaggcccaccaaactcggagggcaaggatcccgcaggcgcctaccgcagccccagcccgcaaggcaccaaggcgccgcgtttcgtgccgctcacctccatctgcttccctgactccttgctccaagacgaggagcgcagcttcttccccaccatggaggagatgttcggtggaggggccgcggacgactacggcaaggccgggccacctgaggacgagggggaccccaaggctggcgctgggccaccccccggcccccctgcttatgatccctatgggccctactgtcctggccgggcgtcgggagccgggcccgagacaccgggcctgggcctggaccccaacaaaccgcctgaactgccctccacggtcaacgccgagccgctgggcctgatccagagtggcccccaccaggcggcgccaccacccccgcctccgccaccgccgcctcccgcgccggcctccgaacccaagggtggcctcacctcgcccatcttctgctctaccaagccaaagaagctgctcaagacatcctccttccacctgctgcggcgccgcgacccacccttccagacccccaagaagctgtacgcccaggagtacgagttcgaggcggacgaggacaaggccgatgttcccgccgacatccgcctcaacccccggcgcttgcctgacctggtctccagctgccgctcccgtccggccctctcgccactgggggacatcgacttctgcccacccaacccaggacccgatggcccccggcgccgtggccgcaagcccacgaaggcgaaacgtgatgggccaccccggccacgggggaggccccggatccgccccctggaggtcccgaccactgcggggcccgcctcggcctccacgcccaccgatggcgccaagaaaccccggggccggggccgaggccggggtcgaaaggctgaggaggcagggggcacccggttggagcccctgaagccacttaagatcaagctgtctgtgcccaaggctggcgagggtctgggaacctcatcgggtgatgccatatcaggcactgaccacaacagcctggactcgagcctgactcgggagaagatcgaggccaagattaaggaggtggaggagaagcagccggagatgaagtcgggtttcatggcctccttcttggacttcctcaagtcaggcaagcgccacccaccactctaccaggcgggcctgacgcctccgctcagccctcccaagagtgtgccaccctctgtgccagcccgaggcctgcagccccagccccctgccacccctgctgtgccacatcccccaccttccggagcctttgggcttgggggcgccctggaggctgcagagagtgagggtctggggcttggctgcccttcaccctgcaagcggcttgatgaggagctgaagcggaacctcgagacgctgccctccttctcctcggatgaggaagactctgtcgccaagaaccgagacctgcaggagagcatctcctccgccatctctgccctcgatgacccaccccttgctgggccaaaagacacttccaccccagatgggccgcccttggcccccgcggctgcagttccagggccaccccctcttccggggctccccagtgccaacagcaatggcactcccgagcccccgctgctggaggagaaacccccacccactccacctcctgccccgactcctcagcctcagcctccgccaccccctccgccgccacagccagccctgccctcgccacccccgctggtggcccccacgcccagctcaccaccgccaccgccgctgccgccgccacctccaccagccatgccctcgcctccaccaccacccccaccagccgctgccccactggctgctcctcctgaggagcccgccgccccgtctcccgaagaccccgagctgccggacacccggcccctgcatctggccaaaaagcaggagacggcggcagtgtgtggggagacggacgaggaggccggcgagagtggcggagagggcatcttccgggaacgggacgagttcgtcatccgtgctgaggacatcccttccctcaagctggcgttgcagacggggcgtgaacccccacccatctggcgagtccagaaggcccttctgcagaaattcactccggagatcaaggacggccagaggcagttttgtgccaccagtaattatttggggtattttggggatgcaaaaaatcggtaccagcgcctctatgtaaagttcctggaaaatgtcaataagaaggactacgtgagggtctgtgctcggaaaccctggcatcggcccccagtgccagtcagacgctctgggcaggccaagaaccccgtatctgctgggggtagctctgcacctccccctaaggccccagcaccacctcccaagcctgagacccctgaaaagacgacatctgagaagcccccagagcagactcctgagacggccatgcctgagccccctgcccccgagaagccctccctcctgcggcctgttgagaaggaaaaggagaaggagaaggtgacacgtggagagcggccattgcggggtgagcgggccaccagcggacggcagacacggccagagcggagtctcgccacgggacaacctgccacatcccggctgcccaaagcccggcctaccaaggtgaaggctgaaccgccccctaagaagaggaagaaatggctgaaggaggcaggcggcaacgctacagcaggcgggggcccaccaggcagctcctcggactcggagtcctcccctggagcccccagcgaggacgagcgggcagtacctgggcgtctgctcaaaaccagggcgatgcgggagatgtaccggagctacgtggagatgttggtgagcacagcacttgacccagacatgatccaggccctggaggacacgcatgacgagctgtacctgccccccatgcggaagatagacggcctgctgaatgagcacaagaagaaagtcctgaagcggctgtcgctaagcccagccctgcaggatgctctgcacacgttcccacagctgcaagtggagcagagtggggagggctctccggaagagggggctgtgcggctgcggcctgctggggaaccctacaaccgcaagacgctcagcaagctcaagaggagcgtggtcagagcccaggagttcaaggttgagctggaaaagtcgggatactatacactctaccattcgctccaccactataaataccacaccttcctgcgctgccgggaccagaccctggccatcgagggcggcgccgaggacctgggccaggaggaggtggtccagcagtgcatgcggaaccagccgtggctggaacagctctttgactccttcagtgacctgctggcccaagcacaggcccacagccgctgcgggtga

SEQ ID NO: 123983 - DNA, 3720 bp, Homo sapiens
  misc_feature (1)...(3720): n = a,t,c or g
atggaggagatgttcggtggaggggccgcggacgactacggcaaggccgggccacctgaggacgagggggaccccaaggctggcgctgggccaccccccggcccccctgcttatgatccctatgggccctactgtcctggccgggcgtcgggagccgggcccgagacaccgggcctgggcctggaccccaacaaaccgcctgaactgccctccacggtcaacgccgagccgctgggcctgatccagagtggcccccaccaggcggcgccaccacccccgcctccgccaccgccgcctcccgcgccggcctccgaacccaagggtggcctcacctcgcccatcttctgctctaccaagccaaagaagctgctcaagacatcctccttccacctgctgcggcgccgcgacccacccttccagacccccaagaagctgtacgcccaggagtacgagttcgaggcggacgaggacaaggccgatgttcccgccgacatccgcctcaacccccggcgcttgcctgacctggtctccagctgccgctcccgtccggccctctcgccactgggggacatcgacttctgcccacccaacccaggacccgatggcccccggcgccgtggccgcaagcccacgaaggcgaaacgtgatgggccaccccggccacgggggaggccccggatccgccccctggaggtcccgaccactgcggggcccgcctcggcctccacgcccaccgatggcgccaagaaaccccggggccggggccgaggccggggtcgaaaggctgaggaggcagggggcacccggttggagcccctgaagccacttaagatcaagctgtctgtgcccaaggctggcgagggtctgggaacctcatcgggtgatgccatatcaggcactgaccacaacagcctggactcgagcctgactcgggagaagatcgaggccaagattaaggaggtggaggagaagcagccggagatgaagtcgggtttcatggcctccttcttggacttcctcaagtcaggcaagcgccacccaccactctaccaggcgggcctgacgcctccgctcagccctcccaagagtgtgccaccctctgtgccagcccgaggcctgcagccccagccccctgccacccctgctgtgccacatcccccaccttccggagcctttgggcttgggggcgccctggaggctgcagagagtgagggtctggggcttggctgcccttcaccctgcaagcggcttgatgaggagctgaagcggaacctcgagacgctgccctccttctcctcggatgaggaagactctgtcgccaagaaccgagacctgcaggagagcatctcctccgccatctctgccctcgatgacccaccccttgctgggccaaaagacacttccaccccagatgggccgcccttggcccccgcggctgcagttccagggccaccccctcttccggggctccccagtgccaacagcaatggcactcccgagcccccgctgctggaggagaaacccccacccactccacctcctgccccgactcctcagcctcagcctccgccaccccctccgccgccacagccagccctgccctcgccacccccgctggtggcccccacgcccagctcaccaccgccaccgccgctgccgccgccacctccaccagccatgccctcgcctccaccaccacccccaccagccgctgccccactggctgctcctcctgaggagcccgccgccccgtctcccgaagaccccgagctgccggacacccggcccctgcatctggccaaaaagcaggagacggcggcagtgtgtggggagacggacgaggaggccggcgagagtggcggagagggcatcttccgggaacgggacgagttcgtcatccgtgctgaggacatcccttccctcaagtcctatggggctgatagaggtgtcgaggacctgcgggcctcagaggtgttatttgcgtttgtgtctgtacatgcattacctgtatataagctggcgttgcagacggggcgtgaacccccacccatctggcgagtccagaaggcccttctgcagaaattcactccggagatcaaggacggccagaggcagttttgtgccaccagtaattatttggggtattttggggatgcaaaaaatcggtaccagcgcctctatgtaaagttcctggaaaatgtcaataagaaggcctccgtgagggtctgtgctcggaaaccctggcatcggcccccagtgccagtcagacgctctgggcaggccaagaaccccgtatctgctgggggtagctctgcacctccccctaaggccccagcaccacctcccaagcctgagacccctgaaaagacgacatctgagaagcccccagcagcagactcctgagacggccatgcctgagccccctgcccccgagaagccctccctcctgcggcctgttgagaaggaaaaggagaaggagaaggtgacacgtggagagcggccattgcggggtgagcgggccaccagcggacggcagacacggccagagcggagttttcgccacgggacaacctgccacatcccggctgcccaaagcccgggcttaccaaggtgaaggctgaaccgccccctaagaagaggaagaaatggctgaaggaggcaggcggcaacgctacagcaggcgggggcccaccaggcagctcctcggactcggagtcctcccctggagcccccagcgaggacgagcgggcagtacctgggcgtctgctcaaaaccagggcgatgcgggagatgtaccggagctacgtggagatgttagtgagcacagcacttgacccagacatgatccaggccctggaggacacgcatgacgagctgtacctgccccccatgcggaagatagacggcctgctgaatgagcacaagaagaaagtcctgaagcggctntcgctaagcccagccctgcaggatgctctgcacactttcccacagctgcaagtggagcagagtggggagggctctccggaagagggggctgtgcggctgcggcctgctggggaaccctacaaccgcaagacgctcagcaagctcaagaggagcgtggtcagagcccaggagttcaaggttgagctggaaaagtcgggatactatacactctaccattcgctccaccactataaataccacaccttcctgcgctgccgggaccagaacctggccattgagggcggcgccgaggacctgggccaggaggaggtggtccagcagtgcatgcggaaccagccgtggctggaacagctctttgactccttcagtgacctgctggcccaagcacaggcccacagccgctgcgggctggggcagcacattgaggacgcactgctggatgtggcctccctgttccaggcgggacagcattttaagcgccggttcagagggtcagggaaggagaactccaggcacagggcaggggtagaagaggccctggtccgcatcttctctggccgccacccgatgctgttcagttaccagcgctccctgccacgccagcccgtgccctctgtgcaggacaccgtgcgcaagtacctggagtcggtccggcccatcctctccgacgaggacttcgactggaccgcggtcctggcgcaggaattcctgaggctgcaggcgtcgctgctgcagtggtacctgcggctcaagtcctggtgggcgtccaattat

SEQ ID NO: 123984 - DNA, 1665 bp, Homo sapiens
ctaggctggagctggagggtcctggtctgcgggctctaaagggggtgctggcaccattgctgtcttctgggcacccaggaactcatgacttgctccttccgttggtggcctgaggatgtggtttaattttggatcctctgcctgagaaataaccctgtctactccagcttccaatgtccctgactgaatctcactctgcctctgaccatttcgcaataggcttttgcgcatcataagattccagttctgctcatccaggtgtgtggacaccgaaccctcagctttctgcctctggttttggtaagctggcttggtgtccacaggggccaggcagcatcgacagaagctgccaaacgggcctggctcttgagccactccaggatgagagcaatgagctccgggtcgccggaaggcagagccgggatcatggtgcctgcgttgcctctgtctcagccattgagggagaccaaatatggcttcttctccaggacagaggtggtgacaggggtggaggagaaggaggccaataagtaagatttctgagtcaaggaatatgcaaaattttttacatgcattgtcaaattgcctcccggaaggaggagcgtaggacagatgctcttccaggctggaagagggcaggcaactcccgcccctgctgctggggtcactgcaggtagccaaaaagagcgggggaacgggatggatggtcagatgttcccaatgtctgtttttgggctgagatgaggtcatgcagcgtggctggggcggagtaggatggtcttggtccccagcaagtgtcaccaggctcagaagctcctgcaggtcttttggatggaggaagacacagaggtggctgacttgaggaccaggggccttttgggtccccagagggcaagagcgagagggcttgacagcaggagcttgtgtggctccaacgggggagagttttggtgggggttgtggcataggctcagagggagtgactttactgaagacagcccactgggcactgaccaagccacgaatgatcccagcagcaaatttcaccccccaacagcagcagagcaaacagtaatcaggcaggcatggggcattgcctctgagaccagaggaggcctgagacaacataccactcaggaacccttttatcccggtacagctgtctaaaggattatgccaatgaggagagggccttttgtcagagaccctgtcccatccgaccatttgtaaagctgcctcatgagacagggctggcggaggctctgcaaacattctggtgaccccctcctggacaaagcagaccttcacaaagagactctcagagcgggaggactctgtcccaccttgtgtatagcccctctgcccattcatggctgatctatcagatctctgaacaccaaagaaggcctgcaaaaccttatacattggcctcttcgaggaccaaaccaactgaaaacctgtattggctgcgtgagtcccagctcccatgagggatgtcacccagccacctggtgctgatgctgtgcactgctgcaggggaggcctctgcttcctccaaagctggtcaactctcagtgtaggatttccaccgaggggcacggcagcacagcactttcctaagggtgttgcagaaataacccaagaatcatccccctttcctcccat

SEQ ID NO: 123985 - DNA, 1150 bp, Homo sapiens
atgggaggaaagggggatgattcttgggttatttctgcaacacccttaggaaagtgctgtgctgccgtgcccctcggtggaaatcctacactgagagttgaccagctttggaggaagcagaggcctcccctgcagcagtgcacagcatcagcaccaggtggctgggtgacatccctcatgggagctgggactcacgcagccaatacaggttttcagttggtttggtcctcgaagaggccaatgtataaggttttgcaggccttctttggtgttcagagatctgatagatcagccatgaatgggcagggtttctcaaaatgtgtgggaatgccaataacacacactcggcagcaggctgaccttgggcgagggccagaggagacagaagacaagaagcaacagagcagaggaagcgatgagctcaggtctgagggagaggaaccagagccttatctgctgcgtacttccaaaggtcaaggacaaagaaaggatcctaaaagcagcaagagaaatgaaacaaataatatacaatggagctccaatacatctggcagcagacttctcagtggaaaccttacaggccaagaaggagtggtgtgacatatttaaagtgctaaagaaaaaaaccttttatcctaaaatggtcctcacggccggcccatcccaccctcaatctgttatcagtgtctctttcacaggcctggccaatgctgccagcctgacaatgagcccggatttgcacggccagcccggatttgcaggtctctccagtgtggccgctgtggactggcagtgggctctcctccgcccctcccctccacagggcaggatgggcttgcttcccatctgccaggcaactcagggtccgcagctctgtgtggcaagcccatcagataaagagggattcctgctcttgtttgggaaagaaatagccagactcacaaacaagggaggggcaaggttatataaatgtgatattgttcaaggagtgtgctgtgaagatcccctagctaccttagactgggaactaagaccagatttggagcaaggagagaggcccaccccagagagacacaagccttttttgcttgggaagagtttctcagcaccactgattaaaatttgccgttatgaatggcaaatgttctag

SEQ ID NO: 123986 - DNA, 1872 bp, Homo sapiens
ttatgtttgttctttattttctctttcctccatgataatgtcagttcttatgagggcaaagatgtcattcgtggctcttcctggcgaattattggggcctgatgatatgccatgattgtggtcatgaggctctgtcgtaagtatcgtgtctctaagtccggcgtcacacggttgtccaccgtagggcggctctatataagtaacttgtaggacaagccggacacaccgggggttcgtgtcacaaggccggatccactgcgggtttacgtggtaagcaacaaggaagaggcttttagtaacagagtctaattttgggggattctcaccattaaaattccttcttaacatgcatccttcctcctgtctcaatatgaactgatcttctccagcccagtgctcagtggaaacagctgtccctagcacgcagaaatgttcactcaaccaggctggctggggcgaggcggtgtgctgcttctggccccagcccagtggctgcccactgctatcaccctgtctctggccacagccgacttctccatggctgtcagcatggccactggggttcatggcaagtgcctgaggtgcctccaggctctcccttttctctggccccagtttggaaaagaagacaaacagctctccctgcgatcctgcatcttcctgtggagcactattaccctgagctgtaaaagacttcttgcatttgaaaggcttcacgtcagagtggacgatcatgtgtgccttgagggtctgcttctgcacgaagctcttgtagcagaggtgacactggtaggcgcggatgttggtgtggatcagcacgtgtcgcttcatgttggccagcagggtgaactcccgcccacaaatcccacacttatgctccttcacaccaggatcttcatatgctctaaaatgcacttttgattcctttcccacatataaaggagcccctgaagttagcgaatggtcccctttacggctgaatcccagtctgggtcctttgttgatggttcctgcacttggcaggcgactcccctctggatagtatctacaggtaccttttgtagggcaggagtttagctggggtaagatttcaggaacaccactagggccttgttttagttcagcctgaatgactccagggctatggttgcaaactgggctgaactcagactcttgggcctgtatttccccttgaagacctttggtaggacagccattggcggtgagttcaaacacaggaaaaggcctgtgttccaggaagagctgcagacgggctgaaagaccggccataatgttgctggattgcactattccccactggtgttcagctggcaatcgatgcaagaagttggctgggcctctcttctcatgtcgtctctcattctcaagaaggctatcccagactttttcacataaatgtctcagggttctaggagggtaagagtggatgctacataggctcttgaagcctgcaattaaaacatacagtgtcatttccaccacaaagcaggtcataaggtgtgaggcatccagatgaagaagagttggatgcttttcttcatgctgttttataccttgtccctttattcctggggagttggggatgtgttctggtctcagacacatgatgagctgaactgaacaatgagaacacttggacacaggaaggggaacatcagacactggggcctcttgtgggcttccggtaaggggataggaattacaataggagagatactttagcagctccttgctatcaggtgtaactccacaccccattttatttttcaaaattttgtgaaatgaagacattaattcaaggctgattttcttttgctgccacagatgtccacataattgttggatcctcat

SEQ ID NO: 123987 - DNA, 936 bp, Homo sapiens
atggatgctggtgaggatgcagagaaaggggaacccctgtgcactgttggctctcctgttcgtcctccaggggcccacgctagcccctcacctcccctgaagccttttctaaccgctgcggcctccgtggtcccccacgcctgtgttcctgtaggacgtttacagttcacacgatgtctcatctctcggtatatgtctcccagattcttcctgctgcagcagctggcatgggcctcacagcttgcaccacctgttcaggcctgcaaggcatctattagggcttctggcactgctgcttctgctaactgcgctttctcaagataccatgttcattgcagcattgccttccaaatcaaagtcttacacaacctaatagttctgactgttattattcctgcagcagagcacatggcctggggtcctggaattgcccaacctaacccaccacatagggcatcagggcactcctcctgggggcctgaggttgggcctaaactctcaaccactgccatcttagttggcacctacccgcaagtgccacctgtaggcctggagactggcccacccagcttatttcagccactgccaatatcaacacacactgcttggaacacagagaattgtcctgccaatgctactgtcattgcccatcccacactagctgcccaggggaccaagaatccacccactctcctagttcaccactgccactatcagcatctaagcctaaaagacgacgggacacggagagagaactcactaaagttgggggaaggcaaggtcattctacagactgaggggatccagaaggggatggatccaacaatggaatatgcaacaaactattggaagaaattacagctttggaaaagaagacaaacagctctccctgcgatcctgcatcttcctgtggagcactattaccctgagctgtaa

SEQ ID NO: 123988 - DNA, 910 bp, Homo sapiens
atggaaagtttggacacagagacaagcacatggggagaatgccacaggaagattagaggtatggtgccacaagtcaaagaacttgcagaagaggaagaagcccctccagatggtgctgttgccgaatacagaagagaaaagcaaaagtatgaagctttgaggaagcaacagtcaaagaagggaacttcccgggaagatcagcaaataattattaagaacctgccatgtactaatcactgtatttggcagtcaacacatgaacacatccctgctctctctgatctatcagggaaaagagctaaacaagtaataccagtgaaagggggtgagcattatgaaaggacccttgcactgctgaaccagtttaaatctaaactcactcaagcaattgctgaaacgcctgaaaatgacattcctggaaacagaagtaggaagatgatgaaggatggatgtcacatgtactttcagtttgagggtaaaagcaggaaaagtggaaaggtgccaagcatgcaagactcagatacatttgaaatctatgatcctcggaatccccagtgaataaaagaagggaggggaagaaagcaaaaagcctgatgagagagaaaaaagaaagaagattaaaatgagaataatgataacccagaacttgcctggaaatgtgccctacaatggcccttgtaacagcccattgttccccaacagcatcaccttaggggtgtgaaaagaagtatttttgaacctgttgtctggttttgaaaaacaattatcttgttttgcaaattgtggaatgatgtaagcaaatgcttttggttactggtacatgtgttttttcctagctgaccttttatattgcctaaatctgaaataaaataactttccttccacattacatgttaaaaaaaaaaaaaaa

SEQ ID NO: 123989 - DNA, 478 bp, Homo sapiens
  misc_feature (1)...(478): n = a,t,c or g
cccatgcgtccggccttcacgcgggtggagatggcccgtgtgctcatggagcggaaccagtacaaggagcggctgatggagctgcaggaggctgtgcggtggactgagatgatcagagcgtcccgagagcacccatccgtccaggagaagaagaagtcgaccatctggcagttcttcagccgcctcttcagctcttcctccagccccctccggcncaagcgcccctatccctcggtgaacatccactacaagtcacccaccgagggctgcagcgtgcgctgccggcttctccccaccaccctgccacctccactgtgatgtatgtccgctccctcgtctgttcccccaggatctcgaagtgactccgggctgagcagtggggcggctgggggaggggtgacgattctcctcaggctttggccctgcaagcaaacccacatatctgctctgtatgtaataaatgtcttaacgtcaaaaa

SEQ ID NO: 123990 - DNA, 186 bp, Homo sapiens
agtgaagtccgaggccatcatcgcccgccgtgaacccaaagaagaggcggaggatgacaaaatccccatggcccagcgccgccgcttcacgcgggtggagatggcccgtgtgctcatggagcggaaccagtacaaggagcggctgatggagctgcaggaggctgtgcggtggactgagatgatcag

SEQ ID NO: 123991 - DNA, 444 bp, Homo sapiens
  misc_feature (1)...(444): n = a,t,c or g
ctctctgcttccccctccgctcttgaccctgcatatccaggattgaactgccagcctcagaggaggcagcaccgagggggcctgtttgaagcaagcagcatttgggatatgtgcccttcctcagggtctgcttggagcagctcctctgcaggcacagcctggactattcccaggcacagctgtgggcccaggagccagctcaggtgctcccctccaccatgggcaggctgtgcaaaaagccaccggcttttctcagcatttgctgctgggcctctcctgggactaccagtgtggctcttacgtgttttctttgctaaaataaaccctagttcttnnnnnnnnnnnnnnngggcggccgttttaaagaatccctgggggggcccaagtttacccgggcatgcaaggtaatagttttttccttatagggaagcgtattataacctc

SEQ ID NO: 123992 - DNA, 341 bp, Homo sapiens
  misc_feature (1)...(341): n = a,t,c or g
tcccaaaattcccaggtaggttataattcggccccctataaggaaaaaactattaccttgccagcccgggtaaacttgggcccccccaaggatcctttaaaacggcccccccnnnnnnnnnnnnnnnnnggggttttaccagttttatttctagactttcatgtttgtctttttgtcttctgctggaaacatgccggttacatgttggtgctgggaagcgccgcggtgcaaccagaaatgcacagacccagccgcccgccgcccagaccctcagacttgcgcgtcacaggacagactccgctgtgccccgtgcacttgccaccagcctttggcctctcgat

SEQ ID NO: 123993 - DNA, 439 bp, Homo sapiens
  misc_feature (1)...(439): n = a,t,c or g
ctctcaccacaaagataaggttccctccccaagatcccaaggtaggttataatacggctccctatagggaaagaactattcccttgcatgcccgggtaaacttgggcccccccaaggatcctttaaaacggcccccccnnnnnnnnnnnnnnnnnnnacgaaaccaggtttattaaaatttctctacaagtcagaaacggccatctcactgttcacatatatacacgtatgtacaggaagaacctagtgtttctagctttcccggcagaaggccctgccagcccagagtccttagtcggataatgtatcacagatacaacagtcgagcaaccacgagagcgttagtgcgacagaggcctctgtcctccctcttctcaaagtcccatgattctgtcaaggtaatattgccaataatcggacgcgtgggcggacgcgtggg

SEQ ID NO: 123994 - DNA, 419 bp, Homo sapiens
  misc_feature (1)...(419): n = a,t,c or g
nacgacgggcagggcctaggttataattcggccccctataaggaaaaaactattcncttgcatgcccgggtaaacttgggccccccaagggatcctttaaaacggccgccccnnnnnnnnnnnnnncttactaatgccttctcttctccctgcccctgtggcctaggcccaggttctagggcaggtacagtgaggggtgaatggaatgggcagtggtcgccaggatggcctcccacccagctcagagacctggtgaggaccacccagaagggctgtgcagagggttagaggccacacagaggggcactcatgtttttgtgggggatgcacagctcattaaacagtcaccagtcatgggaggaggctggtcaggggctaggggacttgctcacagtagttgccagctctctccaccttgc

SEQ ID NO: 123995 - DNA, 406 bp, Homo sapiens
  misc_feature (1)...(406): n = a,t,c or g
cggacgcgtgggcgactcttctatataatcagtttgatgatctgaattagaaaatacccctggataatcatgttcttgatacacatcatcaaactgattatatagaagagttggctttaaaatgtttgcaaatgtcnnnnnnnnnnaatactggaagaaaaaatattctgttgggtctcatacagggcttaggatgtctttcacagagcttattaaaaagatgaaacctgnnnnnnnnnnnnnngggggggccgttttaaaggatccctgggggggccaaagtttacccgggcatgcaaggaaatagttttttccctatagggagccgaattaaaacctacctgggaatctttgaaaagaacccttacttttggggggggacataatgggacaacctacctacaga

SEQ ID NO: 123996 - DNA, 374 bp, Homo sapiens
  misc_feature (1)...(374): n = a,t,c or g
gttataatccggctccctataaggaaaaaactattaccttgcatgcccgcgtaaacttgggcccccccagggatcctttaaaacggcccccccnnnnnnnnnnnnnnnnnncaatgttcagtttcctttaatgacccccatctccctgaagggcaggtgcaggcagctaggtgatggcaagagatgttcacttgaagatcttgccctgattgaaggatgcccacatgctggaaggccccctcccaggaaaagtactctcgaaccagcgtctgggtctcctcgctgccaggatccagtttccgccatgtgtatgactcgtagtccacctgccaatctggactcagcggaaaggcaagctcctggcctcggaagac

SEQ ID NO: 123997 - DNA, 427 bp, Homo sapiens
  misc_feature (1)...(427): n = a,t,c or g
taaattctggagggaggttggcccaatatgtccccccccaaaaataagggttctttccaaaaattcccaagtaggttataattcggctccctataaggaaaaaactaattccttgcaagcccgggtaaagtttggcccccccaaggatcctttaaaacggccgccccnnnnnnnnnnnnnnnnnnnnaataaactttatttttagagcagttttaagttcatagcaaaattgattagaaggtacagagatgtcccatacacctcctactcccacacatgcacagccttccccattatcaatagcccccaacagagggatacatttgttaacaactgacgaacctacatatcattatcacccaaagtccacagtttatattattccttcaggagaattttcaaatacagaaattcctctaccaggaat

SEQ ID NO: 123998 - DNA, 421 bp, Homo sapiens
  misc_feature (1)...(421): n = a,t,c or g
tgggccctgccgggaccctgctcacaggcaggcttttcctccaacctgtggcgctgcagcagggcaggaaggggaaacacagctgatgaactgtggtgccacatgacccttgtggcacagatgcccacgtatgtgaaacacacatggacatgtgtcccagccacagtgttatgctctgtggctggctcacctttgctgagttccggggtgcaatgggggagggagggagggaaagcttcctcctaaatcaagcatctttctgttactgatgttcaataaaagaatagttgccaaggctgnnnnnnnnnnnnnnnnnnnngggcggccgttttaaaggatccttgggggggcccaagtttacccgggcatgcaaggaaataactctttccttatagggagccgaattataagctagctgggg

SEQ ID NO: 123999 - DNA, 415 bp, Homo sapiens
  misc_feature (1)...(415): n = a,t,c or g
aaaatgtgttttcagaggaaatcttattttcatattcagactttgtattgcccactcatttgtataagtgcgcttcggtacagcacgggtcctgctcccgcgatgtggaagtgtcacacggcacctgtacaaaaagactggctaacccctcttcctattaccttgatctcttcccccaacttcctaacacttattaatttatgaaactgtttttctcagcgcagttttgttttgtgtgtccattggattacaaactttattaaaaaatataaaacacnnnnnnnnnnnnnnggggcggccgttttaaaggatccttgggggggccaaagtttacgcgggcttgcaaggtaatagttttttccttatagggggccgaattaaaagctacctggggatttttgagaaggacccttag

SEQ ID NO: 124000 - DNA, 497 bp, Homo sapiens
  misc_feature (1)...(497): n = a,t,c or g
ttagtattagaagcagatcatttcccaaaattctaagagcagcagcatatgttgttgcttgtataaagcctagcgataatttttagactaacttccatggtgccctgttggcattagcactaccattgtaccctgctgtataataaacaatcttagacatttatcaactgttgatacaaatgttagtccctaaccactttttatatatgttttaaatttttgaaattcaagtgtaccttccataacataaaataaacactagactgtatcacnnnnnnnnnnnnnnnnnnggggcggccgttttaaaggatccttgggggggccaaagttaacccgggcatgcaaggtaatagttttttccttatagggagccgaattaaaacctacctgggaatttttggannnnnnnnnnnnnnnnnnnnnnnnnnnnnnnnnnnnnnnnnnnnnnnnnnnnnnnnnnnnnnnnnnnnnnnnnnnnnnnnnnnnnnnnnnnnngg

SEQ ID NO: 124001 - DNA, 372 bp, Homo sapiens
  misc_feature (1)...(372): n = a,t,c or g
atccccaggtagggtataattcggccccctataaggaaaaaaatatttccttgcaagcccgggtaaacttgggcccccccaaggatcctttaaaacgggcgccccnnnnnnnnnnnnnnnngtgaataagttatacttttatttttcagaaacaaaaatgacaagtggcaacttgcctttgtaaaagattaaagagtatcagagtaataagctatctctcatagagacagaagcccgagaaacactattatacagctttcaaaggaagtcctattaaataaatctcacaataatatactttaactcaacaaaacaaaaaccacaaaaaattatacagaactcataaaatgcggacgcgtgggtcgacccggg

SEQ ID NO: 124002 - DNA, 386 bp, Homo sapiens
  misc_feature (1)...(386): n = a,t,c or g
aaccaaatacctcaatttttgtttttgagtactgtactatcctgtaaatatatcttaagcaggtttgttttcagcactgatggaaaataccagtgttgggtttttttttagttgccaacagttgtatgtttgctgattatttatgacctgaaataatatatttcttcttctaagaagacattttgttacataaggatgacttttttatacaatggaataaattatggcatttctattgnnnnnnnnnnnnnnnnnggggcggccgttttaaaggatccttgggggggccaaagtttacgcgggcatgcaacgttatagttttttccttatagggagccgaataataacctacttggggatctttgggagggaactttatttctgtg

SEQ ID NO: 124003 - DNA, 646 bp, Homo sapiens
cttcagccgcctcttcagctcttcctccagcccccctccggccaagcgcccctatccctcggtgaacatccactacaagtcacccaccactgccggcttcagccagcgccgcaaccatgccatgtgcccgatctcggcaggcagccggcccctggaattcttccctgacgacggggagctgggctgctttggctccacggtatttggttcaggatgtcccttggcagaggctgtgcccaccaacagtcagggggctgtgctgggctccacggtggcctctgcagcaaggagccgtttcaggcgtctgtccagcagggagtcgctggtcatgcctgtgccccggcggcactccaggacaagcctggggcactgtgggggccgctcaccctggacagagacatcacccatcattcttccactcagcgactgcacgtcctccgcccgtcgagagcagaagcgcgagcagtaccgccaggtgcgtgagcacgtgcgtaacgacgacggccgtctgcaggcctgcggctggagcctgcccgccaagtacaagcagctgagtcccaacgggggccaggaggacacgcggatgaagaacgtgccggtgccggtgtactgccgccctctggtggagaaggaccccaccatgaag

SEQ ID NO: 124004 - DNA, 633 bp, Homo sapiens
atggtcccttgcacaggtccagccctgctgggagttttctgccacacagatttgcggaagaacctgaccgtggacgagggcaccatgaaggtagaggtgctgcctgccctgaccgacaactacatgtacctggtcattgatgatgagaccaaggaggctgccattgtggatccggtgcagccccagaaggtcgtggacgcggcgagaaagcacggggtgaaactgaccacagtgctcaccacccaccaccactggcactgttatgatccccgcctagcagacctaactattcagcgctacccttgcctgcttcagattctgaaagcatctcccagtgttcttgctaaagaggctctggaagggctccatataatgccagtcattcacctgcaagagattggttgggcctatctggcctattcctaccttccaggcccactgcactcctgtctgggaggcccttatgagggcagcccagcccccgcacccacccccaaccagagaagcacagatcttggggagctgccccacaagcccccgctggccaccgagggctgcagccgctgcgctgccggcttctccccaccaccctgccacctccactgtgatgatctcgaagtgactccgggctga

SEQ ID NO: 124005 - DNA, 782 bp, Homo sapiens
atgagcgtaagatttgtggccgataggggttacccgcatcggcatgaccaacgatcacgttatcagtcatttcaggctggatggctccagcctcgcattagcaaagatgagattatttcgcctgtggtgcagttttgctggtggattgaacacgctgacgggccgtccctctccccagcggccagcgacagcgactaccctcccggggagatgttcctggacagcgacgtgaacccagaggacccgggcgcagatggcgtgctggccggtatcaccctggtgggctgtgccacccgctgcaacgtgccgcggagcaactgctcctcccgaggggacaccccagtgctagacaaggggcagggggaggtggccaccatcgccaacgggaaggtcaacccgtcccagtccacagaggaggccacagaggccacggagcatcccgtggcgctgctcttcgctgctgacgcttgtctggtcgcctcatcttttgaagcagacgccgatgatgccgatgacgccgccgaactggctgacgatgcggcagccgtttttgaggattctgcgcttgtttccgacgctttcgcgttcgtttcggatgtcttcgctgcggaagcagacctcgctgctgcgctggcctgttcagtggcttcgccagccttcgttgtggctgttgaagcagacgatgcggcgctttctgccgattttccggcggcggtggcactggctgaggcctgcccggcacttgttgacgctgcactggcagacgacccacaaacaccgtc

SEQ ID NO: 124006 - DNA, 677 bp, Homo sapiens
atgcatggcctgggccgctgggacgcgtgtccacaggatgaaatgtccgagtcaggccagtcctcggcggccgccacacccagcaccacaggcaccaagtccaacacgcccacatcctccgtgccctcggccgccgtcacacccctcaacgagagcctgcagcccctgggggactatggcgtgggctccaagaacagcaagcgtgcccgggagaagcgcgacagccgcaacatggaagtacaggtcacccaggagatgcgcaacgtcagtataggcatgggcagcagtgacgagtggtctgatgttcaagacattattgactccacgccagagctggacatgtgtccagagacccgcctggaccgcacaggaagcagcccaacccagggcatcgtgaacaaagctttcggcatcaacaccgactccctgtaccatgagctgtcgacggcaggggtcttaggtcatcggggatgttgacgaaggggccgacctcctagggaataatgacaggaaaaaagtgtacacgtcagtacagacacggccaccacaggcctgtacattttctgtgaggctggttgaatccacacatgcagaactcgtgggtattgagggtcgactgtatcataaaattcacccgcttcgagtgcacggtgcggtgggttacagcgtactcacag

SEQ ID NO: 124007 - DNA, 444 bp, Homo sapiens
  misc_feature (1)...(444): n = a,t,c or g
tgaaagcagtcatcttcagcattttccagccctatagccaccccaagagtggttatgcctcctcgattgctccatactctaacatctagctggcttccctgtctattgccttttcctgtatctattttcctctatttcctatcattttattatcaccatgcaatgcctctggaataaaacatacaggagtctgtctctgctatggaatgccccatggggcatctcttgtgtacttattgtttaaggtttcctcaaactgtgatttttctgaacacaataaactattttgaagnnnnnnnnnnnnnnggggcgcccgttttaaaggatccctgggggggcccaagtttacccgggcatgcaaggtaatagctttttccctatagggagccgaattataacctacctggggatctttgggaagagaccttacttttggggggagaa

SEQ ID NO: 124008 - DNA, 2431 bp, Homo sapiens
atgaaggagggagggtgggggtgtgatcccgtgggccgtggcgtgacctccggccatgtcctgcagatgaaactgctgcccttccggcagaagaaggcccacatcatggagatccagctgaacggtggcacggtggccgagaaggtggcctgggcccaggcccggctggagaagcaggtgcccgtgcacagcgtgttcagccagagtgaggtcattgatgtcattgctgtcaccaagggtcgaggcgtcaaaggggtcacaagccgctggcataccaagaagctgccgcggaagacccataagggcctgcgcaaggtggcctgcattggcgcctggcaccccgcccgcgtgggctgctccattgctcgggccgggcagaagggctatcaccaccgcacggagctcaacaagaagatcttccgcatcggcaggggcccgcacatggaggacgggaagctggtgaagaacaatgcatccaccagctacgacgtgactgccaagtccatcacaccgctgggtggcttcccccactacggggaagtgaacaacgacttcgtcatgctgaagggttgtattgctggtaccaagaagcgggtcattacgctgagaaagtccctcctggtgcatcacagtcgccaagccgtggagaatattgagctcaagttcattgacaccacctccaagttcggccatggccgcttccagacagcccaagagaagagggccttcatggctgacgggctgtccctctccccagcggccagcgacagcgactaccctcccggggagatgttcctggacagcgacgtgaacccagaggacccgggcgcagatggcgtgctggccggtatcaccctggtgggctgtgccacccgctgcaacgtgccgcggagcaactgctcctcccgaggggacaccccagtgctagacaaggggcagggggaggtggccaccatcgccaacgggaaggtcaacccgtcccagtccacagaggaggccacagaggccacggaggtgccagaccctgggcccagcgagccagagacagccacattgcggcccgggcctctcacagagcacgtcttcactgacccagccccgaccccgtcctctggcccccagcctggcagcgagaacgggccagagcctgacagcagcagcacacggccagagccagagcccagcggggaccccacgggagcaggcagcagtgctgcacccaccatgtggctgggagcccagaacggctggctctatgtgcactcggctgtggccaactggaagaagtgcctgcactccatcaagctgaaggattctgtgctgagcctggtgcatgtcaaaggccgtgtgctggtggctctggcggacgggaccctggccatcttccaccgtggtgaagatggccagtgggatctgagcaactatcacctaatggacctgggccacccgcaccactccatccgctgcatggctgttgtgtacgaccgcgtgtggtgtggctacaagaacaaggtgcacgtcatccagcccaagaccatgcagatagaggcgagtgccggccagggccccggggaggggaagaggctcctgctggccagcagctctcccgcatcttccatacggaagtccacgaggcctacccatgactccacagaagtcatttgacgcccacccgcggcgggagagccaggtgcggcagctggcgtggatcggcgatggcgtatgggtgtccatccgcctggactccaccctgaggctctaccatgcacacacgcaccagcatctacaggacgtggacattgagccctacgtcagcaagatgctaggcactggcaagctgggtttctccttcgtacgcatcacggccctgcttgtcgcgggcagccggctctgggtgggcaccggcaacggagtggtcatctccatccccctgacagagactgtggtcctgcaccgaggccagctcctggggctccgagccaataagacatcccccacctctggggagggcgcccgtcccgggggcatcatccacgtgtatggcgatgacagcagtgacagggcggccagcagcttcatcccctactgctccatggcccaggcccagctatgcttccatgggcaccgcgatgccgtgaagttctttgtctcggtgccagggaacgtgctggccaccctgaatggcagtgtgctggacagcccagccgagggccctgggccagctgcccctgcctcggaggtcgagggccagaagctgcggaacgtgctggtgctgagcggcggggagggctacatcgacttccgcattggagacggagaggacgacgagacggaggagggcgcaggggacatgagccaggtgaagcccgtgctgtccaaggcagagcgcagtcacatcatcgtgtggcaggtgtcctacacccccgagtga

SEQ ID NO: 124009 - DNA, 459 bp, Homo sapiens
  misc_feature (1)...(459): n = a,t,c or g
tccccnccaaaattaaggtcctttccaaaaattcccaggtaacagattttcccgtcccgacgttgttaaacgacgggcagtgcctaggttataattcgactccctataaggaaaaagctattacgttgcatgcccgcgtaaacttgggcccccccaaggatcctttaaaacggccgccccnnnnnnnnnnnnnnctcatttaacttttttaatgggtctcaaaattctgtgacaaatttttggtcaagttgtttccattaaaaagtactgattttaaaaactaataacttaaaactgccacacgcaaaaaagaaaaccaaagtggtccacaaaacattctcctttccttctgaaggttttacgatgcattgttatcattaaccagtcttttactactaaacttaaatggccaattgaaacaaacagttatgagaccgttcttccaccactgattaagag

SEQ ID NO: 124010 - DNA, 5007 bp, Homo sapiens
  misc_feature (1)...(5007): n = a,t,c or g
gcgaccgccacacccagcaccacaggcaccaagtccaacacgcccacatcctccgtgccctcggccgccgtcacacccctcaacgagagcctgcagcccctgggggactatggcgtggtctccaagaacagcaagcgtgcccgggagaagcgcgacagccgcaagcatggaagtacaggtcacccaggagatgcgcaacgtcagtataggcatgggcagcagtgacgagtggtctgatgttcaagacattattgactccacgccagagctggacatgtgtccagagacccgcctggaccgcacaggaagcagcccaacccagggcatcgtgaacaaagctttcggcatcaacaccgactccctgtacccatgagctgtcgacggcagggtctggaggtcatcggggatgtggacgaaggggccgacctcctaggggagttctcaggaatgggcaaagaagtggggaatctgctactggaaaactcacagcttctggaaaccaaaaacgccttgaatgtggtgaagaatgacctgattgccaaggtcgaccagctgtccggggagcaggaggtgctgaggggcgagttggaggctgctaagcaggccaaagtcaagctggaaaaccgtatcaaggagctggaagaggaactgaaaagagtgaagtccgaggccatcatcgcccgccgtgaacccaaagaagaggcggaggatgtaagcagctatctctgtacagaatcggacaaaatccccatggcccagcgccgccgcttcacgcgggtggagatggcccgtgtgctcatggagcggaaccagtacaaggagcggctgatggagctgcaggaggctgtgcggtggactgagatgatcagagcgtcccgagagcacccatccgtccaggagaagaagaagtcgaccatctggcagttcttcagccgcctcttcagctcttcctccagcccccctccggccaagcgcccctatccctcggtgaacatccactacaagtcacccaccactgccggcttcagccagcgccgcaaccatgccatgtgcccgatctcggcaggcagccggcccctggaattcttccctgacgacgactgcacgtcctccgcccgtcgagagcagaagcgcgagcagtaccgccaggtgcgtgagcacgtgcgtaacgacgacggccgtctgcaggcctgcggctggagcctgcccgccaagtacaagcagctgagtcccaacgggggccaggaggacacgcggatgaagaacgtgccggtgccggtgtactgccgcccttctgtgggaaaagacccccacactgaccttgtgcgtggccccggccgccaacctgagcgggtggaggcccaatgaggacgacgctgggaatggagtcaagccagcgccaggccacggttcccctgacctcggaccgcgaaggagacggcgagcccaagagcgcccacacgtctcccgaaaagaaaaaggccaaggagctccctgaaatggacgccacctccagccggggtgtggatcctgaccagcaccctgaccaccagcaaggtggatgatcatcgacgccaaccagcggggcacggtggtggaccagttcaccgtctgcaacgcgcacgtgctgtgcatctccagcatccccgcggccagcgacagcgactaccctcccggggagatgttcttggacagcgacgtgaacccagaggacccgggcgcagatggcgtgctggccggtatcaccctggtgggctgtgccacccgctgcaacgtgccgcggagcaactgctcctcccgaggggacaccccagtgctagacaaggggcagggggaggtggccaccatcgccaacgggaaggtcaacccgtcccagtccacagaggaggccacagaggccacggaggtgccagaccctgggcccagcgagccagagacagccacattgcggcccgggcctctcacagagcacgtcttcactgacccagccccgaccccgtcctctggcccccagcctggcagcgagaacgggccagagcctgacagcagcagcacacggccagagccagagcccagcggggaccccacgggagcaggcagcagtgctgcacccaccatgtggctgggagcccagaacggctggctctatgtgcactcggctgtggccaactggaagaagtgcctgcactccatcaagctgaaggattctgtgctgagcctggtgcatgtcaaaggccgtgtgctggtggctctggcggacgggaccctggccatcttccaccgtggtgaagatggccagtgggatctgagcaactatcacctaatggacctgggccacccgcaccactccatccgctgcatggctgttgtgtacgaccgcgtgtggtgtggctacaagaacaaggtgcacgtcatccagcccaagaccatgcagatagagaagtcatttgacgcccacacgcggcgggagagccaggtgcggcagctggcgtggatcggcgatggcgtatgggtgtccatccgcctggactccaccctgaggctctaccatgcacacacgcaccagcatctacaggacgtggacattgagccctacgtcagcaagatgctaggcactggcaagctgggtttctccttcgtacgcatcacggccctgcttgtcgcgggcagccggctctgggtgggcaccggcaacggagtggtcatctccatccccctgacaagagactgtggtcctgcaccgaggccaagctcctggggcctccgagccaataagacatcccccacctctggggaagggcgcccgtcccgggggcaatcatccacgtgtatgggcgatgacagcagtgacagggcggccagaagcttcatcccctactgctccatggcccaggcccagctatgcttccatgggcaccgcgatgccgtgaagttctttgtctcggtgccagggaacgtgctggccaccctgaatgggagtgtgctggacagcccagccgagggccctgggccagctgcccctgcctcggaggtcgagggccagaagctgcggaacgtgctggtgctgagcggcggggagggctacatcgacttccgcattggagacggagaggacgacgagacggaggagggcgcaggggacatgagccaggtgaagcccgtgctgtccaaggcagagcgcagtcacatcatcgtgtggcaggtgtcctacacccccgagtgaagctgctgccctgcctggcccgacctgtacataggacccccgaccacctgacccccgcccggcccgcggggtagccagccaggcgccgccgcccctcttctaacctctcaacctgcagctttcacctgagtctggcccctccagcgggcagggagtgcggggatgcggatcaactgggaggaggaggggaggggtgcttccacccgaggggaagatgctctcgggacagtttcccgggcagctcctggccagcttccagcccagagtcctcaagtccagggcaccttgggcccagcgcaggcagaatccgaggtggtcctggctctaccctgggcctcctactccccagcacccctggaggaggcaggggctccccgccgccgaggctgcctgccctgggcccacctctgcatgctgctcatggggccaccctgcctcctgggccctcactctgcctaggggagctgggccaggcactagcctttgcccagggaggtgggcctcaggctgcccaggtgcctgcaccccagccggccttctctggggcctccccgtcgtcaagcctctatcctgtctgtccccaccccagctgtcccctgcccagggagctggcataaaagcacgaggcccggctccctggggcagctgcttgagaacagagactgctaccccatcctgacccatgcaggcaggctcttgccagccccgttctgacccgtgtccccccaggctttgcctgggcagaagactcaccttggaggagtgggccctggagtcctgtccctcccagaagcccccagggtgggatttctcaggctgccagggcaggcccaggcctcaggaagaaggggaggcccctggcctctccgggatcagtcctaggacacaggctcagcctcaggttgatgggggatgatgtgctcccggggcctgcctcctgcacggggctccacggagcccagctcccagacacgctactaagtgcctagggctgcccgctgtggcctgctcccagggagcaacagagaggcccccaagctgatgcccgtggggctgaggatggagccgcccccagccgactccaagcccgcagagggcagacgccaccctggactgctctccctgcccagctgggcctctctggccctaattcctaaccttcccaggcccactgcaactcctgtctgggaggcccttatgaggggcagcccagcccccccggcaccacccccaaccagagaagcacagatcttggggagctgccccacaagcccccgttggccaccgaagggcttgcaatgcgtgcgctgcccggcttctccccgaccaccctgccacctccactgtgatgtatgtccgctccctcgtctgttcccccaggatctcgaagtgactccgggctgagcagtggggcggctgggggaggggtgacgattctcctcaggctttggccctgcaagcaaacccccatatttgctctgtatgtaataaatgttttaacgtcgnnnnnnnnnnnnnnggggcggccgttttaaaggatccttcggggggcccaaagtttacgcgggctgtgcaaggtaatatttttttccttatggggggccgaataaaaacctacctgggaatttttgggaaaggacccttacttctgggggggaacaaaatgggacaacctacctacggagattaaaagctttagggaaaataaaaaattttaaagggaaaaaggggtaaaactacctgcatatgctggctgctggaaagttttgttaactgagaataat

SEQ ID NO: 124011 - DNA, 665 bp, Homo sapiens
ttaatgcccctgaactgctcttgtgtgcgtcgccagctctttcttgacgtgcttgatggaaccaaagcattactccatagtccagcttcagtgaactgctttcgccttggctccatgaagtgcactctgctgcttatcctcctccggcagtggaagagagagttaggttctgtggatgaaatcccttggacccttgacggagatcctggagggagtgctgcaggccgaccagcaactcatggagaagaccaaggccaaggtgttctcagcattcatcacagtgttgcaaatgaaggagatgaaagtaagtgacatcccccagtactcccagctggtgctgaatgtctgtgagaccctccaagaggaagtgattgcactcttcgaccagacccgccacagtctggcattaggcagtgccacagaggacaaggacagcatggagactgacgactgtcctcacgctgcagacgccccctagaggaactttccttcctttccagcattccccacagcactgccggccaggggagaggcggcagcccagcagagggctctatgcacgggtttcaaacctgttttccacactctgtctttgcagttttggtaattctgtggtctatttatacagatattaaaatcttgtttatagaaaaaaaaagaaaaaa

SEQ ID NO: 124012 - DNA, 5957 bp, Homo sapiens
  misc_feature (1)...(5957): n = a,t,c or g
cgccggcgggccgtgtgtgaggagcagtagagaactgtggactattctgcttggaaggtcagctctgagagagctgagtcagattgaggcagaactgaataaacattggcggcgattgttagaggggctttcttactacaaacctcccagtccaagttcagctgaaaaagtgaaagctaataaagatgtagcttcaccattgaaggaactgggtttaagaatcagcaagtttttgggtcttgatgaagaacagagtgtgcagttactccagtgttacctgcaagaggactacaggggtactcgggactcagtaaagacagtactgcaagatgagaggcagagccaggccttaatcctgaagattgcagattattattatgaagaaagaacctgtattcttcgttgtgtcttacaccttctcacttacttccaagatgaaagacacccctatagggttgaatatgcagactgtgttgataaattggagaaggaactagtttcaaaatacagacagcagttcgaagagctttataaaactgaagcaccaacttgggagacacatggaaatctcatgacagagcgccaagtgtctcgctggtttgttcagtgccttcgggaacagtccatgctgctagaaattattttcctttattatgcatactttgagatggcacccagtgacttacttgtattaaccaagatgtttaaagagcaaggatttggtagtaggcagaccaataggcacctggtggatgagactatggatccttttgtagatcggattggctacttcagtgccctcatcctggtggagggcatggatatcgagtccttgcataagtgtgctttggatgacagaagagaactgcatcagtttgcgcaggatgggcttatttgtcaggatatggactgtttaatgttgacctttggggacattccacatcatgccccagtgcttttggcctgggctctcctccgtcacactctgaacccagaagagacaagcagtgtggtccggaagataggtggcacagccatccagctgaatgtgtttcagtacttgacccgattgctccagtcccttgccagtgggggaaatgattgcaccaccagcactgcatgcatgtgtgtctatggactgctctctttcgttctgacctcgttggagctgcacaccctgggcaatcagcaggatataattgatacagcatgtgaagtattggccgacccttctcttccggaactgttctggggaacagagccaacttctggccttgggatcattctggacagtgtgtgtggaatgtttccccaccttctctccccactcctgcaactgctccgagccctggtatcagggaagtccacagccaaaaaggtgtatagcttcttggataagatgtctttctacaatgaactttataaacacaagcctcatgatgtgatctcccatgaagatggaactctttggcggagacaaacacccaaactcctttatccccttgggggtcaaaccaaccttcgcatacctcaaggcactgtgggccaagtaatgttggatgatagggcatacctggtacgctgggaatactcctatagcagctggaccctctttacctgcgagattgaaatgttgcttcatgttgtttcaactgcagatgtgattcagcactgccagcgagtcaaacccatcattgatctcgtccataaggtcatcagtacagacctgtcgatagcagactgtctcctgcccatcacatctcgcatctacatgctgctgcagcggttaacgacagtgatctccccacctgtggatgtcattgcttcttgtgtcaactgcttaactgttttggctgcccgcaatccagcaaaggtctggactgatcttcgtcacacaggttttttaccatttgtggcccatcctgtctccagcctgagtcagatgattagtgcggaagggatgaatgctggagggtacggaaacctcttgatgaacagtgaacagcctcagggcgagtatggggttactattgcctttctgcgcttgatcaccacccttgtcaaggggcaacttggtagtacccagagccaaggacttgtaccctgtgtaatgtttgtgctgaaggagatgcttcccagctaccataagtggcgctacaactctcatggagtgagggaacagattggttgcctgatcttggagctgattcatgcgatactgaacctgtgccacgagacagacctgcacagcagtcatactcccagcctgcagtttctctgcatctgcagcctggcatacacagaagcaggacagacagttatcaatatcatgggcattggcgtggacaccattgacatggtgatggctgctcagcctcgaagtgatggggcagagggccaggggcagggccagctgctgatcaagacagtgaaactggcattctccgtcaccaacaatgttattcggctgaaacctccttctaatgtggtgtcccccctggaacaggctctctcacaacatggtgctcatggaaacaacctcattgctgttctagccaaatacatctaccacaaacatgaccctgctttgccacgtcttgccattcagctgctgaaacgtctggccacggtggccccaatgtcagtgtatgcttgtctgggcaatgatgcggctgccattcgtgatgccttcctgacccgattgcagagcaaaattgaggacatgcgcatcaaagtcatgattctagagttcctcactgttgcagtagagacccagccaggcctcatcgaactgtttctgaacctggaagttaaggatggcagtgatggctcaaaggaattcagccttgggatgtggagctgtctccatgcagtgctggagctgattgattcccaacagcaagatcgatactggtgcccacccctgctgcatcgtgccgccattgcctttttgcatgctctgtggcaggatcggagggacagtgccatgctggtcctccgaaccaaacccaagttttgggaaaatttaaccagtccgctgtttggaaccctttctcctccctctgaaacatcagagcccagcatcctggaaacctgtgccctaatcatgaagataatttgcttggagatatactatgtagtaaagggttcattagaccagtcattaaaggatacactgaagaaattttccatcgagaaacgctttgcctactggtcagggtatgtcaagtcattggcagttcacgtggccgaaacagaaggcagcagctgcacctccttgttagagtaccagatgctggtgtccgcctggaggatgcttctcatcattgccaccactcatgcagatataatgcacctgactgactctgtggtgcgtcgccagctctttcttgacgtgcttgatggaaccaaagcattactcctagttccagcctcagtgaactgccttcgccttggctccatgaagtgcactctgctgcttatcctcctccggcagtggaagagagagttaggttctgtggatgaaatccttggacccttgacggagatcctggagggagtgctgcaggccgaccagcaactcatggagaagaccaaggccaaggtgttctcagcattcatcacagtgttgcaaatgaaggagatgaaagtaagtgacatcccccagtactcccagctggtgctgaatgtctgtgagaccctccaagaggaagtgattgcactcttcgaccagacccgccacagtctggcattaggcagtgccacagaggacaaggacagcatggagactgacgactgttctcggtcccggcacagggaccagcgtgatggggtgtgtgtcctgggcctgcacctggccaaggagctgtgtgaggtagacgaggatggtgactcctggctgcaggtaacccgcaggctccccatcctacccaccctcctcaccactctagaggtgagccttcgcatgaagcagaacctgcatttcactgaggccacattgcatctgctcctcaccctggctcgcactcagcagggagccacagcagtggctggagctggcatcacccagagcatttgtttgccccttctgagtgtgtaccagctgagcaccaacggcacagcacagacacctagtgcctctcggaagtccctggatgccccctcttggccaggagtctaccgcctgtccatgtccctgatggagcagctgctcaaaactctgcgctacaacttcctgcctgaggccctggacttcgtgggtgtccaccaggagcggaccttacagtgcctcaacgcagtgaggacagtgcagagtctggcctgcctggaggaggcggaccacaccgtgggttttattctgcagctctctaacttcatgaaggagtggcacttccacctgcctcagctcatgcgtgatatccaggtcaacctgggttacttgtgccaggcatgtacctctctcctgcacagtcgaaagatgctgcagcattacttacagaacaaaaatggggatggcctcccctcagctgttgcccagcgagtccagaggccaccgtctgctgcttctgctgccccctcctcctcaaagcagcccgctgctgacacagaggcatcagagcagcaggccttgcacacagtccagtatggccttctcaagatcctcagcaagacgctggcagccctgcgccacttcaccccagatgtctgccagattctgctggatcagtccctggaccttgctgaatacaacttcctgtttgccctgagctttaccactcccacctttgactccgaagtggccccctccttcgggacccttctggccacagtgaatgtggccctcaacatgcttggagagctggacaagaaaaaggagcccctcacccaggcagtggggctcagcacacaggcagaagggaccaggacgttaaagtccctcctgatgtttaccatggaaaactgcttctacctgctcatctctcaggcgatgcggtaccttagggacccggctgtgcacccccgggacaaacagcggatgaagcaggagcntcagctctgagttgagcacgctgctgtccagcctctcgcgctacttccgcctggggagcccccagctccccgtgccacttggtgtcctcccctccgccggcagggcaaagtccacctctcctctccaaaagccaagcccttggagagtcaggagcctctgaatccagttggtgcaggcgtttgtcgggcatatgcaaaagatagggcagtgctgttctgcccaacctacccctctccaccagcctacactgcacccctggctggcaggggtgcctgcctggctgctagggccctatacaaatggagggcaccctccctgtcaaccccccctcccggaagtagcccacgactcccagcccacccaccccactgacgttatttttatactaaatgaaaaggtcccaccacagccatgggaacccgagtcttctgtgctcaggtcctcacgctgcagacgccccctagaggaactttccttcctttccagcattccccacatgcactgccggccaggggagaggcggcagcccagcagagggctctatgcacgggtttcaaacctgttttccacactctgtctttgcagttttggtaattctgtggtctatttatacagatattaaaatcttgtttatagacagcctgtgtgatgtttaacttcaaagcccagggatgacaacgtggctctcagaacctaggaaaactcccctgggccaggcgcctgggagtggggctgcagccttcgggggaagggcaggtactgatggatgggctagttcaccagcatctcctcattcctgtccttgggctgagggtttggctgggtgggcgctgtcagatattcccttccttgggcctgcgctggtcctgtccttgaccctgctttcattggcccagtgggctgagct

SEQ ID NO: 124013 - DNA, 783 bp, Homo sapiens
atggtggatcaagaggcaatatttgggtgcaaaaacaggaataactgttcccatttagagccaccagtttccaggcttgaaggtggggcctttgtcagggacctgctgtctcctacgcagtatttacttgcctcctgtccatatcagtatgatgggtcctttgtcatccagcaaatcccaagcagcaacctgttcatggtggtggtggacagcagctgcctctgtgaatctgtggcccccatcaccatggcacccattgaaatcaggtatatccttttgtgtgcaggtccactcactaccacggaaaccagagaatgcaagggagtgtgggggtgcgccgagtctcccaagcccagacagtcctccttctgctccctctgcttttgatgctcttctcaaggtgacactgactgagatgttctcttactgactgagatgttctcttggcatgctaaatcatggataaactgtgaaccccaaaatatggtgcaaacatacgagacatgaatatagtcccaacccatcagcatcctcatccatgattttaaaactgtgcgtgatataaactctttaaagatatgttgacaaaaagttatctatcatctttttactttgccagtcatgcaaatgtgagtttgccacatgataatcacccttcatcagaaatgggaccgcaagtggtaggcagtgtcccttctgcttgaaacctattgaaaccaatttaaaactgtgtactttttaaataaataaagtatattaaaatcataaaaaaaaaaaaaaaaa

SEQ ID NO: 124014 - DNA, 1377 bp, Homo sapiens
atggtggtgcatgtctgtgatcccagccaggccactgccatcaccgcctgctggtcctcacaggcgtcggggccccaggcagtgagaaggcggctgctgactcctctttcctccccagctgccagggacctggtgagcaaagagggcttccggcgggcccggcacgtggtgggggagattcggcgcacggcccaggcagcggccgccctgagacgtggcgactacagacctttggccgcctcatgggagagccaccgctcactcaggagcactacggcgggactgccaccttctacctctctcaagcagccgatggagccaaggtgctgtgcttgtgaggcacccccaggacagcacacggtgagggtgcgggctgcaggccagtcccacggctctgtgcccggtgccatcttccatatccgggtgctcaataaacttgtgcctccaatgtggtacctgcctcctctagaggaccaagtggaccacttgctaaccctaaaggtacgagtaagttccctgaactcgaagctctctgcacaggaaaggaaggagctgcttgctgacctggagcgagaaaagccccagaccaagattctgtacatcaccccagagatggcagcttcatcctccttccagcccaccctgaactccctggtgtcccgccacctgctgtcttacttggtggtggatgaagctcattgtgtttcccaatgggggcatgactttcgtcctgactacttgcgtctggccaccccacaggtccaagaggacgtgtttgctgccctgcacctgaagaaaccagttgccatcttcaagactccctgcttccgggccaacctcttctatgatgtgcaattcaaggaactgatttctgatcctatgaacctgaaggacttctccttaaggctcttggacaggaggctgataaaggggactagagaggcttgtgaacagctggccatagagctcagctgcaggggtgtgaacgccaaggcttaccatgcagatcctggttatcaggtgacccaccatcttattgcagatactcaggcagagctaaaggctgaaggctctgaaagaacgctggtgcagaacgactggatggaggagaaggtccctgtaattgttgcaaccattagttttgggatgggagtggataaagccaatgtcagggtggattgcctagtgctgtgcccaaaggaccaggtgcatgtgctccttcgagggctagaggggaaggaagtccggagagagtccttagaatacagcctgaatgctgacagctcctgtgcggcctgctcccaggagttgtttaaagctttgccgccacctctcacacttgctgactcagaagacctctcctggaaggagcggtga

SEQ ID NO: 124015 - DNA, 205 bp, Homo sapiens
ggtggattgcctagtgctgtgcccaaaggaccaggtgcatgtgctccttcgagggctagaggggaaggaagtccggagagagtccttagaatacagcctgaatgctgacagctcctgtgcggcctgctcccaggagttgtttaaagctttgccgccacctctcacacttgctgactcagaagacctctcctggaaggagcggtga

SEQ ID NO: 124016 - DNA, 2456 bp, Homo sapiens
  misc_feature (1)...(2456): n = a,t,c or g
atggtgccggacgcggcagtgctcgctcagctagcgattcgggctcgggtgaacagacgctggccgactgggctctccgcccctcacctctgcggtgctgcctgctccaggtgccgccatgccgccattgccaagtacttcggggatgcgctgcctgcctgcgccaaaggctgcgaccactgccagaaccccacggccgtgcggaggcggctggaggccttggagcgcagcagcagctggagcaagacctgcatcgggccctcccaggggaacggctttgaccccgagctgtacgagggaggccgcaagggctacgggggcttcagcaggtatgacgaaggttctggaggcagcggggatgaaggcagagatgaggcccacaagcgggagtggaacctcttctatcagaagcagatgcagctgcgcaagggcaaagaccccaagatagaagaatttgtacccccagatgagaactgtcccctgaaagaggcttctagcaggaggatccccaggctgactgtgaaggcacgggagcactgcctgcggcttctggaggaggcgctgagcagcaaccgccagtcaacacgtaccgctgatgaagctgactctccgtgccaaggccgtggagctggaacatgagacattccggaacgccaaggtggccaacctctacaaggccagcgtgctgaagaaggtggccgatatccacagagcctccaaggatgggcagccctatgacatgggaggcagtgccaagagctgcagtgcccaagctgagcccccggagcccaatgagtatgacattccaccagcctcccatgtgtactcgctcaaacccaagcgggtgggagctggtttccccaaaggctcctgcccgttccagacggccacggaactgatggagacgactcggatcagggagcaagccccccagcccgagcggggaggcgagcacgagcccccgagccggccctgtggcctcctggatgaggatgggagtgagcccctccctgggcccagaggggaggtccctggaggcagcgctcactatggggggccctcccctgagaagaaggcaaaaagttcctctgggggcagttcccttgccaagggccgggctagcaagaaacagcagctcctagccacagcggcccacaaggattctcagagcatcgcccgcttcttctgccgaagggtggaaagcccagctctgctggcatcagccccagaggcagaaggtgcctgcccctcctgtgagggggtttcagggacccccgattggccccagagaagtacacaggggaggaagatggagccgggggacattcgcctgcccctccccagactgaggagtgcctcagggagaggccaagcacctgcccgcccagagaccagggcacccctgaagtccagcccacccctgcaaaggacacatggaaagggaaagcggcctcgattcccagcaaggagaacccagagagccagcctcagaagaggccacgcccctcagccaatccctccgtcgtagctgaggtcaagggcagcgtctcggccagcgaacagggcaccttgaatcccacggctcaagaccccttccagctctccgctcctggcgtctccttgaaggaggcagcaaatgttgtggtcaagtgcctcacccctttctacaaggagggcaagtttgcttccaaggagttgtttaaaggctttgcccgccacctctcacacttgctgactcagaagacctctcctggaaggagcgtgaaagaagaggcccagaacctcatcagggcacttcttccatgggccgggcccggtgcgagagcgaagctgactgggcatggccgtgtgtggcccccagaagatgaccaactgctggctgggcagggccgcagtcctcccccagattctagcatggggtcatcctggggcctcacctgcttgatgccaggggccatcgtcttttctcagtcctttctccttttccaaaccatacttggctttggggatgaccccagacaccccttgaatccaggtcagaggtcaaccccacctttctttctgcttgcaaaagcttatagaccccttcttcaagagccggtcctcatggcttgggttttctggggacacatgtcgaggacaagaaggtggagggtggtggagctgctgctggaagaaggggaaggaagagtggcccctccccgagttctaagtcaggatgaggcccacctgtccaaggtatcggaacctacccaggggaccctcagatcctcccacccccctcccccatccattacgatgccgagttcccagccttgncccaggtcagagctgtggcagaggagaggcagccaggccctgttacctgctcagctcctgctcaggaaggccaggcctgacagatgtttgggagaggaataaagttgtgttgttgtggggcaaaaaaaaaaaaaaaa

SEQ ID NO: 124017 - DNA, 371 bp, Homo sapiens
ggaattcgagcgtgtgactgcggaagctgtgaagccacgggagacctcggagcctatagcatcagctcagcgcttctgtgagaaattccctttcctttgaagttttttgccctttatttgcatccttaaagcagttcgcttgttttccctccttggaaaaattaattatgatagtattggcttatttatgatcaccaagacttgtattcccttagcatagcttacagtataagttcacacttagctttgagcaccagcaccaggaagacagctttttaaaattacttacttacgtaccatcttgttccaaaaaagatttgtggtggtacaaaagctatatagaatacagaagatgaaaaaggaattgagtg

SEQ ID NO: 124018 - DNA, 1430 bp, Homo sapiens
gcagtgctagtgctgccgctcgctgccccgggcaggggcacaggtaggtggcggccgcgggccgggccgctcgcggggccccgggttgcgtgtgggagcgggggcggggtgtgagaaaatgggcagctgcacatggtcaatctggctctggatggtgtcaggagtagcctgcagaagccaaggcctttcagactgttccccaaaggcttttctgtggagctttgcatgaacagggaagacgacactgcacggaaagagaagactgatcatttcatcttcacatacacccgagaggggaatcttcggtactccgccaaatccctcttcagccttgtcctgggtttcatctccgacaatgtggatcacattgattcccttattggctttcctgagcagattgctgaaaagctgttctctgctgctgaagccagacagaaattcactgagccagggtgcagggctggagggctttacagaaattcactggaggcctatgggaagtttgggtgctttgctccctgtgtttcttgctgtggaaacttccagacatctgttgcaagcttggagatgagcatgaacttctagaacatctcaccaatgaagccctgtctaggtactgacctgtcaccacttgcagatgaattgtttcagtattgttttaaaggctgatccaacaggattatcgagtgatgaaaagaggccttgagaatctaacattattagacttatcatgtaagttttcttcgaaattatagattattttaatgttggaagaatggccttagagatcatgtagttctttctctgggacagggctcaaggtaagacttttggttccttctctcatttttctagactcaacaatttgatattttgcctgtgctaattgggaatttgatcatagtaactgcaagacagagggctgggctgaccaggtactccagatttttcttccttgcggttgatgcagcttttcatcttaattccaagtgtcttatccaacaagcagggagactgctgagtcgtgtttcagaagcacactgagcttggtccagaacatgcatgatgaagcagctcagcgcttctgtgagaaattccctttcctttgaagttttttgccctttatttgcatccttaaagcagttcgcttgttttagaaactccagttctataaagagaaagccccagattgccatgggccagtgttgaaacacgaagctatctcaagccaggagtcaaagaagagcaagaagagaccttttgaggagtcagagacagaacagaataactcttcacaaccttcaaagcagaaatatgtatgtcttgctgtggaagactgggacttgttaaattcctattgattagtagatacaagttgacctttctctggcccccagctctagtgtttgagtaaaggagactgaggatga

SEQ ID NO: 124019 - DNA, 1276 bp, Homo sapiens
  misc_feature (1)...(1276): n = a,t,c or g
ccgacaatgtggatcacattgattcccttattggctttcctgagcagattgctgaaaagctgttctttgctgctgaagccagacagaaattcactgagccaggtgcagggctgagggctttacaaaaattcactgaggcctatggaagtttggtgctttgctccctgtgtttgcgaaacaggtatctcgtgatttcagaaaagcttgaggagattaagtctttccgggagctgacctgcctggatctttcctgttgcaagcttggagatgagcatgaacttctagaacatctcaccaatgaagccctgtctagtgtaactcagctccacctgaaggataattgtttatctgatgctggggtgcggaagatgacagcaccagttcgagtgatgaaaagaggccttgaggaatctaacattattaggacttatcatgtaaccctggagatcacaggtggcagggcattgggataccntctttttctttttagggggaacttaaacttgctttagggatatctctggggacaggggctcaagggacatcaaaacccttcaagcacaagctccagacccacataggccttgttcactccaaagtgcctttgaaggaatttgatcatagtaactgcaagacagagggctgggctgaccagatcgttctgcagtgggagcgtgtgactgcggaagctgtgaagccacgggagacctcggagcctatagcagcagctcagcgcttctatgggaagcggtctcgagcagaagccccactgaaagtgtcccctggcagacacccacaatgaactcttcccgagaaactccaagttctataaagagaaagccccaagattgccatgggccaagtgttgaaacacgaagctatctcaaagcccaggagtccaaagaagagcaagaagagaccttttgaggagtcagagacagaacagaataactcttcacaaccttcaaagcagaaatatgtatgtcttgctgtggaagactgggacttgtttaaattcctattgattagtagatacaagttgacctttctctggcccccagctctagtgtttgagtaaaggagactgaggattatttatctttttgtttgaatttacctatggcattagcatagtaagcagatatttctacttttgtggtctgggaggggaatgctatggcactacgtcataatttctaatgcacattctcaatacatagtaatctcttccaaataaacatttttgctgtccttaaaagaaaagaagaaaaagtcg

SEQ ID NO: 124020 - DNA, 391 bp, Homo sapiens
gtaaagcactgcctccatagaccaattctctgggatccctggaaaacatctggcatccagcaagtcttgacccctctttagaaagccatggagaaactggaagcaattctgttaattatttgctctctagaggcaattgggttaattaccctcccttccctatccatgacacaatttctccagttacatgtagaatgctgttatgtgtctcctgaccagaccccttatttcatagatgtggaaactgaggccatgaaggatgaggtgactgttcacaatccacatggctagttagtgtccagagcctggcctggacttctctcttgttctggggccttgagttctctccctcttctttagtacatatggccacaggtaacgtaatatgcgt

SEQ ID NO: 124021 - DNA, 1416 bp, Homo sapiens
atggtggtaccaccaaacatagcagaactgaagaatttggaagtgctcaactttttaaataaccagatcgagaagctgccaacacagatcagcaggcttcaaaaactcaaacacctgaaccttggatttttgtccccctgcaacagcatgaacaggctgaacatttcgccacaaggctttggctccctgccagctcttgaggttctggacttgacttacaacaacttgaatgaaaattatcttcctggaaacttcttctacctgaccaccctgtgtgcactctatctaagtgacaacgattttgaaatcctgccgccagatattgggaagctcacaaagttgcagatactcagcaatagggataacaacctgatctcactgcctaaggaaatcagggtgcttacccagcttaaagagctccacattcaggggaaccgcctcactgttctacccccagaattagggagcagaggcggctctggaagtcggtttagtgcggagaccgcgaccggaggagcgcagaacgctcctcccagcgtcctgggctccgcaggcacaatttttaaaccagaggcgaaatccgagtcccgccgccctccggggagggagcgtggccgcctagccgagccccttctctggctccgcccgcttttgcgccgcgaggccgcctgcgcctgcctttctcgcggccggaccgcgccggagtcccaggccccaggcagcccgggccgcagctgtcatggagaagcccggcgcgtacttggggtgcccggcaggagccccggccgcctcgcgcccttcttctcacccacgactgtggccggcggcggcctctgcttcccggacaaagctggagatgctgctgcggagtcggccctgggacctgcttcttctcttggctccggggcccgcagccgtcggggcccggaagggctccccggggcgttccctcaggagcggtggccagggctgatggggcgtgtacgacgcgggaccccgagcccggcagcagccaagtatggcaaggaccagcgcgagcatctccccactgcggccggggacggcgtggggtgggagccgacccgggacatccaggtgggatcggccaccgctcaggcgctgtcccaggcgaacgccgccaggggcaggctcagcaccgcccaggccgccggctcgttacatgtagaatgctgttatgtgtctcctggccagaccctttatttcacagatgtggaaattgaggccatgaaggatgagagcaggggcatctccatcttgtacaagcaccgccatcttaaagttccccttgatcaaaaactgcctaaatctaaaggtcatcagcctgatggctacggtcagcatgaccataaaccacaaatgacatctctgaccagaaacattgcaaccctaagataa

SEQ ID NO: 124022 - DNA, 2283 bp, Homo sapiens
atgaacaggctgaacatttcgccacaaggctttggctccctgccagctcttgaggttctggacttgacttacaacaacttgaatgaaaattatcttcctggaaacttcttctacctgaccaccctgtgtgcactctatctaagtgacaacgattttgaaatcctgccgccagatattgggaagctcacaaagttgcagatactcagcaatagggataacaacctgatctcactgcctaaggaaatcagggtgcttacccagcttaaagagctccacattcaggggaaccgcctcactgttctacccccagaattagcttcctcatcacggtgtggtcctctttcccacccatatgctggtaaaaggattcctagaaatgcagttttcaagtttgaacaaaacacaaccctggcacacccccccaaaaaaagcaggcagagagatgttgctggatgtaaccggatttccggaagccgcgacctcgaagcccccagcgtttctccaccgacggcggggccggggctcctggaatcctcggagccgcagctccagcctgcagcgcacgccttggcccccagggagcagagaggcagagtacccccctgcatccggagcatagcaagcatgccccaggctgaggacctgcgacttgggagcagaggcggctctggaagtcggtttagtgcggagaccgcgaccggaggagcgcagaacgctcctcccagcgtcctgggctccgcaggcacaatttttaaaccagaggcgaaatccgagtcccgccgccctccggggagggagcgtggccgcatagccgagccccttctctggctccgcccgcttttgcgccgcgaggccgcctgcgcctgcctttctcgcggccggaccgcgccggagtcccaggccccaggcagcccgggccgcagctgtcatggagaagcccggcgcgtacttggggtgcccggcaggagccccggccgcctcgcgcccttcttctcacccacgactgtggccggcggcggcctctgcttcccggacaaagctggagatgctgctgcggagtcggccctgggacctgcttcttctcttggctccggggcccgcagccgtcggggcccggaagggctccccggggcgttccctcaggagcggtggccagggctgatggggcgtgtacgacgcgggaccccgagcccggcagcagccaagtatggcaaggaccagcgcgagcatctccccactgcggccggggacggcgtggggtgggagccgacccgggacatccaggtgggatcggccaccgctcaggcgctgtcccaggcgaacgccgccaggggcaggctcagcaccgcccaggccgccggctcgttacatgtagaatgctgttatgtgtctcctggccagaccctttatttcacagatgtggaaattgaggccatgaaggatgaggaaagtcgcgtcctggtcaggaggactgccgactggtctgcgccagctgcagcgtcctgggtctctttggcccagccagtcgtgaggactgtggcccaggatgctgccgaacaattggctgtgagggacaatagaagcctaggtttcaggacaagccagtcctccaagcctcaggaaagctgtccagagtggatggactctcatctgtttgctccacttgtaccacaactaagagaccctgcagagcagctggcgctgggtgttatactcaagggtagtgggaattgctgggctaaagcattggagaacactctgtttctagagggaacaagaacagagcctgggctgttttggagtggctcttatcggctcttggtcatggtctgtgtcatgcagcaggatttggtgagccacagttataggcaaaagccatgtctccaggatgaaccacatgggtaccatgttcatagcagccaggacactggaaaccaggaacttgtagacctcttattgatggcagtggtggcctgtctgaagtggctgctgccatcacactggctgtggcaaggaggtgcagccagggctgcacattctgtggaaccagcagcagctggagacaaatgggagccccactcattcagagttggtggggtgggagctccctggatgcagccgcagccacccaactcttggctatggacccagccctcctgctccatggagcaagaaggagccacacccactctgggcacagctgtagctgcccaagttgtggctgcagacccaggcatccttgcacccttgggggccagggaaggcccccccttgcgggcttga

SEQ ID NO: 124023 - DNA, 1821 bp, Homo sapiens
gaattccgttttttttttttgacgtgacatctctttattggttcagtctatgcctggcccagcggcacgcccaggtccagggggggtctggttggaggtctctggacagtcaggggcagcatcagcagaaaccctgggtgtcggggggctgtgggagtagcagcactggtccccgcgttgacaggtgccctccttaaacctcttgcaaggaaatgtcttgagccgggcagcccgctggcaacatcttccggcggctccttccgcttgttctgaagcagcctgcgtctctcctccatagcttcgtcggccgccttgcccctgtgcgaggggaggagtaggtgggaccccatctgccctttaccccttctttccctggctgagccccacccccaccttaccaccactcaccctggccgggcacgaggccggggaccccagttggcctccgggttagcctggaagcgcttgagtcctcgctgtcgggagctggggttggcatcttcccggatggtgaagttggcctgcagcctgggctccacactgagaatgcggaacgctgggctagtctctgatagtcgctcccgtttcaccggacattccttctcccagcaacgcatgatgtcccagagggcagaggcaggggcatccgtcttcacagcgttcttacaggcgtgggagagtgagacccggaagtcagcgtggaggagggccgaccgcaactgcaggaggcttggtgtgttgcagtggatggtgctgctcagctggtgtgcgttctgccgaagcttgtggttgcacgcccatcgtcttaggggctaccttccgtgaccatgtccaagtctctgaagaagttggtggaggagagccgggagaagaaccagcccgaggtggacatgagtgaccggggcatctccaacatgctggatgtcaacggcctctttaccttatcccatatcacacaactggtcctcagccataacaagctaacaatggtgccaccgaacatcgcagaactgaagaatttggaggtgctcaacttttttaataaccaaatcgaggagctgcccacacagatcagtagccttcagaaactcaaacacctgaaccttggcatgaacaggctgaacactttgccacgaggcttcggctccctgccagctcttgaggttctggacttgacgtacaacaacttgagcgaaaattctcttcctgggaaacttcttctacctggaccaccctggcgtgcactctatctaagtgacaacgagttttgaaatcctgccgccagatattggggaagcttcacaaagttgcagatactcagccttagggataacgacctgatctcgctgcctaaggaaatcggggagcttacccagcttaaagagctccacattcaggggaaccgccttcaccgttgtgcccccagaacttaggaaacttgggattttaactgggccagaagcaggtattcaaagcagagaacaatccctgggtgacccccattgcagaccagttccagcttggcgtgtcccatgtttttgagtatatccgttctgagacatacaaatacctctacggcagacacatgcaggccaacccagaaccaccgaagaagaataatgacaaatctaaaaagatcagccggaaacccctggcagccaataacagataaagaaagggattggcatcggctggccttccagcaccttctctctccaacacttcattctctcttgccctgtctctcaaataaacccaatgctgcgtgtgaggccttttttatttttcttttcactctctttctaatgcttcccaccttac

SEQ ID NO: 124024 - DNA, 445 bp, Homo sapiens
  misc_feature (1)...(445): n = a,t,c or g
nttttggttaagaaatggcaagaagtagatcggaaaggagctctggcacaaggcaaagcccctcgcccagattctacttcaaagaaatcctgccacccgatgattaaacagtgaatanaatgtcatggctctttcctgcgacaattctatttgaggaaaagatttgtttttcccttttcccaaggaagctcgtgggacagcatgggcactactcttcatgtgcggtgacaccagcccccagatgccttgaattaagtgtcctcacctttatgcatgactgcaaagccagctggagcattttctatggagcctccgtatgttttaggcccatgaccttcgtgaggtgacgggcactcactcccatgagccctggctgtgtgctgttgtgtgcctatcggcagatccatccttcctgcctccaaggaggatacacagagaatgtatt

SEQ ID NO: 124025 - DNA, 10438 bp, Homo sapiens
gctctgtgtcagccccgtcaccgccgggcggcccgcgcggagtctgagggagatggaagttgagcaagagcagcggcgcagaaaggtggaggccgggaggacgaagcttgctcacttccgacagagaaaaacaaaaggtgacagttcgcattcggagaaaaagacggcgaagaggaagggctcggctgtcgatgcgtctgtccaggaggagagtccggtaaccaaggaggacagcgcactctgtggaggaggggacatttgcaaaagcacatcatgtgacgacacccctgatggggcaggaggggcctttgcagctcagccggaggactgtgatggagagaagagagaggacttggaacagctgcagcagaagcaagtcaatgaccatcctccagagcagtgtgggatgttcacagtcagtgaccacccaccagaacagcatgggatgttcacagtcggtgaccacccaccagaacagcgtgggatgttcacagtcagtgaccacccaccagaacagcatgggatgttcacagtcagtgaccacccaccagaacagcgtgggatgttcacaatcagtgaccaccaaccggaacagcgtgggatgttcacagtcagtgaccacacaccagaacagcgtgggatcttcacaatcagtgaccacccagcagaacagcgtgggatgttcacaaaggagtgtgaacaagaatgtgaacttgccattactgacctggagagcggccgtgaagatgaggctggcctgcatcagagtcaggccgtgcatggccttgagctggaggcgctgcgcctgagtctgagcaacatgcacacggcgcagctggagctgacacaggccaacctccagaaggagaaggagacggcattgacggagctgcgggagatgctcaacagccggcgtgcccaggagctggccctgctacagagcaggcagcagcacgagctggagctcctcagggagcagcacgcacgggagaaggaggaggtggtgctcaggtgtggacaggaagcagctgagctgaaggagaagttacaatcagaaatggagaaaaacgcccagatagtaaagaccctgaaggaagattgggaatctgaaaaagatttatgtttagaaaatctacgcaaagaactgtctgcaaagcatcaatcagaaatggaggatttacaaaaccagtttcagaaagaattggcagaacagagagctgagttggagaagatttttcaagacaaaaaccaggctgaacgggcccttaggaacctggagagtcatcatcaagcagccattgagaagttacgtgaagacctgcagtccgagcacggccggtgtttagaagacttggagttcaagttcaaagagagcgagaaagaaaaacagctggagttagagaatcttcaagcatcatatgaagacctgaaggcacaatcacaagaagagatcaggcgcttgtggtcccagcttgattctgccaggaccagtagacaggaattgagtgagctacatgagcaactcctggcgcgcacctctcgtgtggaagatttagaacagctgaagcagcgagaaaaaacccagcatgagtccgaactggagcaactgaggatttattttgaaaagaagttaagggatgctgagaaaacttaccaagaagacctaaccctgttacagcagaggctgcagggggcgagggaagatgctcttctggactctgtggaagttgggttgtcctgtgtgggtttagaagagaaacctgagaaaggaagaaaagatcacgttgatgaactcgagcctgagcgacataaggagagcctgccacgcttccaggcggagttagaagaaagccacaggcaccagctggaagcgctggagtctcccctctgcatccagcacgaggggcatgtctcagacagatgctgcgtagagacttcagcattgggacacgagtggcgtctggaaccctctgaagggcacagccaagagcttccctgggtgcatctccagggtgtgcaggacggggacttggaggccgacacagagcgggcagccagagtcttgggtctggaaactgagcacaaggtgcaactttcgcttcttcagactgagctcaaagaagaaattgaactcctaaaaatagaaaatagaaatttgtttgagaagttgcagcatgaaactcgtctgaaggacgatttggagaaggtaaaacacaatctaattgaagaccaccagaaggaactaaataatgctaagcaaaagactgagctgatgaaacaggaattccaaagaaaagaaacggactggaaagttatgaaggaggagctacagcgggaagctgaggagaagttaacattgatgctacttgaactgagagaaaaggctgaatccgagaaacagaccatcataaacaagttggagcttcgagaagctgaaatgaggcagcttcaggaccaacaggcagcgcagatcctggatctggagaggtccttgacggagcagcaggcccgcctgcagcagctggaacaggacctcacttcagacgacgccctgcattgcagccagtgtgggcgggagccgcccacagcccaggacggggagcttgccgcgctccacgtgaaggaagactgcgccctgcagctgatgctggcccggagcaggtttttagaggaacgtaaagagatcgccgagaaattcagtgcggaacaagatgccttcctgcagctcctccaggagagacaccagcagcagctcctgtcagtgacggcggagctcgaggccagacaccaggccgcgttgggcgagctgacagcctccttagagagcaagcagggggctctgctggctgcacgtgtggccgaactgcagaccaaacacgctgccgacctcggcgctctggagaccagacatctgtccacccttgattctttggaatcctgttacctgtctgaatttcagaccatccgtgaggagcacaggcaggccctagagctcttacgagcagactttgaggaacaactgtggaaaaaggactctcttcaccaaacgattttgactcaagagttggagaaactgaagcggaaacacaaaggggagctacagtctgtgcgggaccacctgcgaaccgaagcgagcacagagctcgccggaaccgtggctcacgagctgcaggggagtgcaccagggtgaatttggaagtgaaaagaaaactgctttgcatgaaaaagaggagacacttcggcttcagagtgcacaggcacagccttttcaccaagaggagaaagagtctttgtctctgcagcttcaaaagaagaatcaccaagtccagcagctgaaagaccaggttttatccttaagtcacgagatagaagagtgccgctccgagttggaggtgctgcagcagaggcgggagcgggagaaccgggaaggcgcaaacctcctctccatgctcaaggccgacgtcaacctgtcccacagcgaaagaggggccctccaggacgccctgcgcaggctgctgggtttgtttggagagacgctgagggcagccgtcaccctgaggagccggatcggggagcgcgtggggctctgcctggatgacgcgggcgcaggcctggccctgtcgacagctccggcgctggaggagacatggtctgatgtggccctcccggagttggacagaactttgtctgaatgtgcagagatgtcttccgtggctgaaattagcagccacatgcgtgaaagctttctcatgagcccagaaagtgtgcgggagtgtgagcagcccatccggagggtcttccagagcctcagcctggccgtggacggcctcatggagatggccctggactccagcaggcagctggaagaagcacgccaacttcattctcgttttgaaaaagaatttagttttaagaatgaggagacagcacaggttgtcaggaagcaccaggagctgctggagtgtttgacggaggagagcgcagcaaaggcagagctggcgctggagctgcacaagactcagggtacccttgagggattcaaggtggagacagcagatctgaaggaggtgctggccgggaaggaggattccgagcaccgtctggtgctggagctggagagcctgagacggcagctgcagcaggcggcccaggagcaggcggcgctgagggaggagtgcacccgtctgtggagtcggggggaggccacagccacggatgccgagggccagagaagctgctctcggaaaggaagtggaggatctgaccaaagaacagtcggagaccaggaagcaggctgagaaggaccgctcagccctgctctcccagatgaagattttggagtctgagttagaagaacagctgtctcagcatcgcgggtgtgccaagcaggcggaggccgtcactgccctggaacagcaggtggcatctctggacaagcatttgcgcaaccagcggcaattcatggatgagcaggcagccgagcgggagcacgagcgcgaggagttccagcaggagattcagaggctggaggggcagctccgccaggcggccaagccgcagccctggggccctcgcgacagccagcaggcgccgctggatggagaggttgagttgttacaacacaagttgagagaaaagttggatgaatttaatgaattggctatacagaaagagtcggcagatagacaagtgttaatgcaggaagaagaaattaaacgtctggaggagatgaacatcaacatcaggaaaaaagtggcccagctccaggaagaagtggaaaaacagaaaaacatcgtgaaagggctggaacaggataaagaggtgttaaagaaacagcagatgagtagcttgcttctggcgtccacgttgcagtctacactagatgcaggcagatgtcccgagcctccttcgggcagccctcctgagggtccagaaatacagttagaggtgacacagagagcactcctgcggcgcgagagcgaggttttggacttaaaagaacagctagaaaagatgaaaggtgacttagaaagtaaaaatgaagaaatactacatctgaacttaaaattggacatgcagaacagccagactgctgtcagcctcagagaacttgaggaagagaacacgagcttgaaggtcatatataccagaagttctgagattgaagagctgaaagccactattgaaaatctgcaagagaatcagaaacgattacaaaaggagaaagcagaggaaattgaacaactccatgaagtcattgagaagctgcagcacgagctgtccctcatggggcctgtggtgcacgaagtcagcgacagtcaggctggcagtctgcagagcgagctgctctgctcccaggccgggggccctcgtgggcaggccctacagggcgagctcgaggctgcgctggaagccaaggaggccctgagccggctgctggctgaccaggagcgcaggcacagccaggccctggaggccctgcagcagcgcctccagggcgcagaggaggctgcggagctacagctggctgagctggagcgcaatgtagccctcagggaggctgaggtcgaagacatggcctcccggatccaggagttcgaagcggccctgaaagcaaaggaagcgacgattgccgagagaaatttagaaatcgacgctctgaaccagcggaaggcggcccactctgccgagctggaggccgtcctgttggccttggcccgcatccgccgcgccctggagcagcagcccctggcagccggggcggcgcctcccgagctgcagtggctccgagcgcagtgtgcccgcctcagccgccagctgcaggtgctgcaccagcggttcctgaggtgccaggtggagctggacaggcggcaggcccgcagagccacagctcacacacgggtgcccggggcccacccacagcctcgcatggatggtggcgccaaggcccaggtcaccggcgacgtggaggcctcccatgatgctgctttggagccggttgtccctgacccacagggtgatctgcagcctgtcctggtgacgttgaaggatgcacctctctgcaagcaagaaggcgtgatgtcagtgctcaccgtctgccagaggcagctgcagtcggagctgctcttggtgaaaaatgaaatgcgcctgagtctggaggacggcggcaagggtaaagaaaaagtactggaagattgtcagctgccgaaggtcgatctcgtagctcaggtgaaacagcttcaggaaaaactgaaccgtttgctgtattccatgaccttccagaatgtggatgctgccgacaccaaatctctgtggcccatggcctcagcacacctgttggagagcagctggagtgatgattcctgtgacggagaagagcctgacatatcaccccacatagacacatgtgatgccaatacagccacggggggtgtaactgatgttatcaaaaatcaggccatagacgcgtgtgatgccaatacaaccccagggggtgtaactgatgttatcaaaaattgggattccttgataccagatgaaatgccagattctcccattcaagaaaaatcagaatgtcaggacaggtctctttcttcaccgaccagcgtacttggtggctcccgccaccagagccacactgcagaggctgggccccggaagagcccggtcgggatgctggacctgtcttcctggagctcccctgaggtcctcaggaaggactggaccctggagccctggcccagcctccccgtgacaccccactcaggagccctgagcctgtgcagtgccgacacatccctgggggacagggcggacacctcgctgccacagacccaggggccggggctgctttgttccccaggcgtgtctgcagcagcgctggcactgcagtgggccgagtctccgccggctgacgaccaccatgtgcagaggacggctgtggagaaagatgtcgaagattttatcacaacatcctttgattctcaagaaacattaagttcacctcctcctggattagaaggaaaagctgatagaagtgagaaaagtgacggctcgggttttggagcaagactgagcccggggtcaggaggccctgaggctcaaactgctggtcctgtgacccctgcttccatctctggaaggtttcagccgctgccggaagccatgaaggagaaggaagtgcgtccgaagcacgtgaaggctttactgcagatggtgcgtgacgagagccaccagatcctggcgctgtcagaaggccttgcacccccaagcggcgagccacacccaccccggaaggaagacgagatacaggacatctcgctccatgggggaaagacgcaggaagtgcccaccgcgtgccccgattggagaggggaccttctgcaggttgtgcaagaggcctttgaaaaagagcaggagatgcagggggttgagctgcagccccgactcagtggctcagatctggggggtcacagctccctgctcgaaaggctggagaagatcatccgtgagcagggagacctgcaggaaaagtccctggagcatcttcgcttgccggaccggagcagcctgctgtccgagatccaggcgctgcgtgcccagctgcgcatgacgcacctgcagaaccaggagaagctgcagcacttgcgcacggcgctgacaagcacagaggcgcgcgggagccagcaggagcaccagctgcgcaggcaggttgaactgctggcttataaagtagagcaggagaagtgcattgctggtgacttgcagaagacgctgagtgaagagcaagagaaggcaaacagcgtgcagaagctcctggcggcggagcagactgtagtgcgagatttgaagtccgacctctgtgagagcaggcagaagagcgaacagctgtcccggtccctctgcgaggtgcagcaggaggtcctccagctgagatccatgctgagcagtaaggagaacgagctgaaggccgcgcttcaggagctggagagtgagcaggggaaggggcgtgccctgcagagccagctggaggaggagcagctgcggcacctgcagagggagagccagagtgccaaggccctggaggagctgcgggcgtctttggagacacagcgtgctcagagcagtcgactctgcgtggcactgaaacacgagcagacggccaaggacaacctgcagaaggagctgcgtatcgagcactcacgctgcgaggccttgctggctcaggagcggagccagctctctgagctccagaaggaccttgcggctgagaagagccgcaccctggagctgtcagaggccttgcggcacgagcggctcctgaccgagcagctgagccagaggacacaggaggcttgcgtgcaccaggacacacaggcccatcacgctctgctgcagaagctgaaggaggagaagtcccgggtggtggacttgcaagcgatgcttgaaaaggtgcagcagcaagccctgcattctcagcagcagcttgaggctgaggctcagaagcactgtgaggcgctcaggagagagaaggaggtaagtgccacactgaagtcgacggtggaagccctgcacacccaaaaacgagagctgagatgctctctggagagagagagggagaaaccagcgtggttgcaggcagaattagagcagtcacacccacggttgaaagagcaagaaggacgcaaggctgcgaggaggagcgcggaggccaggcagagcccagcggctgcggagcagtggaggaagtggcagagagacaaggagaagctgcgagaattagaactgcagcgtcagcgtgacttgcataagatcaagcagcttcagcagacagtgagagacctggagtcgaaggacgaggtgcctggcagccgcctccacctaggttctgcccgcagggctgccggctcggatgcggaccacctccgggaacagcagcgagagctggaggcgatgaggcagcggctgctctctgccgcccggcttctcaccagcttcaccagccaggccgtggacaggacagttaatgattggacgtcatccaatgagaaagcagtgatgtctttactgcacacgttggaggagctgaagtctgacttgagcaggcccacctcctcccagaaaaaaatggcagcagagctgcagttccagtttgtggacgtcctgctgaaagacaatgtttccctcacaaaagcgctcagcacggtgacccaggagaagctggagctgagcagagccgtgtctaagcttgagaagttgctgaagcaccatctgcagaagggctgcagcccaagcaggtcggaaaggtctgcttggaagccagacgaaacggctccacagagttccctgaggcgcccagaccccggccggcttccaccagctgccagcgaggaagcacacaccagcaatgtcaagatggaaaaattgtccctgcattacttgagagcagagagctttagaaaagctctgatttatcaaaagaagtatcttttgctgttgattggtggattccaggattctgaacaagaaacactctccatgattgcccatttgggggtatttccttccaaagcagaacggaaaatcacatctcgtcctttcaccaggttccgcacggccgtcagggtggtcattgcaatattaagattacgttttttggttaagaaatggcaagaagtagatcggaaaggagctctggcacaaggaaaagcccctcgcccagggccccgagcacgacagccgcagtctccacccagaaccagagagtcccccccaacccgggatgtaccctctggccacaccagggaccctgccagaggccgcagactggcagcagcagcctccccacacagtgggggaagagccactccatccccaaattcaagattagaaagatccctgactgcttctcaagatccaggacattccttgacagagtatattcaccatttagaagtgatccagcaaagattgggagggtactaccagattctacttcaaagaaatcctgccacccgatgattaaacagtgaataaaatgtcatggctctttcctgcgacaattctatttgaggaaaagatttgtttttcccttttcccaaggaagctcgtgggacagcatgggcactactcttcatgtgcggtgacaccagcccccagatgccttgaattaagtgtcctcacctttatgcatgactgcaaagccagctggagcattttctatggagcctccgtatgttttaggcccatgaccttcgtgaggtgacgggcactcactcccatgagccctggctgtgtgctgttgtgtgcctatcggcagatccatccttcctgcctccaaggaggatacacagagaatggcttcctgttgttttgtttattttcttaacgtgtacagatggaaacttcatttaaaaataaaaacaaaacaactcaaaaa

SEQ ID NO: 124026 - DNA, 5619 bp, Homo sapiens
ggcgccgctggatggagaggttgagttgttacaacaaaagttgagagaaaagttggatgaatttaatgaattggctatacagaaagagtcggcagatagacaagtgttaatgcaggaagaagaaattaaacgtctggaggagatgaacatcaacatcaggaaaaaagtggcccagctccaggaagaagtggaaaaacagaaaaacatcgtgaaagggctggaacaggataaagaggtgttaaagaaacagcagatgagtagcttgcttctggcgtccacgttgcagtctacactagatgcaggcagatgtcccgagcctccttcgggcagccctcctgagggtccagaaatacagttagaggtgacacagagagcactcctgcggcgcgagagcgaggttttggacttaaaagaacagctagaaaagatgaaaggtgacttagaaagtaaaaatgaagaaatactacatctgaacttaaaattggacatgcagaacagccagactgctgtcagcctcagagaacttgaggaagagaacacgagcttgaaggtcatatataccagaagttctgagattgaagagctgaaagccactattgaaaatctgcaagagaatcagaaacgattacaaaaggagaaagcagaggaaattgaacaactccatgaagtcattgagaagctgcagcacgagctgtccctcatggggcctgtggtgcacgaagtcagcgacagtcaggctggcagtctgcagagcgagctgctctgctcccaggccgggggccctcgtgggcaggccctacagggcgagctcgaggctgcgctggaagccaaggaggccctgagccggctgctggctgaccaggagcgcaggcacagccaggccctggaggccctgcagcagcgcctccagggcgcagaggaggctgcggagctacagctggctgagctggagcgcaatgtagccctcagggaggctgaggtcgaagacatggcctcccggatccaggagttcgaagcggccctgaaagcaaaggaagcgacgattgccgagagaaatttagaaatcgacgctctgaaccagcggaaggcggcccactctgccgagctggaggccgtcctgttggccttggcccgcatccgccgcgccctggagcagcagcccctggcagccggggcggcgcctcccgagctgcagtggctccgagcgcagtgtgcccgcctcagccgccagctgcaggtgctgcaccagcggttcctgaggtgccaggtggagctggacaggcggcaggcccgcagagccacagctcacacacgggtgcccggggcccacccacagcctcgcatggatggtggcgccaaggcccaggtcaccggcgacgtggaggcctcccatgatgctgctttggagccggttgtccctgacccacagggtgatctgcagcctgtcctggtgacgttgaaggatgcacctctctgcaagcaagaaggcgtgatgtcagtgctcaccgtctgccagaggcagctgcagtcggagctgctcttggtgaaaaatgaaatgcgcctgagtctggaggacggcggcaagggtaaagaaaaagtactggaagattgtcagctgccgaaggtcgatctcgtagctcaggtgaaacagcttcaggaaaaactgaaccgtttgctgtattccatgaccttccagaatgtggatgctgccgacaccaaatctctgtggcccatggcctcagcacacctgttggagagcagctggagtgatgattcctgtgacggagaagagcctgacatatcaccccacatagacacatgtgatgccaatacagccacggggggtgtaactgatgttatcaaaaatcaggccatagacgcgtgtgatgccaatacaaccccagggggtgtaactgatgttatcaaaaattgggattccttgataccagatgaaatgccagattctcccattcaagaaaaatcagaatgtcaggacatgtctctttcttcaccgaccagcgtacttggtggctcccgccaccagagccacactgcagaggctgggccccggaagagcccggtcgggatgctggacctgtcttcctggagctcccctgaggtcctcaggaaggactggaccctggagccctggcccagcctccccgtgacaccccactcaggagccctgagcctgtgcagtgccgacacatccctgggggacagggcggacacctcgctgccacagacccaggggccggggctgctttgttccccaggcgtgtctgcagcagcgctggcactgcagtgggccgagtctccgccggctgacgaccaccatgtgcagaggacggctgtggagaaagatgtcgaagattttatcacaacatcctttgattctcaagaaacattaagttcacctcctcctggattagaaggaaaagctgatagaagtgagaaaagtgacggctcgggttttggagcaagactgagcccggggtcaggaggccctgaggctcaaactgctggtcctgtgacccctgcttccatctctggaaggtttcagccgctgccggaagccatgaaggagaaggaagtgcgtccgaagcacgtgaaggctttactgcagatggtgcgtgacgagagccaccagatcctggcgctgtcagaaggccttgcacccccaagcggcgagccacacccaccccggaaggaagacgagatacaggacatctcgctccatgggggaaagacgcaggaagtgcccaccgcgtgccccgattggagaggggaccttctgcaggttgtgcaagaggcctttgaaaaagagcaggagatgcagggggttgagctgcagccccgactcagtggctcagatctggggggtcacagctccctgctcgaaaggctggagaagatcatccgtgagcagggagacctgcaggaaaagtccctggagcatcttcgcttgccggaccggagcagcctgctgtccgagatccaggcgctgcgtgcccagcatgcgcatgacgcacctgttgaattaggagaagctgcagcacttgcgcacggggctgagaagcgcagaggcgcgcgggagccatcatgagcaccagctgcgcaggcaggttgaactggtggcttataaagtagagcaggagaagtgcattgctggggacttgcagaagacgctgagtgaagagcaagagaaggcaaacagcgtgcagaagctcctggcggcggagcagactgtagtgcgagatttgaagtccgacctctgtgagagcaggcagaagagcgaacagctgtcccggtccctctgcgaggtgcagcaggaggtcctccagctgagatccatgctgagcagtaaggagaacgagctgaaggccgcgcttcaggagctggagagtgagcaggggaaggggcgtgccctgcagagccagctggaggaggagcagctgcggcacctgcagagggagagccagagtgccaaggccctggaggagctgcgggcgtctttggagacacagcgtgctcagagcagtcgactctgcgtggcactgaaacacgagcagacggccaaggacaacctgcagaaggagctgcgtatcgagcactcacgctgcgaggccttgctggctcaggagcggagccagctctctgagctccagaaggaccttgcggctgagaagagccgcaccctggagctgtcagaggccttgcggcacgagcggctcctgaccgagcagctgagccagaggacacaggaggcttgcgtgcaccaggacacacaggcccatcacgctctgctgcagaagctgaaggaggagaagtcccgggtggtggacttgcaagcgatgcttgaaaaggtgcagcagcaagccctgcattctcagcagcagcttgaggctgaggctcagaagcactgtgaggcgctcaggagagagaaggagcgagaattagaactgcagcgtcagcgtgacttgcataagatcaagcagcttcagcagacagtgagagacctggagtcgaaggacgaggtgcctggcagccgcctccacctaggttctgcccgcagggctgccggctcggatgcggaccacctccgggaacagcagcgagagctggaggcgatgaggcagcggctgctctctgccgcccggcttctcaccagcttcaccagccaggccgtggacaggacagttaatgattggacgtcatccaatgagaaagcagtgatgtctttactgcacacgttggaggagctggagtctgacttgagcaggcccacctcctcccagaaaaaaatggcagcagagctgcagttccagtttgtggacgtcctgctgaaagacaatgtttccctcacaaaagcgctcagcacggtgacccaggagaagctggagctgagcagagccgtgtctaagcttgagaagttgctgaagcaccatctgcagaagggctgcagcccaagcaggtcggaaaggtctgcttggaagccagacgaaacggctccacagagttccctgaggcgcccagaccccggccggcttccaccagctgccagcgaggaagcacacaccagcaatgtcaagatggaaaaattgtacctgcattacttgagagcagagagctttagaaaagctctgatttatcaaaagaagtatcttttgctgttgattggtggattccaggattctgaacaagaaacactctccatgattgcccatttgggggtatttccttccaaagcagaacggaaaatcacatctcgtcctttcaccaggttccgcacggccgtcagggtggtcattgcaatattaagattacgttttttggttaagaaatggcaagaagtagatcggaaaggagctctggcacaaggcaaagcccctcgcccagggccccgagcacgacagccgcagtctccacccagaaccagagagtcccccccaacccgggatgtaccctctggccacaccagggaccctgccagaggccgcagactggcagcagcagcctccccacacagtgggggaagagccactccatccccaaattcaagattagaaagatccctgactgcttctcaagatccagaacattccttgacagagtatattcaccatttagaagtgatccagcaaagattgggaggggtactaccagattctacttcaaagaaatcctgccacccgatgattaaacagtgaataaaatgtcatggctctttcctgcgacaattctatttgaggaaaagatttgtttttcccttttcccaaggaagctcgtgggacagcatgggcactactcttcatgtgcggtgacaccagcccccagatgccttgaattaagtgtcctcacctttatgcatgactgcaaagccagctggagcattttctatggagcctccgtatgttttaggcccatgaccttcgtgaggtgacgggcactcactcccatgagccctggctgtgtgctgttgtgtgcctatcggcagatccatccttcctgcctccaaggaggatacacagagaatggcttcctgttgttttgtttattttcttaacgtgtacagatggaaacttcatttaaaaataaaaacaaaacaactcaaaaagg

SEQ ID NO: 124027 - DNA, 8280 bp, Homo sapiens
ggtgaatttggaagtgaaaagaaaactgctttgcatgaaaaagaggagacacttcggcttcagagtgcacaggcacagccttttcaccaagaggagaaagagtctttgtctctgcagcttcaaaagaagaatcaccaagtccagcagctgaaagaccaggttttatccttaagtcacgagatagaagagtgccgctccgagttggaggtgctgcagcagaggcgggagcgggagaaccgggaaggcgcaaacctcctctccatgctcaaggccgacgtcaacctgtcccacagcgaaagaggggccctccaggacgccctgcgcaggctgctgggtttgtttggagagacgctgagggcagccgtcaccctgaggagccggatcggggagcgcgtggggctctgcctggatgacgcgggcgcaggcctggccctgtcgacagctccggcgctggaggagacatggtctgatgtggccctcccggagttggacagaactttgtctgaatgtgcagagatgtcttccgtggctgaaattagcagccacatgcgtgaaagctttctcatgagcccagaaagtgtgcgggagtgtgagcagcccatccggagggtcttccagagcctcagcctggccgtggacggcctcatggagatggccctggactccagcaggcagctggaagaagcacgccaaattcattctcgttttgaaaaagaatttagttttaagaatgaggagacagcacaggttgtcaggaagcaccaggagctgctggagtgtttgaaggaggagagcgcagcaaaggcagagctggcgctggagctgcacaagactcagggtacccttgagggattcaaggtggagacagcagatctgaaggaggtgctggccgggaaggaggattccgagcaccgtctggtgctggagctggagagcctgagacggcagctgcagcaggcggcccaggagcaggcggcgctgagggaggagtgcacccgtctgtggagtcggggggaggccacagccacggacgccgaggccagagaagctggatttttcagggtgttttcaggaacgtctctgacgtcctgcatcgctctcagcatctttgccctggcggtgctgttgcatctgggcgtccgttgtcgctgtttctccgatgctttctctgcttgtcctctgctgtccgggggcagcctcatgtgtcttcgcgcccagccagccggcgctgggccacaccccgccgggggagaccacctggtgtttcatcacctcgagcccttggacttcagccagtcacttcgtttgtcaggcctccgggcagataaaggggtgtgtggcctgcattctgttgaacggcccgctctccggaaggaagtggaggatctgaccaaagaacagtcggagaccaggaagcaggctgagaaggaccgctcagccctgctctcccagatgaagattttggagtctgagttagaagaacagctgtctcagcatcgcgggtgtgccaagcaggcggaggccgtcactgccctggaacagcaggtggcatctctggacaagcatttgcgcaaccagcggcaattcatggatgtaagaattctgaataatacatttttttgcatcactaaaagttgccgttacagcatgaacttctttccagatcgttacgagcaggcagccgagcgggagcacgagcgcgaggagttccagcaggagattcagaggctggaggggcagctccgccaggcggccaagccgcagccctggggccctcgcgacagccaggttgagttgttacaacaaaagttgagagaaaagttggatgaatttaatgaattggctatacagaaagagtcggcagatagacaagtgttaatgcaggaagaagaaattaaacgtctggaggagatgaacatcaacatcaggaaaaaagtggcccagctccaggaagaagtggaaaaacagaaaaacatcgtgaaagggctggaacagggaggaccgctgagcatcacctgcacttggagcggagttgtccccctggccggccactgcacacatttcagtgacagctgctccagggcggcttcaccccttctgccttcactcagcgaacgtttactgagcttagtagatgccagggataaagaggtgttaaagaaacagcagatgagtagcttgcttctggcgtccacgttgcagtctacactagatgcaggcagatgtcccgagcctccttcgggcagccctcctgagggtccagaaatacagttagaggtgacacagagagcactcctgcggcgcgagagcgaggttttggacttaaaagaacagctagaaaagatgaaaggtgacttagaaagtaaaaatgaagaaatactacatctgaacttaaaattggacatgcagaacagccagactgctgtcagcctcagagaacttgaggaagagaacacgagcttgaaggtcatatataccagaagttctgagattgaagagctgaaagccactattgaaaatctgcaagagaatcagaaacgattacaaaaggagaaagcagaggaaattgaacaactccatgaagtcattgagaagctgcagcacgagctgtccctcatggggcctgtggtgcacgaagtcagcgacagtcaggctggcagtctgcagagcgagctgctctgctcccaggccgggggccctcgtgggcaggccctacagggcgagctcgaggctgcgctggaagccaaggaggccctgagccggctgctggctgaccaggagcgcaggcacagccaggccctggaggccctgcagcagcgcctccagggcgcagaggaggctgcggagctacagctggctgagctggagcgcaatgtagccctcagggaggctgaggtcgaagacatggcctcccggatccaggagttcgaagcggccctgaaagcaaaggaagcgacgattgccgagagaaatttagaaatcgacgctctgaaccagcggaaggcggcccactctgccgagctggaggccgtcctgttggccttggcccgcatccgccgcgccctggagcagcagcccctggcagccggggcggcgcctcccgagctgcagtggctccgagcgcagtgtgcccgcctcagccgccagctgcaggtgctgcaccagcggttcctgaggtgccaggtggagctggacaggcggcaggcccgcagagccacagctcacacacgggtgcccggggcccacccacagcctcgcatggatggtggcgccaaggcccaggtcaccggcgacgtggaggcctcccatgatgctgctttggagccggttgtccctgacccacagggtgatctgcagcctgtcctggtgacgttgaaggatgcacctctctgcaagcaagaaggcgtgatgtcagtgctcaccgtctgccagaggcagctgcagtcggagctgctcttggtgaaaaatgaaatgcgcctgagtctggaggacggcggcaagggtaaagaaaaagtactggaagattgtcagctgccgaaggtcgatctcgtagctcaggtgaaacagcttcaggaaaaactgaaccgtttgctgtattccatgaccttccagaatgtggatgctgccgacaccaaatctctgtggcccatggcctcagcacacctgttggagagcagctggagtgatgattcctgtgacggagaagagcctgacatatcaccccacatagacacatgtgatgccaatacagccacggggggtgtaactgatgttatcaaaaatcaggccatagacgcgtgtgatgccaatacaaccccagggggtgtaactgatgttatcaaaaattgggattccttgataccagatgaaatgccagattctcccattcaagaaaaatcagaatgtcaggacatgtctctttcttcaccgaccagcgtacttggtggctcccgccaccagagccacactgcagaggctgggccccggaagagcccggtcgggatgctggacctgtcttcctggagctcccctgaggtcctcaggaaggactggaccctggagccctggcccagcctccccgtgacaccccactcaggagccctgagcctgtgcagtgccgacacatccctgggggacagggcggacacctcgctgccacagacccaggggccggggctgctttgttccccaggcgtgtctgcagcagcgctggcactgcagtgggccgagtctccgccggctgacgaccaccatgtgcagaggacggctgtggagaaagatgtcgaagattttatcacaacatcctttgattctcaagaaacattaagttcacctcctcctggattagaaggaaaagctgatagaagtgagaaaagtgacggctcgggttttggagcaagactgagcccggggtcaggaggccctgaggctcaaactgctggtcctgtgacccctgcttccatctctggaaggtttcagccgctgccggaagccatgaaggagaaggaagtgcgtccgaagcacgtgaagtttagcagatcattttatggcaaaaccattgacaaaaacttggctaaacaagctttactgcagatggtgcgtgacgagagccaccagatcctggcgctgtcagaaggccttgcacccccaagcggcgagccacacccaccccggaaggaagacgagatacaggacatctcgctccatgggggaaagacgcagcaggccctggttgtgtgcgagcggcagcctggctggcattcaggaggctcattggtgctgcacgctgcccctggggaccagcgggaagtgcccaccgcgtgccccgattggagaggggaccttctgcaggttgtgcaagaggcctttgaaaaagagcaggagatgcagggggttgagctgcagccccgactcagtggctcagatctggggggtcacagctccctgctcgaaaggctggagaagatcatccgtgagcagggagacctgcaggaaaagtccctggagcatcttcgcttgccggaccggagcagcctgctgtccgagatccaggcgctgcgtgcccagctgcgcatgacgcacctgcagaaccaggagaagctgcagcacttgcgcacggcgctgacaagcgcagaggcgcgcgggagccagcaggagcaccagctgcgcaggcaggttttggattccgtcaaggggaacggccttgcagttcagcccacggcccttgtcccggcgcccatgccctttgtgctctctggggctgggggccggcgctgtgcacatgctcttgaactgctggcttataaagtagagcaggagaagtgcattgctggtgacttgcagaagacgctgagtgaagagcaagagaaggcaaacagcgtgcagaagctcctggcggcggagcagactgtagtgcgagatttgaagtccgacctctgtgagagcaggcagaagagcgaacagctgtcccggtccctctgcgaggtgcagcaggaggtcctccagctgagatccatgctgagcagtaaggagaacgagctgaaggccgcgcttcaggagctggagagtgagcaggggaaggggcgtgccctgcagagccagctggaggaggagcagctgcggcacctgcagagggagagccagagtgccaaggccctggaggagctgcgggcgtctttggagacacagcgtgctcagagcagtcgactctgcgtggcactgaaacacgagcagacggccaaggacaacctgcagaaggagctgcgtatcgagcactcacgctgcgaggccttgctggctcaggagcggagccagctctctgagctccagaaggaccttgcggctgagaagagccgcaccctggagctgtcagaggccttgcggcacgagcggctcctgaccgagcagctgagccagaggacacaggaggcttgcgtgcaccaggacacacaggcccatcacgctctgctgcagaagctgaaggaggagaagtcccgggtggtggacttgcaagcgatgcttgaaaaggtgcagcagcaagccctgcattctcagcagcagcttgaggctgaggctcagaagcactgtgaggcgctcaggagagagaaggaggtaagtgccacactgaagtcgacggtggaagccctgcacacccaaaaacgagagctgagatgctctctggagagagagagggagaaaccagcgtggttgcaggcagaattagagcagtcacacccacggttgaaagagcaagaaggacgcaaggctgcgaggaggagcgcggaggccaggcagagcccagcggctgcggagcagtggaggaagtggcagagagacaaggagaagctgcgagaattagaactgcagcgtcagcgtgacttgcataagatcaagcagcttcagcagacagtgagagacctggagtcgaaggacgatggtgcctggcagccgcctccacctaggttctgcccgcagggctgccggctcggatgcggaccacctccgggaacagcagcgagagctggaggcgatgaggcagcggctgctcttctgccgcccggcttgctcaccagcttcaccagccaggccgtggacaggacagttaatgattggacgtcatccaatgagaaagcagtgatgtctttactgcacacgtttggaggagcttgaagtctgactttgagcaggcccacctcctcccagaaaaaaatggcagcagagctgcagttccagtttgtggacgtcctgctgaaagacaatgtttccctcacaaaagcgctcagcacggtgacccaggagaagctggagctgagcagagccgtgtctaagcttgagaagttgctgaagcaccatctgcagaagggctgcagcccaagcaggtcggaaaggtctgcttggaagccagacgaaacggctccacagagttccctgaggcgcccagaccccggccggcttccaccagctgccagcgaggaagcacacaccagcaatgtcaagatggaaaaattgtacctgcattacttgagagcagagagctttagaaaagctctgatttatcaaaagaagtatcttttgctgttgattggtggattccaggattctgaacaagaaacactctccatgattgcccatttgggggtatttccttccaaagcagaacggaaaatcacatctcgtcctttcaccaggttccgcacggccgtcagggtggtcattgcaatattaagattacgttttttggttaagaaatggcaagaagtagatcggaaaggagctctggcacaaggcaaagcccctcgcccaggtgggactccagctgctgttgaccgctggactcacaaacctttctttctactcttgtttttcattcactttgggtcatttttcagtgttgatggggacgtaataaagcacgtctacatctgtggtttcacgggacgctccctaggaccagttgacagaagacgaaaaaatacaggtttgttctaccaacggatccatacggcccttaaccagttacccaggccctctagcattgcccatggctccatgtatattctcaccttgggctacttcttccacaaaaaagtggacgaccaggagctctgcctgaaattctgcctattgagaggatatgcccttatcaccatttttcaagaatggtttctccagaagcagacgctgcgactgagtttggggtacgaggatgttgacatggtatcaacacccgtgaaaggaaggggaaggaagcaggactgggcggaggaagaagggtatgcgcctcgggccgcaactaagcagcctgcccgcctcaagcccgccaccctcaagcaggcccagcgcagagcctgtcgggagcggcgctctcccgcctctcccaatgggagcccggagcggcatcgacgcgtcttcggggccaatggaagcgaggctctggtgttgctgggcggggccgggagggctgcgcgggcccgagacccactgcgcacgcgcgctcgctacccgcccttcccgccgcgcacgcgctcccgtggccggccgggcgctcaggagcgcgcggggcagcggcggcgcggcggagccatccgcgctcgtgcccgcgcggcctctgcccggacgctagccggcctggccatggctgaccgcgggtgcccgctggaggcggcgccgctgcctgccgaggtgcgggagagcctggctgagctggagctggagctgtcggaaggttggaagaagaagcttaacagtgacaaagatgctgtcttcaacagaaactggtaa

SEQ ID NO: 124028 - DNA, 396 bp, Homo sapiens
atgaatcaggaggatctagatccggatagtactacagatgtgggagatgttacaaatactgaagaagaacttattagagaatgtgaagaaatgtggaaagatatggaagaacattaccaaggcgaggaaatcaggatacgtgaaccagtatgtcgatcaaagtggaaggcggacacaatcggcgtaagctctctctcaggcgtcccggcccggggccgctccgagccaagtctcatgggagaaagttcatcatctgaaagtacagtacaattcatgggacgtacaatcaattatgcaggcgtacacaaaacaggcgttaaaggagcatcaattgacagccatgaacatattacgccccgctgtgaatatccagtggctcataacaagcaacattaa

SEQ ID NO: 124029 - DNA, 153 bp, Homo sapiens
agaaatgtggaaagatatggaagaatgtcagaataaattatcacttattggaactgaaacactcaccgattcaaatgctcagctatcattgttaattatgcaagtaaaatgtttaaccgctgaactcagtcaatggcagaaaaaaacacctga

SEQ ID NO: 124030 - DNA, 790 bp, Homo sapiens
catatcgtggcaagcgcttcctgcgcagcgcctaggcgacctggagtttgtgacgctgtgatggtctagaggctggagattcaagatctgggtgccatcattttctggttctgttgatgaccctcttccaggttacatacagcttacatcttgcatcctcaagcgtttttcttataaggctaaaaattcacaaagcatatatcaatgaatcaggaggatctagatccggatagtactacagatgtgggagatgttacaaatactgaagaagaacttattagagaatgtgaagaaatgtggaaagatatggaagaatgtcagaataaattatcacttattggaactgaaacactcaccgattcaaatgctcagctatcattgttaattatgcaagtaaaatgtttaaccgctgaactcagtcaatggcagaaaaaaacacctgaaacaattcccttgactgaagacgttctcataacattaggaaaagaagagttccaaaagctgaggacaagatcttgaaatggtactgtccactaaggagtcaaagaatgaaaagttaaaggaagacttagaaagggaacaacggtggttggatgaacagcaacagataatggaatctcttaatgtactacacagtgaattgaaaaataaggttgaaacattttctgaatcaagaatctttaatgaactgaaaactaaaatgcttaatataaaagaatataaggagaaactcttgagtaccttgggcgagtttctagaagaccattttcctctgcctgatagaagtgtt

SEQ ID NO: 124031 - DNA, 332 bp, Homo sapiens
caaaagcatcagtcagcatcagatgggaaatttagaaaactcgtctttcacccaggtcagtggagaagctccgctcctacatcttggccacaaagtcagatatttatggaggcaggtagcaaagatgagtgcaggggccacggctggaaagtgtgaaactggcacgcacagcccgggccagagagcccaaagggaccagcccacactgttgctgtaggtagatgccgtctgtgcgcttcctgaccttctatgttttaaagatatttttttaatgtgaaataacctaacttacaaacactggctccaatatttaaaaaaatattttatataag

SEQ ID NO: 124032 - DNA, 400 bp, Homo sapiens
ccagccagtcagtttgtgggctagagttgtcccacaaaaatcaggcatgttcccctcccctctgggcccctacagctgggactgatcatagcctcagattagaagaaatactgacttctaactctataagccagcactcctgggtaaggagtgaagctctgttggccatgccgctttagactgctgggcagagctgagcctacagttttgtactggggtgcacggatgacacgctgggaagatggaaaggcagcttgaggatttatagcagctaaagggtaaatgctgttatgcaaaaggtccccatatgaacttcctacaggtgtagccgcagccaagtgtctgtacagctgctgagaatttgtcggtgataaaaaaattactctttcccacgcgtccg

SEQ ID NO: 124033 - DNA, 2853 bp, Homo sapiens
atgcagcccagaggtttggagctttgtcttggaagctccttccatcaatcagaataccaaatttacattgttaggttccctggaggtgttggagctctggattcagcaattattgtgaataagaaccttgcagctagggctatgggaggattatatgatgtcatggatgcgaaaatcctttataaaatagacagtgtacacaggagacacaaggatgatcagagtgatggtttcttaagtgattacagggccacacacaggctgttttctaaccctgttgtcacccccagggcccacaggtctcatctgagtgaggggaatctggagataacagcccgccgtcagtggaaacatatttatgatgaattaggcggtaatcctgggagcaccagcgctgccacttgtacccgcagacattatgaaaggtcagtggagaaggtccgctcctacatcttggccacaaactcagatatttatggaggcagattaatcctaccatatgaaagatttattaaaggagaagaagataagcccctgcctccaatcaaacctcggaaacaggagaacagttcacaggaaaatgagaacaaaacaaaagtatctggaaccaaacgcatcaaacatgaaatacctaaaagcaagaaagaaaaagaaaatgccccaaagccccaggatgcagcagaggtttcatcagagcaagaaaaagaacaagagactttaataagccagaaaagcatccctgagcctctcccagcagcagacatgaagaaaaaaatagaagggtatcaggaattttcagcgaagcccctggcatccagagtagacccagagaaggacaacgaaacagaccaaggttccaacagtgagaaggtggcagaggaggcgggagagaaggggcccacacctccactcccaagtgctcctctggccccagaaaaagattcagccttggtccctggggccagcaaacagccactcacctctcctagtgccctggtggactcaaaacaagaatccaaactgtgctgttttacagagagccctgaaagtgaaccccaagaagcatccttccccagcttccccaccacacagccaccgctggcaaaccagaatgagacggaggatgacaaactgcccgccatggcagattacattgccaactgcaccgtgaaggtggaccagctgggcagtgacgacatccacaatgcgctcaagcagaccccaaaggtccttgtggtccagtcgtttgacatgttcaaagacaaagacctgactgggcccatgaacgagaaccatggacttaattacacgcccctgctctactctaggggcaacccaggcatcatgtccccactggccaagaaaaagcttttgtcccaagtgagtggggccagcctctccagcagctacccttatggctccccaccccctttgatcagcaaaaagaaactgattgctagggatgacttgtgttccagtttgtcccagacccaccatggccaaagcactgaccatatggcggtcagccggccatcagtgattcagcacgtccagagtttcagaagcaagccctcggaagagagaaagaccatcaatgacatctttaagcatgagaaactgagtcgatcagatccccaccgctgcagcttctccaagcatcaccttaacccccttgctgactcctacgtcctgaagcaagaaattcaggagggcaaggataaactcttagagaaaagggccctcccccattcccacatgcctagcttcctggctgacttctactcgtcccctcatctccatagcctctacagacacaccgagcaccatcttcataatgaacagacatccaaatacccttccagggacatgtacagggaatcggaaaacagttcttttccttcccacagacaccaagaaaagctccatgtaaattatctcacgtccctgcacctgcaagacaaaaagtcggcggcagcagaagcccctacggatgatcagcctacagatctgagccttcccaagaacccgcacaaacctaccggcaaggtcctgggcctggctcattccaccacagggccccaggagagcaaaggcatctcccagttccaggtcttaggcagccagagtcgagactgtcaccccaaagcctgtcgggtatcacccatgaccatgtcaggccctaaaaaataccctgaatcgctttcaagatcaggaaaacctcaccatgtgagactggagaatttcaggaagatggaaggcatggtccacccaatcctgcaccggaaaatgagcccgcagaacattggggcggcgcggccgatcaagcgcagcctggaggatttggaccttgtgattgcagggaaaaaggcccgggcagtgtctcccttagacccatccaaggaggtctctgggaaggagaaggcctctgagcaggagagtgaaggcagcaaagcagcgcacgtacttgaaaaaccagactgtgctttctccactcatgcagcccctggctttccactcgcttgtgatgcaaagaggaatttttacatcaccgacaaattctcagcagctgtacagacacttggctgcggctacacctctgtcatccgtgcaccccagtacaaaactgtaggctcagctctgcccagcagtccaaagcggcatggcccaccaagcttcactccttacccaggaggtgctgggcttatagagttagaagtcagtttttcttctaatctgagggttggtacaaaagtaattgcggtttttgctattgaaagtaatggaaaaaaccgcgattacttttgcactaacctaacacttcgcgttcctgacacctggcatttaggccgctag

SEQ ID NO: 124034 - DNA, 1132 bp, Homo sapiens
tcggtgctagtcactgctgtgtgtttacatgagtaatggagctgccgggggaggggagttgtaagcagagcgctgagcctcgcagctcgcattcggagggaagctgacatccacaccaagtcgagacttccagggatgtggccggggagcagtcacatgctgtagctttcatgagcacaggcatcagtcaggcagatgtttgtcgactggaatggttttcagcgccaaatcttaaaggcagaccacgcaaaaagaaaccatgcccacaaagaagagattcattcagtggtgttaaggattccaacaacaattccgatggcaaagccgttgccaaggtgaaatgtgaggccaggtcagccttgaccaagccgaagaataaccataactgtaaaaaagtctcaaatgaagaaaaaccaaaggttgccattggtgaagagtgcagggcagatgaacaagccttcttggtggcactttataaatactatgaaagaaaggaaaacgcggatagaacgaataccctatttaggttttaaccagattaacctttggactatgtttcaagctgctcaaaaactgggaggatatgaaacaataacagcccgccgtcagtggaaacatatttatgatgaattaggcggtaatcctgggagcaccagcgctgccacttgtacccgcagacattatgaaagattaatcctaccatatgaaagatttattaaaggagaagaagataagtcccctgcctccaatcaaacctcggaaacaggagaacagttcacaggaaaatgagaacaaaacaaaagtatttggaaccaaacgcatcaaacatgaaatacctaaaagcaagaaagaaaaagaaaatgccccaaagccccaggatgcagcagaggtttcatcagagcaagaaaaagaacaagagactttaataagccagaaaagcatccctgagcctctcccagcagcagacatgaagaaaaaaatagaagggtatcaggaattttcagcgaagcccctggcatccagagtagacccagagaaggacaacgaaacagaccaaggttccaacagtgagaaggtggcagaggaggcgggagagaaggggcccacacctccactcccaagtgctcctctt

SEQ ID NO: 124035 - DNA, 3543 bp, Homo sapiens
ataacagcccgccgtcagtggaaacatatttatgatgaattaggcggtaatcctgggagcaccagcgctgccacttgtacccgcagacattatgaaagaaattcatttttatggttgtttacaaaagcatcagtcagcatcagatgggaaatttataaaactcgtcttttacccaggtcagtggagaaggtccgctcctacatcttggccacaaactcagatatttatggaggcagattaatcctaccatatgaaagatttattaaaggagaagaagataagcccctgcctccaatcaaacctcggaaacaggagaacagttcacaggaaaatgagaacaaaacaaaagtatctggaaccaaacgcatcaaacatgaaatacctaaaagcaagaaagaaaaagaaaatgccccaaagccccaggatgcagcagaggtttcctcagagcaagaaaaagaccaagagtctttaataagccagaaaagcatccctgagcctctcccagcagcagacatgaagaaaaaaatagaagggtatcaggaattttcagcgaagcccctggcatccagagtagacccagagaagggcaacgaaacagaccaaggttccaacactgcagaagctggcagaggaggcgggagagaaggggcccacacctccactcccaagtgctcctctggccccagaaaaagattcagccttggtccctggggccagcaaacagccactcacctctcctagtgccctggtggactcaaaacaagaatccaaactgtgctgttttacagagagccctgaaagtgaaccccaagaagcatccttccccaggcttccccaccacacaggccaccgctggcaaaccagaatgagacggaggatgacaaactgcccgccatggcagattacattgccaactgcaccgtgaaggtggaccagctgggcagtgacgacatccacaatgcgctcaagcagaccccaaaggtccttgtggtccagtcgtttgacatgttcaaagacaaagacctgactgggcccatgaacgagaaccatggacttaattacacgcccctgctctactctaggggcaacccaggcatcatgtccccactggccaagaaaaagcttttgtcccaagtgagtggggccagcctctccagcagctacccttatggctccccaccccctttgatcagcaaaaagaaactgattgctagggatgacttgtgttccagtttgtcccagacccaccatggccaaagcactgaccatatggcggtcagccggccatcagtgattcagcacgtccagagtttcagaagcaagccctcggaagagagaaagaccatcaatgacatctttaagcatgagaaactgagtcgatcagatccccaccgctgcagcttctccaagcatcaccttaacccccttgctgactcctacgtcctgaagcaagaaattcaggagggcaaggataaactcttagagaaaagggccctcccccattcccacatgcctagcttcctggctgacttctactcgtcccctcatctccatagcctctacagacacaccgagcaccatcttcataatgaacagacatccaaatacccttccagggacatgtacagggaatcggaaaacagttcttttccttcccacagacaccaagaaaagctccatgtaaattatctcacgtccctgcacctgcaagacaaaaagtcggcggcagcagaagcccctacggatgatcagcctacagatctgagccttcccaagaacccgcacaaacctaccggcaaggtcctgggcctggctcattccaccacagggccccaggagagcaaaggcatctcccagttccaggtcttaggcagccagagtcgagactgtcaccccaaagcctgtcgggtatcacccatgaccatgtcaggccctaaaaaataccctgaatcgctttcaagatcaggaaaacctcaccatgtgagactggagaatttcaggaagatggaaggcatggtccacccaatcctgcaccggaaaatgagcccgcagaacattggggcggcgcggccgatcaagcgcagcctggaggatttggaccttgtgattgcagggaaaaaggcccgggcagtgtctcccttagacccatccaaggaggtctctgggaaggagaaggcctctgagcaggagagtgaaggcagcaaagcagcgcacggtgggcattccgggggcggatcagaaggccacaagcttcccctctcctcccctatcttcccaggtctgtattccgggagcctgtgtaactcgggcctcaactccaggctcccggctgggtattctcattctctgcagtacttgaaaaaccagactgtgctttctccactcatgcagcccctggctttccactcgcttgtgatgcaaagaggaatttttacatcaccgacaaattctcagcagctgtacagacacttggctgcggctacacctgtaggaagttcatatggggaccttttgcataacagcatttaccctttagctgctataaatcctcaagctgcctttccatcttcccagctgtcatccgtgcaccccagtacaaaactatgcccaggcacctccagatcattcacttcgcacgtgggccttgtgaagggatttgtgaatatccaggaagaacttagaggaccccatctgagttcggatggggaggaccaggaaaaaacgaacgtgatagttctcagctaccccccagtctgccggtaccgctcgatgctgaaacgcatccaggataagccatcttccattctaacggaccagtttgcattggccctggggggcattgcagtggtcagcaggaaccctcagatcctgtactgtcgggacacctttgaccacccgactctcatagaaaacggagagtatatgcgattgagtttgcgccaaatcttaaaggcagaccacggcaaaaaggaaccatgcccacaaagaagagattcattcagtggtgttaaggattccaacaacaattccgatggcaaagccgttgccaaggtgaaatgtgaggccaggtcagccttgaccaagccgaagaataaccataactgtaaaaaagtctcaaatgaagaaaaaccaaaggttgccattggtgaagagtgcagggcagatgaacaagccttcttggtggcactttataaatacatgaaagaaaggaaaacgccgatagaacgaataccctatttaggttttaaacagaaaatggagaaaattgccggagtgattttagaagccacacgtgctgaagatggcatagcctttgtcagcataggcctctgctatggtttggatttatatcacctcccaaatctcatgtcgaatcgtaatccccagtgttggaggaggaggctggtgggagatgattggatcatggtgatagattttcccctggctgttcttgtgatagcgaaaagagagaatgaatcacggctggtggtggtgtgcgcgtttgagagtgttgtcgcagcattgtcaggagtgatcgtgtga

SEQ ID NO: 124036 - DNA, 446 bp, Homo sapiens
  misc_feature (1)...(446): n = a,t,c or g
ccaaggtggccttcctgaagtggatctgccggtggcccaccttcggntccgccttcttcgaggtgaagcaaacctcggagccttcctacccggacgtcatcctcatcgccatcaaccgacatggggttctgctcatccaccccaagaccaaggacctgctcaccacctatcccttcaccaagatctccagctggagcagcggcagcacctacttccacatggcgctggggagcctgggccgtggcagccgcctgctgtgcgagacctccctgggctataagatggatgacctgctgacctcatatgtgcagcagctcctgagtgccatgaacaagcagcggggctccaaggccccagccctggccagcacctagcagcggatgctggcgtgtntgctcaggcgcccttnccgacctctagcctggcggcaccttcccagggcctct

SEQ ID NO: 124037 - DNA, 2338 bp, Homo sapiens
atgggcggtggctcctgggcacccacaggcctgtgcccccttcagagcttgcttgccatgtcaccagagaagaggaagctggcggctcaggaggggcagttcacagagccacgtcctgaggagccacccaaggaaaagctgcacaccctggaggagttctcctatgagttcttcagggctccagagaaggacatggtgagcatggccgtgctgcccctggcccgtgcccgtggccacctgtgggcctattcctgcgagccgctgcgacagccgctgctcaagcgagtccacgccaacgtcgacctctgggacatcgcctgccagatctttgtcgatatccttccccaccagcctgcctgcacctcggccgtggtcggtgtcagcgtctatccccagtctgtgtcagcgtggagctgccccagcactgtgctccttgacagccacacccatcctccggtacatgggcgactacccttctcggcaggcctggcccaccctggagctcaccgaccagatcttcacactggccctgcagcacccggccctccaggacgaggtctactgccagatcctgaagcatctgacgcacaactccgacaggcacagcgaagagcggggctggcaactgctgtggctgtgcacgggcctcttcccgcccagcaaggggctgctgccccatgcccagaagtttatagacactcggagggggaagctgctggcccccgactgcagccgccgaatccagaaggtcctgaggacggggccccggaagcagcccccgcaccacgtggaggtggaggccgcagagcagaacgtctcccgcatctgccacaagatctacttccccaatgacaccagtgagatgctggaggtggttgccaacacacgggtgcgggatgtgtgtgacagcattgccaccaggctgcagctggcctcctgggagggctgcagcctcttcatcaagatttcagacaaggtcatcagccagaaggagggagacttcttctttgattccttgagggaggtgtctgactgggtgaagaagaacaagccccagaaagaaggtgaggaggcctctgtggagctgggggagggcgtggctgggtgggtcgagggggcactggcggcctctgtgcggcccatgcccattcatccatccattcgttcccgtgtgtccctgggttgtgggaacaaccaggccctggggcccggcggggcccccgtgacgctcccctaccaggtgtacttcatgcggaaattgtggctcaacatatctccagggaaggatgtgaatgcagacaccatactccattaccaccaggagctgcccaagtacctgcgcggattccacaagtgttcgcgggaggatgccatccacctggcgggcctcatctacaaggcccagttcaacaacgaccggtcccagctggctagtgtccccaagatcctgagggaactggtgcctgagaacctcacacgcctgatgtcctcggaggagtggaaaaagagcatccttctagcctatgacaagcataaggacaagacagtggaggaggccaaggtggccttcctgaagtggatctgccggtggcccacccttcggatccgccttcttcgaggtgaaggtaaaccttgccccacgccagggcctcctacccaagcagcgtccgctcagcccagccccagcaggcccagcgtcaaccagcacacatcttggcaaacctcggagccttcctacccggacgtcatcctcatcgccatcaaccgacatggggttctgctcatccaccccagagaccaaggacctgctcaccacctatcccttcaccaagatctccagctggagcagcggcagcacctacttccacatggcgctggggagcctgggccgtggcagccgcctgctgagcgagacgctccctgggctataagatggatgacctgctgacctcatatgtgcagcagctcctgagtgccatgaacaagcagcggggctccaaggccccagccctggccagcacctagcagcggatgctgacgtgactgctccagcgcctgtcccgacctcctcacgtggcggcaccttcccaggccctctcaacccagggcctgtcctgtggcggcagccttccatgctgccccccatacaaagcccactcaggcccgcaggcggccccctctgttctgggcgctgcccagggaggccaaaagacgggcccagaatggggtcgggagtctcggacccccaggctattggtggatgactgactgacaggacacctcccaaccccaccccaccccaccagaatgttcaataaaaactcctggagcaggaaaa

SEQ ID NO: 124038 - DNA, 2505 bp, Homo sapiens
atggcggccagaataccagaaagatggggacttaaaggggacagaaaaattaaatctataaggaacaagcgggatggagtaaataaatctataaggagcaagtggggggaccaggccgacctggctgccgcctgtcgtggcgactgggactccagtgggctgccgcttggagtgcgcgacccccggcgaagcaggacaatagcttggaattcggcctcgtgtttccgcgtcaccagcagagccggtgcggggcgggcagagcggccgtgccgccgccaacgaactgagagccgcgtggggcccagcagcacgccggccagggaagggggcctagcgatcggtccgagggcgacgggccgccagcggccgcagggcgacgaagacgcggaggaggcggagcccggagaggggtgggggccggggataggtttcgaaggagatcgtctacaacaagctgctgccctacgcggagcggctagacgccgagtccgacttgcagctggcccagatcaaatgcaacctgggccgggccgtgcagctccaagagctgtggcccgggggcctcttctggaccaggaaactctccacagggctggacccttagctctgtcctcgctggagctgtccccgagcggtgatcccagggtcgtgacagagcctgtgaagtactcaagccgtcctccctgccactttcctacgggacttcccgggtctttaccatccctctacgtcctccgcatctgcttctcccgaagtgttcgggttgttgtcttcccacctggggggccctgggtagcccaagggccccggccccgagggagagagacatggggtttcaccatgttgctcagatatattcgactttatgggagaaaatttagcaaagaagatcatgttctttttattaagttattgtatgagctggtatcaattccaaaactggaaatcagcatgatgcagggatttgcccgccttttgatcaacttgttaaaatattttccagcagatgccaccgctgagatgctagaagaatggcgacctttaatgtgcccttttgatgtaaccatgcaaaaggccatcacttattttgaaatatttcttcctacctcccttcctccagaacttcatcataaaggttttaaactttggtttgatgaattaattggcctttgggtttcagtgcaaaatctcccacaatgggaggggcaactagtaaatctctttgctcgattggctacagataatatagggtacatagattgggatccatatgtaccaaagggtggaccaagtaagctagtgcaaaaacacttagctggtttgtttaacagcatcacatctttttaccatccttcaaataatgggcgctggctgaacaagttaatgaaactacttcagcggttgccaaacagtgttgttagaagattgcatcgtgaaagatacaagaagccctcttggttaactcctgtgcctgatagccacaagcttactgatcaagatgttacagactttgtacaatgcattattcagcctgtcctcttggctatgtttagcaaaaccggtagtctagaagcagcccaggctttgcagaatcttgcactcatgagacctgaattggtaataccccctgtacttgaaagaacatatcctgcattagagacattaacagaacctcaccagctcacagctactttaagttgtgtaattggagtagcccgcagtttggtatcaggaggcagatggtttcctgaaggtcctacacatatgctacctctgttgatgagagcattgcctggggtggatccaaatgactttagtaaatgcatgatcacattccagttcatagcaacattttctactctggtgcctttagtagattgttcatctgtactacaagaaagaaatgacctcacagaagtggaacgagaactttgttcagccacagctgaatttgaggatttcgtcttacagtttatggacagatgttttggacttatagaaagtagcacattggagcaaacaagagaagagacagaaactgagaaaatgacacacttggagagtttggtcgaattaggtctgtcttctacgtttagtacaatcctcacccaatgttccaaagaaatatttatggtggcccttcagaaggtttttaatttttctacttcacatatatttgaaacaagagtagcaggtcgcatggtggcagacatgtgccgcgctgctgtaaaggactggggcaaacccggggacttgtggaatctgggaatccagtggcatgttccttcttcagaagaagtgtcttttgccttttatcttttggactcctttcttcagcctgagctcgtcaaactccagcattgtggggatggaaaacttgaaatgtctagagatgatattctacagagtctgactatagtgcacaactgtttaattggctctggaaacctcctacctccgttgaaaggagagccagttactaacttaatgtatctctttgattaa

SEQ ID NO: 124039 - DNA, 5396 bp, Homo sapiens
cgccgagtccgacttgcagctggcccagatcaaatgcaacctgggccgggccgtgcagctccaagagctgtggcccgggggcctcttctggaccaggaaactctccacatatattcgactttatgggagaaaatttagcaaagaagatcatgttctttttattaagttattgtatgagctggtatcaattccaaaactggaaatcagcatgatgcagggatttgcccgccttttgatcaacttgttaaagaaaaaggaacttctttcaagagctgatttggagttaccctggagaccactttatgacatggtagaaagaatattatattccaagacagagcacctaggattaaattggtttcctaattctgtagaaaatattctcaaaacactcgtgaaaagctgccgaccatattttccagcagatgccaccgctgagatgctagaagaatggcgacctttaatgtgcccttttgatgtaaccatgcaaaaggccatcacttattttgaaatatttcttcctacctcccttcctccagaacttcatcataaaggttttaaactttggtttgatgaattaattggcctttgggtttcagtgcaaaatctcccacaatgggaggggcaactagtaaatctctttgctcgattggctacagataatatagggtacatagattgggatccatatgtaccaaagatatttacaagaattctgagaagcttgaacctcccagtgggaagcagtcaagtgttagtcccaagatttttaacaaatgcttatgatataggacatgctgtaatatggatcaccgccatgatgggtggaccaagtaagctagtgcaaaaacacttagctggtttgtttaacagcatcacatctttttaccatccttcaaataatgggcgctggctgaacaagttaatgaaactacttcagcggttgccaaacagtgttgttagaagattgcatcgtgaaagatacaagaagccctcttggttaactcctgtgcctgatagccacaagcttactgatcaagatgttacagactttgtacaatgcattattcagcctgtcctcttggctatgtttagcaaaaccggtagtctagaagcagcccaggctttgcagaatcttgcactcatgagacctgaattggtaataccccctgtacttgaaagaacatatcctgcattagagacattaacagaacctcaccagctcacagctactttaagttgtgtaattggagtagcccgcagtttggtatcaggaggcagatggtttcctgaaggtcctacacatatgctacctctgttgatgagagcattgcctggggtggatccaaatgactttagtaaatgcatgatcacattccagttcatagcaacattttctactctggtgcctttagtagattgttcatctgtactacaagaaagaaatgacctcacagaagtggaacgagaactttgttcagccacagctgaatttgaggatttcgtcttacagtttatggacagatgttttggacttatagaaagtagcacattggagcaaacaagagaagagacagaaactgagaaaatgacacacttggagagtttggtcgaattaggtctgtcttctacgtttagtacaatcctcacccaatgttccaaagaaatatttatggtggcccttcagaaggtttttaatttttctacttcacatatatttgaaacaagagtagcaggtcgcatggtggcagacatgtgccgcgctgctgtaaagtgctgcccagaagaatctttgaagctctttgttccccactgctgcagtgttataactcagcttacaatgaatgatgatgtattaaatgatgaagagctagacaaggaattactatggaatcttcaacttttgtctgagattactcgagtggatggaaggaagttgcttctttatagggagcagcttgtaaagattctccaaagaaccctacatttaacctgtaagcagggttacactctgtcttgtaaccttttgcatcatcttctccgttctaccacacttatctaccctacagaatactgcagtgtgccaggtggctttgacaagcctccttctgaatactttcctatcaaggactggggcaaacccggggacttgtggaatctgggaatccagtggcatgttccttcttcagaagaagtgtcttttgccttttatcttttggactcctttcttcagcctgagctcgtcaaactccagcattgtggggatggaaaacttgaaatgtctagagatgatattctacagagtcgtgactatagtgcacaactgtttaattggctctggaaacctcctacctccgttgaaaggagagccagttactaacttagtaccaagtatggtgtccttggaagagacaaagttgtatactggacttgaatatgatctgtctcgagagaaccaccgagaagtaattgctacagttataaggaaacttcttaaccacatacttgataattcagaagatgatactaagtcattgtttcttattataaagattattggagaccttttacaattccaaggatctcacaagcatgaatttgactcccgatggaaaagcttcaacttagtaaagaaatcaatggaaaatcggctccatgggaaaaaacaacatatcagagcactgttgattgatagagtaatgttacagcatgagctacggacactaactgttgagggttgtgaatacaaaaagatacatcaagatatgatcagagatcttcttcgtttatctacaagttcatacagtcaggtgagaaataaggctcagcaaacattttttgctgccttgggagcatataacttctgttgcagagatatcattcccttggttttggagttcttaaggcctgatagacaaggtgttacacagcaacaattcaagggtgccttgtactgtctccttggaaatcacagtggtgtgtgcttggcaaaccttcatgattgggactgtattgtacagacgtggccagcgattgtttcttcagggcttagccaagcaatgtccctggaaaagccatcaatagtgagattgtttgatgatcttgcagaaaagattcataggcagtatgaaacaattggcttggacttcacaattccaaagtcatgtgttgaaatagcggaattacttcaacagtcaaaaaacccctctatcaaccagatattgcttagcccagaaaaaattaaggaaggaattaaacgccaacaagaaaagaatgccgatgccctaaggaactatgaaaatttggtagacaccttgctagatggtgtggagcaaagaaacctgccctggaaatttgaacatataggcattgggcttctgtctctactgctgagagatgaccgagtgttgcctcttcgtgccatacggttttttgttgagaatctcaaccatgatgcaattgtagttcgaaagatggctatctcagctgttgctggtatccttaaacagctaaaaagaacccacaaaaagctgaccattaacccctgtgaaatcagtggatgccctaaacccacccaaattattgctggtgataggcctgataatcattggttgcattatgacagcaaaactataccaagaactaaaaaagaatgggagtcaagttgctttgtggaaaaaactcactggggatactacacctggccaaagaatatggttgtttatgctggtgtggaagagcagcctaagcttggcagaagcagggaggatatgacagaggcagaacagattatatttgatcatttttctgatcctaaatttgttgagcagttaattacttttctatcattagaagacagaaaaggaaaagataagtttaatccacgacgtttttgtctctttaagggtatattcaggaattttgatgatgccttcctgccagttctgaagccccatttagaacatttggttgcagattcacatgaaagcacccagcgatgtgttgcagaaattatagctggtttaatcagaggttctaagcactggacatttgaaaaggtggagaagctttgggagcttctgtgccctctgcttagaacagcactgtccaatattaccgtagaaacttataatgactggggagcttgtatagcaacatcctgtgaaagcagagatccccggaaacttcactggctttttgaactgctgttggaatcaccattgagtggtgaaggaggatcctttgtagatgcatgtcgactttatgtactacaaggtggccttgcccagcaagaatggagagtgcctgaactattgcacagactactgaagtacttggaacccaaactcacccaggtttacaaaaatgtcagagaaagaataggaagtgtgctgacctacatattcatgatagatgtatctttgccaaataccacaccaaccatatcgcctcatgtccctgagtttactgctcgaattctggagaaattgaaacctctcatggatgtggatgaagaaattcagaaccatgttatggaagaaaatggaattggtgaagaagatgagcgaactcagggcattaaactcttgaaaaccatattgaaatggctgatggcaagtgcaggaagatccttttctacagcagttacagaacaacttcagcttctacctttgtttttcaagattgccccagtggaaaatgacaatagctacgatgaactgaaaagagatgcaaagttatgtttatcattaatgtctcaggggttgctttaccctcatcaagtgcctttggtacttcaggtgctaaaacaaacagcaagaagcagttcttggcatgcacgatacacagtactgacctacctccagaccatggtattttataacctctttattttcctaaacaatgaagatgcagttaaagatatcaggtggctggttataagtcttttggaggacgaacaactggaggttcgagaaatggctgctactaccttaagcggtctgctacagtgtaactttcttaccatggacagtcctatgcagattcattttgagcaactttgcaaaacaaaactacctaagaaaagaaagcgagaccctggttctgtaggagataccattccttctgcagagttggtcaaacgccatgctggggtgctaggacttggtgcatgtgttctttctagtccttacgatgttcccacctggatgccccagctcctcatgaatctcagtgcacatctaaatgatcctcagcctattgagatgactgtaaaaaaaaccttatccaatttccgaaggactcaccatgacaactggcaggaacataaacagcaattcactgatgaccaactgcttgttctcaccgatcttcttgtgtcaccatgctattatgca

SEQ ID NO: 124040 - DNA, 477 bp, Homo sapiens
gtccgcgaattcccgggtcgacgatttcgtggctgctgtggtgccctacgccccaggtacaaaaggctggttgacaacatcttccctgaggatcccgaggtacgtgtgcattgctatggaggctttggaccagctgctcatggcctgccactgccagagcatcaacctcttcgtggagagcttcctcaagatggtggccaagctgctggagtcagagaaatccaacctgcagatcctcggcaccaactcgtttgtgaagtttgccaacatcgaggaggacaccccgtcctatcaccggagctatgacttctttgtgtcccgattcagtgaaatgtgccactcgagccatgatgacttagaaatcaagaccaaaattcgaatgtcaggcatcaaaagcctgcaaggggtggtgaggaagacggtgaatgatgaactgcaggccaatatctgggacccacagcacatggataagatcgt

SEQ ID NO: 124041 - DNA, 5334 bp, Homo sapiens
gctggcggcgcccggctccgtcctgcccgcggccggcccccgcgtctgctccctccccgcccgggcccctgtcggccgccgccagtccccgccccgactgtgaatgaaaggcgggcgccgccgagggctggctgggaacgccgcagcgacgccggcctctcgagaggcgcgcgccccgccgagatgtacggtgtgtgtggctgctgtggtgccctacgccccaggtacaaaaggctggttgacaacatcttccctgaggatcccgaggatggtctggtgaagaccaacatggagaagctgaccttctatgccctctcagctccagaaaaacttgatcgtattggcgcctacctctctgagaggctcatccgtgacgtgggtcgccatcgatatgggtacgtgtgcattgctatggaggctttggaccagctgctcatggcctgccactgccagagcatcaacctcttcgtggagagcttcctcaagatggtggccaagctgctggagtcagagaaacccaacctgcagatcctcggcaccaactcgtttgtgaagtttgccaacatcgaggaggacaccccgtcctatcaccggagctatgacttctttgtgtcccgattcagtgaaatgtgccactcgagccatgatgacttagaaatcaagaccaaaattcgaatgtcaggcatcaaaggcctgcaaggggtggtgaggaagacggtgaatgatgaactgcaggccaatatctgggacccacagcacatggataagatcgttccatcactgcttttcaatctacagcatgtagaggaggcagagagccggtctccctcacccctccaagcacctgagaaggagaaagagagccccgcggagctggctgagaggtgtcttcgggagctgctgggccgggctgcctttggcaacatcaaaaacgccatcaagcctgttctcatccatctggataaccattctctttgggaacccaaggtgtttgccatccgttgctttaaaatcatcatgtactcaattcagccgcagcactcacacctggtcatccagcagctcctgggccacctggacgccaacagccgcagcgctgcgacggtgcgcgcgggcatcgtggaagtcttgtcggaagccgcggtcatcgctgccaccggctctgtggggcccacagtactggagatgttcaaccacgctgctgaggcagctgcggctcagcatcgactacgcgctgaccgggagctacgacggggcggtcagcctcggcaccaagatcatcaaggagcacgaggagcgcatgttccaggaggccgtcatcaagaccgtgggctcctttgccagcacgctgcccacctaccagcgctccgaggtgatcctcttcatcatgagcaaggtcccgcggccatccctgcaccaggcggtggacacaggcaggacgggggagaataggaaccgtctgacccagattatgctgctaaaatccctcctgcaggtatccacaggtttccagtgcaacaacatgatgtcagccctgcctagcaacttcctggaccgccttctctccaccgccctcatggaggatgcagaaattcgactctttgttctagagattctcatcagtttcattgatcgtcatggcaaccgccacaagttctctaccatcagtaccctcagtgacatctctgtcctgaagctgaaagtggacaagtgctctcgacaggacaccgtcttcatgaagaagcactcccagcagctctacagacacatctacctgagctgcaaggaggaaacaaacgtgcagaaacactacgaggcgctctatggcttgctggccctcatcagcatcgagctggctaacgaggaggtggtggtggacctcatccgtctggtgctggctgttcaggacgtggcccaagtcaatgaggagaacttgcctgtctacaaccgctgtgccctctatgctctgggcgcagcctacctgaacctcatcagtcagctcacaacagtgcctgccttctgccagcacatccatgaggtgatagagaccaggaagaaagaggctccatacatgctccccgaggatgtgtttgtggagaggcccaggctgtctcagaatcttgatggggtggtcattgagctcctcttccgccagagcaagatcagtgaagtcctgggaggcagtggctacaactcggaccggctctgcctgccctacattcctcagctgacagatgaggatcgtttatccaagaggaggagcattggagagaccatctccctgcaggtggaggtagaatcgaggaacagtccggagaaggaggaggtgagtgtccgtgccaccgtcctggggcagccccacctcctgtagattggacgctggactccaggctcccctgcctgcatagtgagcttaaggctgcatggaaagcaagcttctcgagtaattccacacttgtactgactctccccacgtatgcgtcatagatacttcccttcggaaaaattgttagggtcctccctgctcccatgaggatatcataaaactcactcttgaaaggcctggctggggatggtggctcacacctgtgatcccaacattttggaggctgaggcaggaggactgcttgagcccaggagtttgagatgatctggggcaatataaggagaccccatctctacaaaaaataattgaaaaatcagccaggcatggtgacgtgcacctgtggtcccaggtactcaggatgctgaggtgggagaatcacctgagcctgggaggtcaaggctgctgtaagccatgatggcagcacggcacttcagcctaggtgacagagtgagacctcgtctcaaaaaaattaaaaagaaaggcatgctggtcatcattccccactcacagggggaccgatatgctctgggttggaaactagaagacttaactggagagataagggtgagaacagctttcatagtgttgcttccgtatgtatcaataaagaatctttttttaaatttacactatttttaaagcaattttagttacagcaaaattgagaggaaggtacagagatcgccctttgccccctcccctcccctgacacatgcacagcctcccctcctatccatatcccccagcagagtggtgcatttcttacagttcaacctgccttaacacaacagtatcatctgaagtctgtcgtttacactggggttcgccctcagcgttgtacattctgtgggtttggacaaatgcgtaatgacatgcatcccccaccagagtaccatacagagtcatttcctgccctaaaaccccctgtgctccacctcttcatctctcccctaaccactgacagccaagatgttttttttttttttttttaatgctgactgttacagttcacaagaagtatggaggacacacatctgggtgggaccgggacagaaagatttacatggtcctcaggcatggacaggctggcattccccagcctctctgcccattagggctgatatagacatggaggacagctttgacatcaagcctttccccagatgcaatcagaggtaggagaagtctctaggggtcaggatcaagcctccccctaactgtgccctcgaccacttcatttattggggcagatctctaccccagggccctcaaagcttatccagaaccttcccacggaaggaagctctgacttgggctaattggacaagtaaaatgaggttgaacgaggcatcctccatggcccttccagctccaaggactgggaacctccaatgcgttaggcatcggggtgagttggctgctctctccccatagtggcgattctcccttcccaagaggtaagagaccctcgggaattgaggagtgaagtgactcagaagcgcaaggcgaaatgcttacacagctacagagccacctcctcactagtggcctcctgggccaccagtatcagttccttcctcccttcaagagtcagcttagcccagaggtagcttggtggcaaagcaggggtgcaggggccttcatcctgtgcccttctgccatgccacaactctctccactctcagccatcagtgccagtccagagtcccacggtggttcctagggccgtactgcccagccttgccgcaggggtgaataaatgcttgtttggtcaaatctgaatcctggtgcctggcattcccagccatgcatagtctgggctctgccatttcatttttccccacctgctctggcccgtatccactgtcccactctggtggggctgctctcgatctctcccacgctgcgctccgccatctccaggcctttgctagtgcagaatgccacatctgaaccacccttccctccacactggtgcagctgagcgcctgtgaactgtctgttctccagcgcccggcccctgttcagtttcctcataaacttctctctccctgctcttgcccagggagcatcccttctctcttgcccagagagcggcattttctttgactgttgccaccacacagttccctagcaccctgcaggtgaatatccaatgttgctcggtgctgacagtggatgaatggatggacgtacagaggataagtcctcagagcgagttaaagccgagcatagctctctcttgcatgtaattcctatgctagcaaattgtgcagtttctatagactcacctacagtcctgcatgtagttggtgctcacttaatgtttgttaaatgactttatctcatacatatacttctgtcctctcctactcaaacaaaaatgccaaacaaatcaaaaaatgcacgactcagtgaattttcataaagtgtgtatgcccacgcaaccacgcctggatgagagagtggaacactgtcatcatccaggggccctgcctctgtgccccctcccctaagggagctcccagcctgagttgcgttacttctggaactttatatcaatgaaatcattctgttctgtgtctgctgcttttgcttaagattatgtttaaatgatagagcatgaggctgggcgtggtggctcatgcctgtaatctcagcactttgggaggccgaggcaggtggatcacctgaggttaggagttcaagaccagcctgatcaacatggtgaaaccccgtctttactaaaactacaaaaaattagccgggcatggtggtgggcacctgtaatctcagctactcgggaggctgaggcaggagaatcacttgaacccaggaggcaaaggttgcagtgagccaagatcacgccactgcactccagcctggatgacagaatgagactctgtctcaaaaaaaaaaaaaaaaaactcgagggggggcccggtacc

SEQ ID NO: 124042 - DNA, 662 bp, Homo sapiens
attcccgggtcgacgatttcgtggagcccggccgctgctcgcgggctgagtgtctgtcgctgctgccgcctccacccagcctccgccatggacctcttcggggacctgccggagcccgagcgctcgccgcgcccggctgccgggaaagaagctcagaaaggacccctgctctttgatgacctccctccggccagcagtactgactcaggtacagtcttcaggctctcccaggatcagggggacctttgctttttgatgatctcccacccgctagcagtggcgattcaggttctcttgccacatcaatatcccagatggtaaagactgaagggaaaggagcaaagagaaaaacctccgaggaagagaagaatggcagtgaagagcttgtggaaaagaaagtttgtaaagcctcttcggtgatctttggtctgaagggctatgtggctgagcggaagggtgagagggaggagatgcaggatgcccacgtcatcctgaacgacatcaccgaggagtgtaggcccccatcgtccctcattactcgggtttcatattttgctgtttttgatggacatggaggaattcgagcctcaaaatttgctgcacagaatttgcatcaaaacttaatcagaaaatttcctaaaggagatgtaatcagtgtagag

SEQ ID NO: 124043 - DNA, 1433 bp, Homo sapiens
  misc_feature (1)...(1433): n = a,t,c or g
ggaaagaagctcagaaaggacccctgctctttgatgacctccctccggccagcagtactgactcagctgtagctgcattaggtactactccaagcccagtaacactgtggttcttgcagactcgtagaggatctaagatctggaggaattccctggattaccagagcaaagtcggggctgagccctggtgccatgaacggcagcagaaggcagacagattcctgggcaaaagaggacgggtccctgcctcttcggtgatctttggtctgatagggctatgtggctgagcggaagggtgagagggaggagatgcaggatgcccacgtcatcctgaacgacatcaccgaggagtgtaggcccccatcgtccctcattactcgggtttcatattttgctgtttttgatggacatggaggaattcgagcctcaaaatttgctgcacagaatttgcatcaaaacttagtcagaaaatttcctaaaggagatgtaatcagttgtagagaaaaccgtgaagagatgccttttggacactttcaagcatactgatgaagagttccttaaacaagcttccagccagaagcctgcctggaaagatgggtccactgccacgtgtgttctggctgtagacaacattctttatattgccaacctcggagatagtcgggcaatcttgtgtcgttataatgaggagagtcaaaaacatgcagccttaagcctcagcaaagagcataatccaactcagtatgaagagcggatgaggatacagaaggctggaggaaacgtcagggatgggcgtgttttgggcgtgctagaggtgtcacgctccattggggacgggcagtacaagcgctgcagntgtcacctctgtgccccgacatcaagacgctgcccagctgacccccaaatgacaggttcatttcgtttggccctgtgatgggctctttcaaggtctttaccccagaagaagccgtgaacttcatcttggtcctgtctcgaggatgaaaagatccagacccgggaagggaagtccgcagccgacgtccgcttacgaagcagccctgcaancaggctggccaacaaggcggttgcagccggggctcggccggacaacgtcactgtgattggtggtgcgggatagggcactgaggggtggcgcgcggccaggagcacgcatgggtatttgacttaaaaaggttcattttgtgtgtgtgcacattgtgtgttttgtgtactccctgtgggacgtcccatggttgtaaataaaggtttctctttttaaaaaaaaaaaaaaaaaaaaaaaaaggggggcccgttttaaagaacccttggggggcccaaattttacccgggcttgcaacgtaaaactttttccccttatggggggccgttttaaaacctaggccttggcccgggttttaaaaaggtcgggagtg

SEQ ID NO: 124044 - DNA, 419 bp, Homo sapiens
  misc_feature (1)...(419): n = a,t,c or g
tatcgtccaacctgctgaggaggaagaggatcaagaaacacctttcagaaacctaagggccagagcacatcgaaatttgaaaacagaggaggaacaacaggaggaggaggaggaggaattagcactggccaaaggaatcactgaagaatgtctgaaacagccatctttggaacagaaggaaggcagaagagcttctcatacccttctcccaagccacagattgaaacagtcagctgattcatcctctagccggncctcctcatcttcctcctccagttctagatcaagatctcgctctcctgacagttcaggttctcggtctcattcaccgctcagatccaagcagagagatgtagcccaggcacgtactcatgccaaccctcgtggtagacccaagatgggctccagatcaacatcag

SEQ ID NO: 124045 - DNA, 1842 bp, Homo sapiens
atgtctccggctgatcgctgccgctccgccaatacaatagagccagccactaccagcagcctggccctcttcctccttctccagagagaccaatccagccgaactcggggtttgcctgaggagaaggaggaagtgaccatggacacaagtgaaaacagacctgaaaatgatgttccagaacctcccatgcctattgcagaccaagtcagcaatgatgaccgcccggagggcagtgttgaagatgaggagaagaaagagagctcgctgcccaaatcattcaagaggaagatctccgttgtctcagctaccaagggggtgccagctggaaacagtgacacagaggggggccagcctggtcggaaacgacgctggggagccagcacagccaccacacagaagaaaccttccatcagtatcaccactgaatcactaaagagcctcatccccgacatcaaacccctggcggggcaggaggctgttgtggatcttcatgctgatgactctcgcatctctgaggatgagacagagcgtaatggcgatgatgggacccatgacaaggggctgaaaatatgccggacagtcactcaggtagtacctgcagagggccaggagaatgggcagagggaagaagaggaagaagagaaggaacctgaagcagaacctcctgtacctccccaggtgtcagtagaggtggccttgcccccacctgcagagcatgaagtaaagaaagtgactttaggagataccttaactcgacgttccattagccagcagaagtccggagtttccattaccattgatgacccagtccgaactgcccaggtgccctccccaccccggggcaagattagcaacattgtccatatctccaatttggtccgtcctttcactttaggccagctaaaggagttgttggggcgcacaggaaccttggtggaagaggccttctggattgacaagatcaaatctcattgctttgtaacgtactcaacagtagaggaagctgttgccacccgcacagctctgcacggggtcaaatggccccagtccaatcccaaattcctttgtgctgactatgccgagcaagatgagctggattatcaccgaggcctcttggtggaccgtccctctgaaactaagacagaggagcagggaataccacggcccctgcaccccccacccccacccccggtccagccaccacagcacccccgggcagagcagcgggagcaggaacgggcagtgcgggaacagtgggcagaacgggaacgggaaatggagcggcgggagcggactcgatcagagcgtgaatgggatcgggacaaagttcgagaagggccccgttcccgatcaaggtcccgtgaccgccgccgcaaggaacgtgcgaagtctaaagaaaagaagagtgagaagaaagagaaagcccaggaggaaccacctgccaagctgctggatgaccttttccgaaagaccaaggcagctccctgcatctattggctcccactgactgacagccagatcgttcagaaagaggcagagcgggccgaacgggccaaggagcgggagaagcggcgaaaggagcaagaagaagaagagcaaaaggagcgggagaaggaagccgagcgggaacggaaccgacagctggagcgagagaaacgtcgggagcacagtcgggagagggacagggagagagagagagaaagggagcgggacaggggggaccgagatcgggatagggaaagggaccgagaacgaggcagggaaagggatcgcagggacaccaagcgccacagcagaagccggagtcggagcacacctgtgcgggaccggggtgggcgccgc

SEQ ID NO: 124046 - DNA, 3540 bp, Homo sapiens
gcaatgatgaccgcccggagggcagtgttgaagatgaggagaagaaagagtacctcatgtacggtaatccgcccgtaaaatataaccctgcccaactggccaatcgctgatgccgcctcttcctctggacccacccgctgctactgagctgcccaatcagagccaagtctgctatccaggtgtcttggccagaggggggcatgtatatgggctcctgtgatgggcccccttttgcctccctgtcttgcttacatcagggggccaagaagaacactgttctggagagacttgtattgagcaagcaaaaaacatttggaaaggggtggacttgcatcatctccctacttgggacaccccaagaagagcttgtgccagtgctggggcgcctgcccacatgcccttgcccttttgaggactgtgggttgccttgtttgctacagactgttgggatccccatctagggcaccaagacctcctaaagtttgtgatcgcagtgccatgctgtaaaacactgagtgggaccctctacttaagctgtgacgactaggaaccgtgcagaggagtctagggtctgagcccctggggatttaatgctgatgacagcccagcccatgtgtcaccacttgctcatcagatggactttcctttggtccctgttgtccatggtgaagggcagcatgttggttgctccaacttctcctccatccctggaggcagggactcatttcatccacctgactggaaccactgtctcagctggagtccctgaggagatgccagccacaactctccgaagagaagtattctgaccttgctgctgaatgtctgccaggtcctggggtattcacctacccccaggctaccttcatcagaggctccatgatcccactcggtgagaggaccccctccccagttacaggcagaggagaaagggactctggagtcatcacctggattccaagtattgggtggtgttattgctgcagcttgccactggtggacatagggtcctgcctgcctctcacgataaaaggcaaggatcattcctgctactcacaggccatctcatcagggactgcaagatgatgtcccttcagggccaggactgatgtctctgcccctttcccccctctatccctcgctgagcctggccaccgccagtgaactgtcttgacatcatggaaactgggcagcgtccccccacacgtttccctcccgccccccctgcgcccctgggaggactctggcagtgccgtgctgactaccacgccgtgcgcccaccttttttgccaacccaaccccccaccaattgcacagcgcctagcagggagggctcattctgattggaccggcggttgactagatacagtacacagtgaggtgcgattggctgaactgaagatcccagagctcgctgcccaaatcattcaagaggaagatctccgttgtctcagctaccaagggggtgccagctggaaacagtgacacagaggggggccagcctggtcggaaacgacgctggggagccagcacagccaccacacagaagaaaccttccatcagtatcaccactgaatcactaaaggaggctgttgtggatcttcatgctgatgactctcgcatctctgaggatgagacagagcgtaatggcgatgatgggacccatgacaaggggctgaaaatatgccggacagtcactcaggtagtacctgcagagggccaggagaatgggcagagggaagaagaggaagaagagaaggaacctgaagcagaacctcctgtacctccccaggtgtcagtagaggtggccttgcccccacctgcagagcatgaagtaaagaaagtgactttaggagataccttaactcgacgttccattagccagcagaagtccggagtttccattaccattgatgacccagtccgaactgcccaggtgccctccccaccccggggcaagattagcaacattgtccatatctccaatttggtccgtcctttcactttaggccagctaaaggagttgttggggcgcacaggaaccttggtggaagaggccttctggattgacaagatcaaatctcattgctttgtaacgtactcaacagtagaggaagctgttgccacccgcacagctctgcacggggtcaaatggccccagtccaatcccaaattcctttgtgctgactatgccgagcaagatgagctggattatcaccgaggcctcttggtggaccgtccctctgaaactaagacagaggagcagggaataccacggcccctgcaccccccacccccacccccggtccagccaccacagcacccccgggcagagcagcgggagcaggaacgggcagtgcgggaacagtgggcagaacgggaacgggaaatggagcggcgggagcggactcgatcagagcgtgaatgggatcgggacaaagttcgagaagggccccgttcccgatcaaggtcccgtgaccgccgccgcaaggaacgtgcgaagtctaaagaaaagaagagtgagaagaaagagaaagcccaggaggaaccacctgccaagctgctggatgaccttttccgaaagaccaaggcagctccctgcatctattggctcccactgactgacagccagatcgttcagaaagaggcagagcgggccgaacgggccaaggagcgggagaagcggcgaaaggagcaagaagaagaagagcaaaaggagcgggagaaggaagccgagcgggaacggaaccgacagctggagcgagagaaacgtcgggagcacagtcgggagagggacagggagagagagagagaaagggagcgggacaggggggaccgagatcgggatagggaaagggaccgagaacgaggcagggaaagggatcgcagggacaccaagcgccacagcagaagccggagtcggagcacacctgtgcgggaccggggtgggcgccgctagctgggaaaacactagagctgcaggtaccagccactcggccccagggggttatggccacagagggataggcacagtctccaccaccctggagccaagggtctttcacatcacctatccctacatacataccaaatggaaaagtggccatccttttccccccaaacacacccccttaacctatctcttgggacttagcccgaccctccctctcatttcccattaagtctgagaggcaagagctaggttaggcaaggaggtggttggccagagatggggaacagccaggtgccccagtcctctgatttttcctccatcctgcttaccacctccctgggtacttacagccttctcttgggaacagccggggccaggactgggtcacctatgagctgaatcagcatctcctcctgagtcccagggcccctgcagttcccagtctcttctgtcctgcagcccttgcctctttcccacaggttccactttatatccaccttttccttttgttcaatttttatttttattttttttattattaaatgatgtggtctatggaaaaaaaaataaaaatctgacttagtttt

SEQ ID NO: 124047 - DNA, 430 bp, Homo sapiens
ggaaacgtgtggggggacgctgcccagtttccatgatgtcaagacagttcactggcggtggccaggctcagcgagggatagaggggggaaaggggcagagacatcagtcctggccctgaagggacatcatcttgcagtccctgatgagatggcctgtgagtagcaggaatgatccttgccttttatcgtgagaggcaggcaggaccctatgtccaccagtggcaagctgcagcaataacaccacccaatacttggaatccaggtgatgactccagagtccctttctcctctgcctgtaactggggagggggtcctctcaccgagtgggatcatggagcctctgatgaaggtagcctgggggtaggtgaataccccaggacctggcagacattcagcagcaaggtcagaatacttctcttcggagagttgt

SEQ ID NO: 124048 - DNA, 511 bp, Homo sapiens
aagtacctcacgcaaatgacggagctggaggaggtgactctgaacgggaagcctcttcaggcgctgcgggtgaccgacctgaaggccgcactggagcagcgaggcctagccaagagcgggcagaagagtgccctggtcaagcggctcaaaggggtgaggagtcggcgttgctggggtgtcggaggagagcggacccggtagagacgagcctctgccgcggcgcaggcgcagtatccgggctcggcgcgagctcgctcaggccgccagcgcgagcctctggatccgcgcgcacggtggttgatgaggttcgcgctggaatggagatcgcgccggttcccgccttaacggcagcagcgcgagcccaaatgggagggtgtgcactactctccaggagtgtcttaagctccttcctccttcccccaccccctccttgtttgtatctgtggtttcggcgcatgcgctgcagaaggagttaaatcccactacaacctacggcgttgctggcctgagg

SEQ ID NO: 124049 - DNA, 4618 bp, Homo sapiens
atgtggagacggaaacatccgaggacatccggaggaacccggggagttctgagtggtaatcgaggggtagagtatggcagtgggcggggtcatctcggtacgttcgaagggcgttggcggaaattaccgaagatgcccgaagccgtcgggacggacccgagtacctcacgcaagatggcggagctggaggaggtgactctggacgggaagcctcttcaggcgctgcgggtgaccgacctgaaggccgcactggagcagcgaggcctagccaagagcgggcagaagagtgccctggtcaagcggctcaaaggggctctaatgctagaaaatttacagaaacactcaacaccccatgctgcattccagccaaattcccagattggtgaggaaatgagccagaacagtttcataaaacagtatctggaaaagcagcaggagctacttaggcagcgtctggaacgtgaagctcgagaagctgcagaacttgaagaagcttcagctgagtcggaggacgagatgatccatcctgagggagtggcttccctgctgcctcctgactttcagagcagcctggagagaccagagctggagctcagcagacattcgcccagaaaaagctcctcaatttctgaagagaaaggtgactctgatgatgagaaaccaaggaaaggagaaagacgatcatctagggtcagacaggcaagagcagctaaactgtctgagggcagccaacctgctgaggaggaagaggatcaagaaacaccttccagaaacctaagggtcagagcagatcgaaatttgaaaacagaggaggaagaagaggaggaggaggaggaggaagaagatgatgaagaagaggaaggtgatgatgagggacaaaaatctagggaggcaccaatcctgaaagagtttaaggaagaaggggaagagatacctagagtaaaaccagaggagatgatggatgagagacccaaaacaagatcccaggaacaggaggtgttagagagaggagggagatttacaagatcccaggaagaggctagaaaaagtcatctggccagacagcagcaggagaaggaaatgaaaacaacatctccccttgaggaggaagaaagagaaataaaatcttcacaaggcttaaaggaaaaatcgaagtctccttcccctcctcgactgactgaagatcgaaagaaggcctcacttgtagcgctgccagagcaaactgccagcgaggaggagactcctccacctttactaacaaaggaagcatcttctccaccacctcatccacagctccatagcgaagaagaaatagagcccatggaaggcccagccccccctgtcctcattcagttatctcctcctaatacagatgctgacaccagggagctattagtatctcagcatactgtccagttggtaggaggcctgtctcctttgtcaagtccttcagacaccaaagcagaatctccagcagagaaagtgccagaggagagtgtcctgcctctggttcagaaaagcacactggctgactactcagcccagaaggatcttgaacctgagtcagacagatctgctcagcccctccctctaaaaattgaggaattagcactggccaaaggaatcactgaagaatgtctgaaacagccatctttggaacagaaggaaggcagaagagcttctcatacccttctcccaagccacagattgaaacagtcagctgattcatcctctagccggtcctcctcatcttcctcctccagttctagatcaagatctcgctctcctgacagttcaggttctcggtctcattcaccgctcagatccaagcagagagatgtagcccaggcacgtactcatgccaaccctcgtggtagacccaagatgggctccagatcaacatcagagtccagatcaaggtcacgttcacgttctcgttcagcatcaagcaacagcagaaaatctctgagccctggagtctccagggacagcagcaccagctatactgaaaccaaagatccctcttctggtcaggaggttgcaactccaccagtgccacaactgcaggtctgtgagccaaaggagaggacttccacctcctcatcctctgtccaagcaaggcgtctgagtcagcctgaatcagctgaaaagcatgtgacccagaggttacagcctgagcgggggagcccaaagaagtgtgaagctgaagaggcagagccaccagctgccacacagccccaaacctcagagactcagacctctcatctgccagaatcagaaagaattcatcacactgttgaggagaaggaggaagtgaccatggacacaagtgaaaacagacctgaaaatgatgttccagaacctcccatgcctattgcagaccaagtcagcaatgatgaccgcccggagggcagtgttgaagatgaggagaagaaagagagctcgctgcccaaatcattcaagaggaagatctccgttgtctcagctaccaagggggtgccagctggaaacagtgacacagaggggggccagcctggtcggaaacgacgctggggagccagcacagccaccacacagaagaaaccttccatcagtatcaccactgaatcactaaagagcctcatccccgacatcaaacccctggcggggcaggaggctgttgtggatcttcatgctagatgactctcgcatctctggaggatggagacagagcgttaatggcgatagatggggacccatgacaaaggggcttgaaaatatgccggacagtcactcaggtagtacctgcagagggccaggagaatgggcagagggaagaagaggaagaagagaaggaacctgaagcagaacctcctgtacctccccaggtgtcagtagaggtggccttgcccccacctgcagagcatgaagtaaagaaagtgactttaggagataccttaactcgacgttccattagccagcagaagtccggagtttccattaccattgatgacccagtccgaactgcccaggtgccctccccaccccggggcaagattagcaacattgtccatatctccaatttggtccgtcctttcactttaggccagctaaaggagttgttggggcgcacaggaaccttggtggaagaggccttctggattgacaagatcaaatctcattgctttgtaacgtactcaacagtagaggaagctgttgccacccgcacagctctgcacggggtcaaatggccccagtccaatcccaaattcctttgtgctgactatgccgagcaagatgagctggattatcaccgaggcctcttggtggaccgtccctctgaaactaagacagaggagcagggaataccacgggcccctgcaccccccacccccacccccggtccagccaccacagcacccccgggcagagcagcgggagcaggaacgggcagtgcgggaacagtgggcagaacgggaacgggaaatggagcggcgggagcggactcgatcagagcgtgaatgggatcgggacaaagttcgagaagggccccgttcccgatcaaggtcccgtgaccgccgccgcaaggaacgtgcgaagtctaaagaaaagaagagtgagaagaaagagaaagcccaggaggaaccacctgccaagctgctggatgaccttttccgaaagaccaaggcagctccctgcatctattggctcccactgactgacagccagatcgttcagaaagaggcagagcgggccgaacgggccaaggagcgggagaagcggcgaaaggagcaagaagaagaagagcaaaaggagcgggagaaggaagccgagcgggaacggaaccgacagctggagcgagagaaacgtcgggagcacagtcgggagagggacagggagagagagagagaaagggagcgggacaggggggaccgagatcgggatagggaaagggaccgagaacgaggcagggaaagggatcgcagggacaccaagcgccacagcagaagccggagtcggagcacacctgtgcgggaccggggtgggcgccgctagctgggaaaacactagagcttgcaggtaccagccactcggccccagggggttatggccacagagggataggcacagtttccaccaccctggagcctagggtctttcacatcacctatccctacatacataccaaatggaaaagtggccattcttttccccccgaaaaacacccctttaacctatttctggggacttatccggaccttcctttttattgcccattaagtctgagaggcaagagctaggttaggcaaggaggtggttggccagagatggggaacagccaggtgccccagtcctctgatttttcctccatcctgcttaccacctccctgggtacttacagccttctcttgggaacagccggggccaggactgggtcacctatgagctgaatcagcatctcctcctgagtcccagggcccctgcagttcccagtctcttctgtcctgcagcccttgcctctttcccacaggttccactttatatccaccttttccttttgttcaatttttatttttattttttttattattaaatgatgtggtctatggaaaaaaaaataaaaatctgacttagtttt

SEQ ID NO: 124050 - DNA, 6307 bp, Homo sapiens
cggagctggaggaggtgactctggacgggaagcctcttcaggcgctgcgggtgactcgacctgaaggccgcactggagcagcgaggcctagccaagagcgggcagaagagtgccctggtcaagcggctcaaaggggctctaatgctagaaaatttacagaaacactcagcactcccatgctgcatttcagccaaattcccagattggtgaggaaatgagccagaacagtttcataaaacagtatctggaaaagcagcaggagctacttatgtagccgtctggaacgtgaagctcgagaagctgcagaacttgaaggaaaaagctcctcaatttctgaagagaaaggtgactctgatgatgataaaccaaggaaaggagaaagacgatcatctagggtcagacaggcgagagcagctaaactggctgagggcagccaacctgctgaggaggaagaggatcaagaaacaccttccagaaacctaagggtcagagcagatcgaaatttgaaaacagaggaggaagaagaggaggaggaggaggaggaagaagatgatgaagaagaggaaggtgatgatgagggacaaaaatctagggaggcaccaatcctgaaagagtttaaggaagaaggggaagagatacctagagtaaaaccagaggagatgatggatgagagacccaaaacaagatcccaggaacaggaggtgttagagagaggagggagatttacaagatcccaggaagaggctagaaaaagtcatctggccagacagcagcaggagaaggaaatgaaaacaacatctccccttgaggaggaagaaagagaaataaaatcttcacaaggcttaaaggaaaaatcgaagtctccttcccctcctcgactgactgaagatcgaaagaaggcctcacttgtagcgctgccagagcaaactgccagcgaggaggagactcctccacctttactaacaaaggaagcatcttctccaccacctcatccacagctccatagcgaagaagaaatagagcccatggaaggcccagcccccgctgtcctcattcagttatctcctcctaatacagatgctgacaccagggagctattagtatctcagcatactgtccagttggtaggaggcctgtctcctttgtcaagtccttcagacaccaaagcagaatctccagcagagaaagtgccagaggagagtgtcctgcctctggttcagaaaagcacactggctgactactcagcccagaaggatcttgaacctgagtcagacagatctgctcagcccctccctctaaaaattgaggaattagcactggccaaaggaatcactgaagaatgtctgaaacagccatctttggaacagaaggaaggcagaagagcttctcatacccttctcccaagccacagattgaaacagtcagctgattcatcctctagccggtcctcctcatcttcctcctccagttctagatcaagatctcgctctcctgacagttcaggttctcggtctcattcaccgctcagatccaagcagagagatgtagcccaggcacgtactcatgccaaccctcgtggtagacccaagatgggctccagatcaacatcagagtccagatcaaggtcacgttcacgttcacgttctcgttcagcatcaagcaacagcagaaaatctctgagccctggagtctccagggacagcagcaccagctatactgaaaccaaagatccctcttctggtcaggaggttgcaactccaccagtgccacaactgcaggtctgtgagccaaaggagaggacttccacctcctcatcctctgtccaagcaaggcgtctgagtcagcctgaatcagctgaaaagcatgtgacccagaggttacagcctgagcgggggagcccaaagaagtgtgaagctgaagaggcagagccaccagctgccacacagccccaaacctcagagactcagacctctcatctgccagaatcagaaagaattcatcacactgtctcccaccccccgcccagcacccccaacccccaaccattttctccatgctggtgtctccagatcctgaggatcagcaggcctttacttattaagcagttgattaaacacagtgaggagaaggaggaagtgaccatggacacaagtgaaaacagacctgaaaatgatgttccagaacctcccatgcctattgcagaccaagtcagcaatgatgaccgcccggagggcagtgttgaagatgaggagaagaaagagctggagtccctgaggagatgccagccacaactctccgaagagaagtattctgaccttgctgctgaatgtctgccaggtcctggggtattcacctacccccaggctaccttcatcagaggctccatgatcccactcgcagctaccaagggggtgccagctggaaacagtgacacagaggggggccagcctggtcggaaaccgacgctgggggacccagcacagcccaccacacagaagaaaccttccatcagtatcaccactgaatcactaaagagcctcatccccgacatcaaacccctggcggggcaggaggctgttgtggatcttcatgctgatgactctcgcatctctgaggatgagacagagcgtaatggcgatgatgggacccatgacaaggggctgaaaatatgccggacagtcactcaggtagtacctgcagagggccaggagaatgggcagagggaagaagaggaagaagagaaggaacctgaagcagaacctcctgtacctccccaggtgtcagtagaggtggccttgcccccacctgcagagcatgaagtaaaagaaagtgactttaggagataccttgaacttcgacgttccattagccagcagaagtccggagtttccattaccattgatgacccagtccgaactgcccaggtgcccttcccaccccggggcaagatttagcaacattgtccatatctccagatttggtccgtcctttcactttaggcgagctaaaggagttgttggggcgcacaggaaccttggtggaagaggccttctggattgacaagatcaaatctcattgctttgtaacgtactcaacagtagaggaagctgttgccacccgcacagctctgcacggggtcaaatggccccagtccaatcccaaattcctttgtgctgactatgccgagcaagatgagctggattatcaccgaggcctcttggtggaccgtccctctgaaactaaggacagaggagcagggaataccacggcccctgcaccccccacccccacccccggtccagccaccacagcacccccgggcagagcagcgggagcaggaacgggcagtgcgggaacagtgggcagaacgggaacgggaaatggagcggcgggagcggactcgatcagagcgtgaatgggatcgggacaaagttcgagaagggccccgttcccgatcaaggtcccgtgaccgccgccgcaaggaacgtgcgaagtctaaagaaaagaagagtgagaagaaagagaaagcccaggaggaaccacctgccaagctgctggatgactcttttccgaaagaccaaggcagctccctgcatctattggctcccactgactgacagccagatcgttcagaaagaggcagagcgggccgaacgggccaaggagcgggagaagcggcgaaaggagcaagaagaagaagagcaaaaggagcgggagaaggaagccgagcgggaacggaaccgacagctggagcgagagaaacgtcgggagcacagatgggagaagagacaggagagagagagagagaggggagcgggacaggggggaccgagatcgggatagggaaagggaccgagaacgaggcagggaaagggatcgcagggacaccaagcgccacagcagaagccggagtcggagcacacctgtgcgggaccgggacctgcagcggagcgcggcgcccgctccaatcggctcggggctgtgccccgggacccggcgacaagctcgactgtggcgcttcccccggcctgggcccctcgcagttccagggtcccgggaacacccagggcctgctctgctgcggactcgaaggagctgggtctggaaccagttctttgtcattgaggaatatgctggtccagagcctgttctcattggcaagctgcactcggatgttgaccggggagagggccgcaccaagtacctgttgaccggggagggggcaggcaccgtatttgtgattgatgaggccacaggcaatattcatgttaccaagagccttgaccgggaggaaaaggcgcaatatgtgctactggcccaagccgtggaccgagcctccaaccggcccctggagcccccatcagagttcatcatcaaagtgcaagacatcaacgacaatccacccatttttccccttgggccctaccatgccaccgtgcccgagatgtccaatgtcgggacatcagtgatccaggtgactgctcacgatgctgatgaccccagctatgggaacagtgccaagctggtgtacactgttctggatggactgcctttcttctctgtggacccccagactggagtggtgcgtacagccatccccaacatggaccgggagacacaggaggagttcttggtggtgatccaggccaaggacatgggcggccacatgggggggctgtcaggcagcactacggtgactgtcacgctcagcgatgtcaacgacaacccccccaagttcccacagagcctataccagttctccgtggtggagacagctggacctggcacactggtgggccggctccgggcccaggacccagacctgggggacaacgccctgatggcatacagcatcctggatggggaggggtctgaggccttcagcatcagcacagacttgcagggtcgagacgggctcctcactgtccgcaagcccctagactttgagagccagcgctcctactccttccgtgtcgaggccaccaacacgctcattgacccagcctatctgcggcgagggcccttcaaggatgtggcctctgtgcgtgtggcagtgcaagatgccccagagccacctgccttcacccaggctgcctaccacctgacagtgcctgagaacaaggccccggggaccctggtaggccagatctccgcggctgacctggactcccctgccagcccaatcagatactccatcctcccccactcagatccggagcgttgcttctctatccagcccgaggaaggcaccatccatacagcagcacccctggatcgcgaggctcgcgcctggcacaacctcactgtgctggctacagagctcgacagttctgcacaggcctcgcgcgtgcaagtggccatccagaccctggatgagaatgacaatgctccccagctggctgagccctacgatacttttgtgtgtgactctgcagctcctggccagctgattcaggtcatccgggccctggacagagatgaagttggcaacagtagccatgtctcctttcaaggtcctctgggccctgatgccaactttactgtccaggacaaccgagatggctccgccagcctgctgctgccctcccgccctgctccaccccgccatgccccctacttggttcccatagaactgtgggactgggggcagccggcgctgagcagcactgccacagtgactgttagtgtgtgccgctgccagcctgacggctctgtggcatcctgctggcctgaggctcacctctcagctgctgggctcagcaccggcgccctgcttgccatcatcacctgtgtgggtgccctgcttgccctggtggtgctcttcgtggccctgcggcggcagaagcaagaagcactgatggtactggaggaggaggacgtccgagagaacatcatcacctacgacgacgagggcggcggcgaggaggacaccgaggccttcgacatcacggccttgcagaacccggacggggcggcccccccggcgcccggccctcccgcgcgccgagacgtgttgccccgggcccgggtgtcgcgccagcccagaccccccggccccgccgacgtggcgcagctcctggcgctgcggctccgcgaggcggacgaggaccccggcgtacccccgtacgactcggtgcaggtgtacggctacgagggccgcggctcctcttgcggctccctcagctccctgggctccggcagcgaagccggcggcgcccccggccccgcggagccgctggacgactggggtccgctcttccgcaccctggccgagctgtatggggccaaggagcccccggccccctga

SEQ ID NO: 124051 - DNA, 407 bp, Homo sapiens
tttcgtcgcacttgcgtggtgatctggggtataccgttttagtcttgggggtagagtgactgcttgcgaaccagttcagcagtgcctcaggtgagtacatgagctgcttcgaggcccagggcttcaagtggaacctgtatgaggtggtgagggtgcccttgaaggcgacagatgtggctcgacttccataccagctgtccatctcctgtgccacctcccctggcttccagctgagctgctgcatccccagcacaaacctggcctacaccgcggcctggagccctggagagggcagcaaagctgctgcaggcaggccagggcagtcctgctgaggaggtgccacagatcctggcacagctgccagggcaggcggcagaggcaagttcacccttcgacttactgaccct

SEQ ID NO: 124052 - DNA, 236 bp, Homo sapiens
cttacatcttcaccattctcaacaccctccagggcgtcttcatcctattgtttggttgcctcatggacaggaagatacaagaagctttgcgcaaacgcttctgccgcgcccaagcccccagctccaccatctccctggtgagttgctgccttcagatcctcagctgtgcatccaagagcatgtcagaaggcattccatggccctcctcagaggacatgggcacagccagaagctga

SEQ ID NO: 124053 - DNA, 3214 bp, Homo sapiens
atggtctgttcggctgccccactgctgctcctggccacaactcttcccctgctggggtcaccagttgcccaagcatcccaacctctttggccgatggccaagggccagacaatgtgggcccagacctccaccctcaccctgacagaggaggagttgggacagagtcaggctggaggggaatctggatctgggcagctcctggaccaagagaatggagcaggggaatcagcgctggtctccgtctatgtacatctggactttccagataagacctggccccctgaactctccaggacactgactctccctgctgcctcagcttcctcttccccaaggcctcttctcactggcctcagactcacaacagagtgtaatgtcaaccacaaggggaatttctattgtgcttgcctctctggctaccagtggaacaccagcatctgcctccattaccctccttgtcaaagcctccacaaccatccagccttgtggctgccttgtcttcagccatcccgaacccgggtactgccagttgctgccacctgtccccgggatcctcaacctgaactcccagctgcagatgcctggtgacacgctgagcctgactctccatctgagccaggaggccaccaacctgagctggttcctgaggcacccagggagccccagtcccatcctcctgcagccagggacacaggtgtctgtgacttccagccacggccaggctgccctcagcgtctccaacatgtcccatcactgggcaggtgagtacatgagctgcttcgaggcccagggcttcaagtggaacctgtatgaggtggtgagggtgcccttgaaggcgacagatgtggctcgacttccataccagctgtccatctcctgtgccacctcccctggcttccagctgagctgctgcatccccagcacaaacctggcctacaccgcggcctggagccctggagagggcagcaaagcttcctccttcaacgagtcaggctctcagtgctttgtgctggctgttcagcgctgcccgatggctgacaccacgtacgcttgtgacctgcagagcctgggcctggctccactcagggtccccatctccatcaccatcatccaggatggagacatcacctgccctgaggacgcctcggtgctcacctggaatgtcaccaaggctggccacgtggcacaggccccatgtcctgagagcaagaggggcatagtgaggaggctctgtggggctgacggagtctgggggccggtccacagcagctgcacagatgcgaggctcctggccttgttcactagaaccaagctgctgcaggcaggccagggcagtcctgctgaggaggtgccacagatcctggcacagctgccagggcaggcggcagaggcaagttcaccctccgacttactgaccctgctgagcaccatgaaatacgtggccaaggtggtggcagaggccagaatacagcttgaccgcagagccctgaagaatctcctgattgccacagacaaggtcctagatatggacaccaggtctctgtggaccctggcccaagcccggaagccctgggcaggctcgactctcctgctggctgtggagaccctggcatgcagcctgtgcccacaggaccaccccttcgccttcagcttacccaatgtgctgctgcagagccagctgtttggacccacgtttcctgctgactacagcatctccttccctactcggcccccactgcaggctcagattcccaggcactcactggccccattggtccgtaatggaactgaaataagtattactagcctggtgctgcgaaaactggaccaccttctgccctcaaactatggacaagggctgggggattccctctatgccactcctggcctggtccttgtcatttccatcatggcaggtgaccgggccttcagccagggagaggtcatcatggactttgggaacacagatggttcccctcactgtgtcttctgggatcacagtctcttccagggcagggggggttggtccaaagaagggtgccaggcacaggtggccagtgccagccccactgctcagtgcctctgccagcacctcactgccttctccgtcctcatgtccccacacactgttccggaagaacccgctctggcgctgctgactcaagtgggcttgggagcttccatactggcgctgcttgtgtgcctgggtgtgtactggctggtgtggagagtcgtggtgcggaacaagatctcctatttccgccacgccgccctgctcaacatggtgttctgcttgctggccgcagacacttgcttcctgggcgccccattcctctctccagggccccgaagcccgctctgccttgtgccgccttcctctgtcatttcctctacctggccacctttttctggatgtggcgcaggccctggtgttggcccaccagctgctctttgtctttcaccagctggcaaagcaccgagttctccccctcatggtgctcctgggctacctgtgcccactggggttggcaggtgtcaccctggggctctacctacctcaagggcaatacctgagggagggggaatgctggttggatgggaagggaggggcgttatacaccttcgtgggccagtgctggccatcataggcgtgaatgggctggtactagccatggccatgctgaagttgctgagaccttcgctgtcagagggacccccagcagagaagcgccaagctctgctgggggtgatcaaagccctgctcattcttacacccatctttggcctcacctggggctggcctggccactctgttagaggaagtctccacggtccctcattacatcttcaccattctcaacaccctccagggcgtcttcatcctattgtttggttgcctcatggacaggaaggccggggccgtggctggcataagcagagcatttacctctcccgcagatacaagaagctttgcgcaaacgcttctgccgcgcccaagcccccagctccaccatctccctggccacaaatgaaggctgcatcttggaacacagcaaaggaggaagcgacactgccaggaagacagatgcttcagagtgaaccacacacggacccatgttcctgcaagggagttgaggctgtgtgcttgaacccaccagatgagccctggcccaatgctctgaactcttcccgcctcccggagctcagcccttga

SEQ ID NO: 124054 - DNA, 872 bp, Homo sapiens
tttcgtctggcggcggcggcggcggtgccggagcgcgagcagagcggagacccccaggtcctgcgggcgcggaatatcctggaaccttcttttgtttgtcagcagccaaggtgtttccaggaagttcagagagaacagaatttaagaagtgcaacatggccaggggctgcctctgctgcttgaagtacatgatgttcctcttcaatttgatattctggctctgtggctgtgggctgctgggagtgggcatctggctctccgtgtcccaaggcaactttgccaccttctcccccagcttcccttcgttgtctgcagccaacctggtcattgccataggcaccattgtcatggtgacgggcttcctcggctgcctgggggccatcaaggaaaacaagtgcctcctcctcagctttttcatcgtcctgttggtcatcctcctagcagagctgatcttactcatcctcttctttgtctacatggacaaggtgaacgagaacgccaagaaggacctgaaggaaggcctgctgctgtaccacaccgagaacaacgtggggctgaagaacgcctggaacatcatccaggctgagatgcgatgctgtggtgtcactgactacacagactggtacccagtgctgggggagaacacggttcccgaccgctgctgcatggagaactcccagggctgcgggcgcaacgccaccacgcctttgtggagaacgggctgctatgaaaaggtgaagatgtggttcgatgacaataagcacgtgctgggcacggtggggatgtgcatcctcatcatgcagatcctgggcatggccttctccatgaccctcttccagcacatccaccggactggtaagaagtacgacgca

SEQ ID NO: 124055 - DNA, 1848 bp, Homo sapiens
atgggagagctctcacctctaggaggcgggcctgccagggagccagtgaggctgcaggttcaccagcacaagtcaccaccagcacaggtcaccaccagcacaggtcacaccagcacaggtcaccaccagcacaggtcaccaccagcacaggccaccaccagcacaggtcaccagcacaggccaccaccagcacaggtcaccatcagcacaggccaccaccagcacaggtcaccaccagcacaggccaccaccagcacaggtcaccagcacaggccaccaccagcacaggtcaccaccagcacaggtcacaccagcacaggtcaccaccagcacaggtcaccaccagcacaggccaccaccagcacaggtcaccagcacaggccaccaccagcacaggtcaccatcagcacaggccaccaccagcacaggtcaccaccagcacaggccaccaccagcacaggtcaccagcacaggccaccaccagcacaggtcaccaccagcacagctcaccaccagcacaggccaccaccagcacaggccaccaccagcacaggtcaccaccagcacaggccaccaccagcacagctcaccaccagcacaggccaccaccagcacaggtcaccaccagcacaggtcaccaccagcacaggtcaccaccagcacagctcaccaccagcacaggccaccaccagcacagctcaccaccagcacaggccaccaccagcaccatcagcacaggccaccaccagcacagctcaccgtaccagcacaggccaccaccagcacaggccaccaccagcacaggtcaccaccagcacaggtcacaccagcacagctcaccaccagcacaggtcacaccagcacaggccaccaccagcacaggccaccaccagcacaggtcaccagcacaggccaccaccagcacaggtcacaccagcacaggccaccaccagcacaggccaccaccagcacaggtcaccaccagcacaggccaccaccagcacaggtcacaccagcacaggtcaccaccagcacaggccaccaccagcacagctcaccaccagcacagctcaccaccagcacaggccaccaccagcacaggtcaccaccagcacaggccaccaccagcacagctcaccaccagcacaggccaccaccagcacagctcaccaccagcacaggccaccaccagcacaggccaccaccagcacagggaaagcccagcggttgcagctgcggcggatccctcggcactgtccgccgcgcgccggggcagcccagggccggcggcagctccgcaaagtcgcggaacgagaggaggcggagcgccggccaagtggtggggctcagcgctggggctgggctgggctgggagagcccgcgcccgacttgggcgccccctccgtcccattctgggagcgatgccccccgctcctcgcaccccccgggaacgccgcgagcatggagaagtcgagtagcgaggattcttcgatccatcggagtccatctttggacagcaaggactcggactttgccaagccgtccacctccggccgcccgttcggccgcggcttcacggccggcgccttctacggcaccgcgggctcccggggccagagccgcgccgaggccggcgttaagaccgacaagtgcaatgcacccaaaggcagcaagtacgtggtgttttacctggacctgtcctttgtgttcctcctagaatttaagaagtgcaacatggccaggggctgcctctgctgcttgaagtacatgatgttcctcttcaatttgatattctgggggttcttcactagagtggatgttcgcatcagccaggcagcttttacatga

SEQ ID NO: 124056 - DNA, 780 bp, Homo sapiens
atgaccgccccgaagacgaggacagaaaaggagacagaagaagaagaaggagagagagagcggggggaaagaaagagaccacgcgaccggaaagaagaaagaaaagggggcgtacgaaaagacaaggcgggacagaaacacgagagagcaggccaaacggagacgggccgcaggcgaaaaggaagaaacaaacagccggacagcgggaaagagaagaaggagagcagaggagcagccgacagcgaggagcggcggagagagagagaggaagagaaacgacccatatcacctgcctcctggtcccatgctggtgggagcctaatggtaggctatgtctataggatagcggtccctgaagcagcattcatctgcctgggcaaccccaatgggtcatgtctttgtaagttctcgatctggccgatgcccgaagctggggggctttctctgccgccgtgttcacaatgggcggaaatatccgtaagccttaaggttcagaaccccatcggctggatcaggggcaagaaatctgcgtatatcatgccaccagtcggcgatgcatcccgtgtagttgtaaacagtgctacgctgactaatggaatctgtgacgttagttctacgccggaatcggcgcatcgacgccacaacttggctacacttaatacgttaccgtatgtggatatgacaaacaatagtggtgctctacagagcacgctcacccgatgcaccagatgtgctcaaaaccctagcactttaggagcctttgctcggaggaatcagtga

SEQ ID NO: 124057 - DNA, 582 bp, Homo sapiens
atgctggcccagagaggagggcgttccgtggtgcagtgcattgcagtctcaaagctgtctgtgactcagagaagttttgtcaccctcattatggatgaagaggctcttgggaactgtggagggtcttctgggagccaaacttgtgaaaaagctgtctgcatccacaatctccctttcctcacctcccacgcattccagtctggcttcccccctcatcagtccccagaagcatctctccctaagatggtcagcgatgctcagaccgccaggctgagcctggagagcatgagggagctgggctttcacatcagtgaaagtgcaggctttcctgcaccagtcagtggttatgaacacagcaaccccagcagaccaggtgtgatgccctcaggtacaagccactggaaacaaaggtcacagaaagtggaggataacaggacagaaatggtaaaagggatccagggggatacaggtgaagcaccaacagcatctgccacgtataaacgggaattaattggcttatatgactgcaaagtccaggacgtggctgccagtacagcaggatccagggcctcagacaattaa

SEQ ID NO: 124058 - DNA, 684 bp, Homo sapiens; identical to SEQ ID NO: 123939

SEQ ID NO: 124059 - DNA, 1520 bp, Homo sapiens
atgctggcccagagaggagggcgttccgtggtgcagtgcattgcagtctcaaagctgtctgtgactcagagaagttttgtcaccctcattatggatgaagaggctcttgggaactgtggagggtcttctgggagccaaacttgtgaaaaagctgtctgcatccacaatctccctttcctcacctcccacgcattccagtctggcttcccccctcatcagtccccagaagcatctctccctaagatggtcagcgatgctcagaccgccaggctgagcctggagagcatgagggagctgggctttcacatcagtgaaagtgcaggctttcctgcaccagtcagtggttatgaacacagcaacccatctctttccaccacaaacctgagcggcccgtctcggcgtcggcagcctcccgtcagccctctcacgctttctcctggccctgaagcacatcaaggtttcagcagacagctgtcttcaaccagcccactggccccatatcctacctcccagatggtgtcctcagaccgaagccaactttcctttctgcccacagaagctcaagcccaggtgtcgccgccacccccttaccctgcaccccaggagctcacccagcccctcctgcagcagccccgcgcccctgaggcccctgcccagcagccccaggcagcctcctcactgccacagtcagactttcagcttctcccggcccagggctcatctttgaccaacttcttcccagatgtgggttttgaccagcagtccatgaggccagggccctgcctttcctcaacaggtgcctctggtgcaacaaggttcccgagaactgcaggactcttttcatttgagaccaagcccgtattccaactgcgggagtctcccgaacaccatcctgccagaagactccagcaccagcctgttcaaagacctcaacagtgcgctggcaggcctgcctgaggtcagcctggacgtggacactccatttccactggaagaggagctgcagattgaacccctgagcctggacggacgtcaacatgttaagtgactccagcatgggcctgctggacccctctgttgaagagacgtttcgagctgacagactgtgaacagaaggcagtggaacagaagaatgtttttctgcaacagccaaaatagaatggaatagaatgaagccagctgataccacgggctttcgttatcttgacatagaaggaagcaatgccacggctccagggtttcagatgagatcccatctcagacactgtggcttcctccagatcacacagctttgtactgcctctcccgcctgtggccaaagtcgtgttgcagcaggcaggctgcttggagcttcccatgaactggaaagctcacctccactgcatctttttactggccatccagtcagccgatgtgtaagagtaggaaatactgtgtcactggaggcctccgtagcattgtgtagtgtgctcagaaccactgatctccgtccgcaccgaaggcgggcccggagtgggagg

SEQ ID NO: 124060 - DNA, 913 bp, Homo sapiens
atgcgcgagcgcgctcggccgccgcggggctgcctggctccgccgctgccgccgggcagtgggcgccgacggacagccggctccacgggggaggggcacggccgggggaggctggcggctgcgggctgcggcgcccgagcagcaatgcaccgaggagcagtgccctcggccgagccagtcccagccagtcccgcggccggtggcagtgggcgggcgagggtcggccgtgcaatgctgcggggggcagccgcacagagccgggtgtgggtggcctgcgcctgccgggtggggtccagcgccgagcagcgctgcgagctgcccagcctccggcggtgcaacgcaccgaggcgcttcggcggctccgggcgggggagggggcgggcgagctccagcccggatgcgctggagcagcggcgcgcaggcgcaccccctaacgctcctgggactcccggcagcccggaggagagctcgctgcgcatgcgcagggagagcgcggccggcgctccagcggtcggcatggcagctgctacctcgctgggacaggctctgggcccacgcgtgccgcgcagtccctacagaactgcagttgtcttgtcttctcggagtgctttcggctacttttcccttattactttagctcgatacacgttgggctgcctttcacattcggatattacgctgttcgagtgctgacgggaaaggcagccctttgacacgcacgcgaaatgtcgcctgacgagggcaaaggtgacagttactaccggaagtaccctatctcagataccctttagattttcccccattgaagaaaaacgaggcgggaaaaacgctgttagggtttaactcaggccctggctccttctcgaacgaattagcggaacacccgcaggagccttgtttggcttccactttt

SEQ ID NO: 124061 - DNA, 1068 bp, Homo sapiens
atggcggacaagagggcggggaccccagaagccgcggcgcgcccgccgcccggccttgcccgggagggggacgcgcgcacggtccccgcggcccgggcccgagaagctggggggcgcgggtccctccaccccgcagcgggccccgggaccgccttcccttcccctgggcgcggggaagcggcctccacggcgactactccgagcctggaaaatggccgggtccgggacgaagccccagaaacctgtggtgcagaggggctagggactcgggcaggagccagcgagaaggccgaggacgcgaacaaggaggagggcgccatcttcaagaaggagccagcggaggaggtggagaagcagcaggagggggaggagaagcaggaggtggcagcggaggcccaggagggcccgcggctcctgaaccttggtgccctaattgtggacccactggaggccatccagtgggaggcggaggccgtgagcgcccaggccgacagggcctacctcccgctcgagcgcaggtttgggcggatgcacaggttgtacctcgcccgtaggagcttcatcatccagaatattccgggcttctgggtcaccgccttcctgaaccacccgcagctctcagccatgatcagccctcgagatgaagacatgctctgctacctgatgaatttggaggtgagggagctcaggcactctaggacaggttgcaaattcaagttccgcttttggagcaacccctacttccagaacaaggtgatagtgaaggagtatgaatgcagagcctcaggccgagtggtgtctattgcgactcgcatccgatggcactggggccaggaacccccggccctcgtacacaggaaccgggacactgtccgaagcttcttcagctggttttcacagcacagcctcccagaggccgacagggttgcccagattattaaagatgacctgtggcccaaccccctgcagtactacctgctgggggataggccctgcagagccaggggaggcctcgcaaggtggcccacggagaccccttctaggccctacgggttccagtctggctaa

SEQ ID NO: 124062 - DNA, 433 bp, Homo sapiens; identical to SEQ ID NO: 121346

SEQ ID NO: 124063 - DNA, 334 bp, Homo sapiens
agcagttctaatatcaattcctaccagcccaggctgtggacagcaatcccatgcctacaaagctgatccagcagaagcatctcagggtgtgtgagggcaagtagagggtacaagtgaatggtaaacaaggaagagtggctgtctgaaaattcgttttcatgttttcctgtttctttacagaaaccccgggatggacgtggccgacgcctacgtgactttcgtccgccattctcaggatgtcctgcgtgataaggtcaatgagggagatgtacataggaaaggttattttgatgttagttaaatgcctttttccttctttggaaaacccaagggg

SEQ ID NO: 124064 - DNA, 777 bp, Homo sapiens
atggatacattcctcgacacatacactctcccaagactaaaccaggaagaagttgaatctctgaatagaccaataacaggagctgaaattgtggcaataatcaatagtttaccaaccaaaaagagtccaggaccagatggattcacagccgaattctaccagaggtacaaggaggaactggtaccattccttctgaaactattccaatcaatagaaaaagagggaatcctccctaactcattttatgaggccagcatcattctgataccaaagccgggcagagacacagccaaaaaagagaattgtagaccaatatccttgatgaacattgatgcaaaaatcctcaataaaatactggcaaaccgaatccagcagcacatcaaaaagcttatccaccatgatcaagtcaatgcagaatataagtcgctttttccagatgacacagtggccaacagaactgctactggactggtcttactttttccactagaacagtggttcacagagatcagcaaacagcagctgcagacagtcaaggaccggtttcaggctttcctcaatggggaaacccagatcatggctgacgaagccttcatgaacgctgtgcagagttactatgaggtgagaatcactgttcagaagaatgccaagaccactcaagccctatgcctggggagtctgagctgcagggcaatggggacagtcgttttggtttactacagtatcatccttcctaaggcaaatgggttggtgattcgttacaatgttaagaaataa

SEQ ID NO: 124065 - DNA, 1752 bp, Homo sapiens; identical to SEQ ID NO: 121348

SEQ ID NO: 124066 - DNA, 1175 bp, Homo sapiens
atgtttgcaagctgctacatgagaaatattcccaagagggtaatcgagtttggcacctgcttgtggagaacttgtaaaaattgcctcagtagcttagagtttaagatgcccttccctccccatcccagatctgtaacttataatttgaaacaggaaagatgccgtctttcgttggatgcatcactgagctgcatgttgtcaattgaagattcccagatccctaatacaagattagagtgttgcaaaggcctctctcgctgtacttctgtggcctctacctgccccctagtcactttctctttttgccttttctctcccaagatggagcaatattcaaaagatgactcagagaagaccctcaaaggctggttcagtcctggccaggtgtttgtactagacgagtattgcgcccgaaatggagtccgggggtgtcaccgacatctctgctacctcagagacttgcttgaacgggcagaaaatggcgccatgatcgaccccacccttcttcactacagctttgccttctgtgcatcccatgtccatgggaacagtcaacaaatgcatgtgtaccttagtgggctgccaccaaatacagaccctgaagggagcaaaactccctccccacctgaaccagaagctaaaaaagataccaaaaaggaatccaaaaaaagaaaagattccaaaacccaggcaaatcaagagctgaaaaggagtttaaccagtaacctacccaatgtgaacctacccaatgtgaaccttcccaaagtaccaaatctaccagttaacatccctctaggcatcccacaaatgcctactttttcggcaccgtcatggatggctgctatatatgatgcggataatgggtcaggcacctcagaagatctgttttggaaacttgacgcccttcagaccttcattcgggacctgcactggcctgaagaagagtttggaaagcacctggaacaacggctgaagttgatggcaagtgacatgatcgaatcttgtgtcaaaagaaccagggattgcatttgaagttaagctgcaaaaaaccagttcgattcaacagatttttcgagtcccacagttcaatatggcaccatgttttaatgttatggggttgatggccaaaggttcaattcaaccaaaacttttgcagcatggaaatgggccaagag

SEQ ID NO: 124067 - DNA, 5049 bp, Homo sapiens
atgctggacccttcgtccagcgaagaagaatcggatgagatcgtggaggaggagagcggcaaggaggtgctcggctcggccccgtccggcgcgcgcctgtctcccagccgtaccagcgagggctcggccggcagcgccgggctggggggcggcggcgccggcgccggagccggggtgggtgcaggcggcggcgggggcagcggcgcgagcagcggcggcggggccggggggctgcaacccagcagccgcgctggcggcggccggccctccagccccagcccgtcggtggtgagcgagaaggagaaggaagagttggagcggctgcagaaagaggaggaggagaggaagaagaggctgcagctgtatgtgttcgtgatgcgctgcatcgcctacccctttaatgccaagcagcccaccgacatggctcgccggcagcagaagatcagcaaacagcagctgcagacagtcaaggaccggtttcaggctttcctcaatggggaaacccagatcatggctgacgaagccttcatgaacgctgtgcagagttactatgaggtgttcctgaagagcgaccgtgtggcccgcatggttcagagtggaggctgttccgccaacgactcccgggaggtcttcaagaagcacattgagaagagagtgcgcagcctgcctgagattgacggcctcagcaaggagactgtgctgagctcctggatggccaaatttgatgccatctaccgtggagaagaggacccgcggaagcagcaggcccggatgacagccagcgcagcctccgagctgattctgagcaaggagcaactctatgagatgttccagaacattcttgggatcaagaagttcgaacatcagctcctttacaatgcctgccagctggacaatccagatgagcaagcagcccagatcagacgagagctggatggacgtctacaaatggcagaccaaatagccagggaacgcaaatttcccaagtttgtatccaaagaaatggaaaacatgtacattgaggagctgaagtcatctgtcaacctgctcatggccaacttggagagcatgccggtatccaaaggcggggagttcaagctccagaaactcaaacgcagccacaatgcttccatcatcgacatgggcgaggagagtgagaaccagctctccaagtcagatgtcgtgctgtctttctcattggaggtggtaattatggaagtccaaggcctcaaatctttggctccaaatcgcatcgtatattgcacaatggaggtggaaggaggagagaaactacagactgatcaggccgaggcttctaaaccaacctggggcacccagggtgacttctccacaacccatgcactgccagctgtgaaggtgaagctgttcacagagagcacaggcgtcctggcgttggaggacaaggagcttgggcgggttattctccatcccaccccgaacagccccaaacagtcagagtggcacaaaatgacagtctccaaaaactgccccgaccaagatctcaaaatcaaacttgctgtccgaatggataagcctcaaaacatgaagcattctgggtatttatgggccatcggtaagaatgtctggaagagatggaagaaaaggttttttgtattggtgcaggtcagtcagtacacgtttgccatgtgcagttatcgggagaagaaagcggagcctcaggaacttctacaattggatggctacactgtggattacaccgacccccagccaggtttggagggtggccgagccttcttcaatgctgtcaaggagggagacaccgtgatatttgccagtgacgatgaacaagaccgcatcctgtgggtccaggccatgtatcgggccacggggcagtcacacaagcctgtgcccccgacccaagtccagaaactcaacgccaagggaggaaatgtacctcagctggatgcccctatctctcaattttctggactgaaggacgcagatagagctcaaaaacatggcatggatgaatttatctcttccaacccctgtaactttgaccacgcttccctctttgagatggtacaacgccttactttggatcacagacttaatgattcctattcttgcctgggctggttcagtcctggccaggtgtttgtactagacgagtattgcgcccgaaatggagtccgggggtgtcaccgacatctctgctacctcaaaagacttgcttgaacgggcagaaaatggcgccatgatcgaccccacccttcttcactacagctttgccttctgtgcatcccatgtccatgggaacaggcctgatggaattgggaactgttgactgttgaagaaaaggaacgttttttgaaggaaatcaaagagaggctccgagttctgctagaaaatcagattacacattttaggtattgctttccatttggtcgacctgaaggtgctttgaaagctactctctcactcttggaaagggttttgatgaaagatattgttaccccagtgccacaagaggaggtaaaaacagttatccgtaaatgtctggaacaggctgcgttagtcaactattctcggctctcagagtatgccaaaatcgaagagaatcaaaaggatgcagaaaatgtaggccggttaatcactcctgccaaaaagcttgaagatacaatacgtcttgctgaactagtcattgaagttcttcagcaaaatgaggagcaccacgcagaggggaaagaggcctttgcgtggtggtcagatttaatggtggagcatgcggagacgttcctgtcactctttgcagtagacatggatgcagccttagaggtgcaacctccagacacatgggacagttttccactatttcagctgctggaatgattttctccgtactggactattaatttgtggcaatgggaaaatttcacaaacacctgcaagacctgtttgccccacttgttgttaggatatgtgggatcttgatgggagttccccaattgcacaatccattcacagggggcttttgagccgggagtcatgggaaccagtcaataatgggtcaggcacctcagaagatctgttttggaaacttgacgcccttcagaccttcattcgggacctgcactggcctgaagaagagtttggaaagcacctggaacaacggctgaagttgatggcaagtgacatgatcgaatcttgtgtcaaaagaaccaggattgcatttgaagttaagctgcaaaaaaccagtcgatcaacagattttcgagtcccacagtcaatatgcaccatgtttaatgttatggttgatgccaaagctcaatcaacaaaactttgcagcatggaaatgggccaagagtttgctaaaatgtggcatcaataccattcaaaaatagaccgaactaattgaagaaactgttaaagaaatgataacactcttggttgcaaagttcgttactatcttggaaggagtgctggcaaaattatccagatatgacgaagggactttgttttcttcttttctgtcatttaccgtgaaggcagcttccaaatatgtggatgtacctaaacccgggatggacgtggccgacgcctacgtgactttcgtccgccattctcaggatgtcctgcgggaataaggtcaatgaggagatgtacatagaaaggttatttgatcaatggtacaacagctccatgaacgtgatctgcacctggttgacggaccggatggacttacagcttcatatttatcagttgaaaacactaattaggatggtaaagaaaacctacagagatttccgattgcaagggggccctggactccaccttaaacaggcaagacctgatgaaccgatccggaaccgtctcactgtggaggaagccacagcatcagtgagtgaaggtggggggctgcagggcatcagcatgaaggacagcgatgaggaagacgaagaagacgattagaccatttggtcctagagtctgctgggacagagtcctgtaatcagtgcatgtccttagtctgttagttaaacccattaggaattttcctgtccaactacccatgcccccatgagatgtttatccaatacaactgcccattttagcctatgtggtacccaagattagcaaatgacccttcatatcccactgatttccctgatgtcccatgtctatatgtttacaagcaatatggagcaccattctttaaatactgttccatggagaatacatagtctaaccactagggcgtgtccctgttattcaggcaaaggttcaatgatgcttcattcatgtactatgtatgcattggtggtaaatggatgtgagggcaagtacatcaagtacattcactctgtttcacgtatgtggatgccagttaattaaatgagtacgtaaataaattaattaaaacacatagatctgctttgtgtttttatttttattttttgvaaaacaaaaggcaagtctccaacaattaacttttgatgctttctgttcccctaaaaccaaaaaatgaaccccttgtgtcgttgttaaccccatccttccatttacctcatataattagccaaaaaaaaaaaggatggcttacatacccaatggatggattctcttaattgccacggcaagggggcgatccttatcatgacttaacatcaagcgcgcagttccaaaaactactgtcctcctgtccaaagttttccccctcttaaatgttattttgccttttaccgtcctcaactgtgtatgtaaaaaaaacgaatatttaaattacacaccctagactaaaaatgtgtttataataagatgtggatatttcccttcagtagattgtaaccataatttaaattattttgttcccacactgbgybbttatatctgtcatgtacattgcattttgatctgtaactgcacaaccctggggtttgctgcagagctatttctttccatgtaaagtagtggatccatcttgcttttgccttatataaagcctacagttatggaagtgtggaaaactgtggcttctcaataaatattcagatgtcctaagaatat

SEQ ID NO: 124068 - DNA, 658 bp, Homo sapiens
gtggcggcggtagctgctacggcgctgaagggcgggggggcgagaaatgcccgcgtcctccgggggattttcgcaggagccacagcttaacaaggcttcttcataacaggacccgggcccttcaaaacccacagcttccccagagggcaaggaggaaccctgaaccccttatccccggaactggaaaatacattccccagaaaagaggggcaaagaacccccatgaaaactgtgggaacttgccctgggccatcggcttcccttgtggtatcctcctcttcgatccctcacccaagcgggaaagttggacaaggaccgtgttgaagcagatgaaggctcggcagaacatgcgggtgtccaacacggggcgagtatgagagcccagaggttcagggcttcctcccagagttgccccgtccccttgatgttgggtctggggtgtctggggtgcagacctgaggagcgtctgcgaccctccttaggctattgactgttaagtcctcaggttttggccagattccagtttcgtgcctctgaaggtccaccagaagggcgcatgaagcccaaggctgtttgccaaaaccctaccctgccccacaccaaggaagccagccaaaagggaaaataaagttattgagtgtttagtagaaagaaaaaa

SEQ ID NO: 124069 - DNA, 873 bp, Homo sapiens
ttagtcaaatgattggaaaaccaataacgaaaaatagttcttcaggttcttctcctggtaaggcggaggacacaccaaactgcactggccctgcgccacaaattggtggagcgtttgcgcaccatcggggtcgttaaccaccatttcaatcaccgtggtggttggcgtgcgccaggcgttggcaaatgccgtttcaagttcctgccagttttgcggacgatgatatttcagctcgaacatcgcggcggcgtgctcaaaatggacgttttgcggcatcagatagaaacgctcacgctcgctttgcggcgttggcaacagcgagaaaatttgcccgccgttgttgttcaccacaattaataccagcggcgcagaaacctgacgcaataacgccagcgcgttgagatcgtaaagtgcggagagatcgcccacaatcgccagcgtcggtttgccgcttgcccgctgaacgccggcggcggtcgaaagcagcccgtcgataccgctggccccacggttgctgtacaccgggtaacccttgcagcctggccgcgtggccagggctgcgtaccacgcattgtgccgtgctgtccaaagccggctgcgctcctcggcctccttggcccaggagaagtcagaggctccgttctgctggactatctcctctgtgcgctgcagctgctcctccagtgcctgctgggagccatggaactccaggaagagtgtgggcgccactaagcaattcagcttgctgtacctgttgcaggcatccatcatgacttcatccaggaactctggatccagggagatggcaggccaggtgaggccctgcccttcccagggggcctcttccagggagcccaccctgactgcccccat

SEQ ID NO: 124070 - DNA, 814 bp, Homo sapiens
  misc_feature (1)...(814): n = a,t,c or g
ccaaagatcttggtgggcgccagcaaggttgttctcctcaggcgcccacaagctgggtttcatcggggacacactgtcacggcaggccaaaggctgttgacgtggcaagcagggtgacccattacagcaacctgctggtgcgacttcttgcnagggcattgtggccaccacaaaggccgctgccttgcagtaccccatcgcctttcccgggcccaaggacatggtggagagggtcaaggagctgggccacagccacccagcagttccgccgcgtcttaggccagctggcagccgcctgagggtggtgacccccaagaggaaggcaggggaggggtgcggcggtcccagctccctggctcccatgtcaaagagtcgcttgttccaacaggcttagggacaggaccccaagctctgcgtcggtcctggtgcccctggatgccccaggaatcctgtatatatttatggccgggacagggtgtggggccatgccctcctcaggaaccgaaaagcccaggggccggccagtgggccttcccccagcatgcacccacgggacccgggttggggttaccacaaccgggctgggagtgtagacggtcctgcagcctgcaggaccatcgtgccaccccgagggctgagcctggtcccacaaagggtgccgtgtccccctgacagggccagtgcagtttggtgtgtcctccgccttaccaggagaagaacctgaagaactatttttcgttattggttttccaatcatttgactaagagtctcccatttaaataaagtttttaaaaggaagagcaaaaaaaaaaa

SEQ ID NO: 124071 - DNA, 294 bp, Homo sapiens
atgcccggattgcttcgccatcatttctttctacttcatgccctgctgccccctcacggcccctccttctacctgctcagcggcctgctggacgctttcgatggacacgcgctcgcgctcttaatcaagttctgtgtccgaggcagtgagagtcacaagatgatcgacttgtccgggaatccggtcttcggatctactacacctcgaggttggctctgtgggactgttccggatgggctctgggtcactgcccccatcgccttgctgaagtcgctcatcagcgtcatcacctga

SEQ ID NO: 124072 - DNA, 642 bp, Homo sapiens
gtccttatccgtgcgcgtttatctgacaatcctgcggtccgaggcagtgagagtcacaagatgatcgacttgttctgttatccggtgcttcggatctactacacctcgaggcctgctctgttcaccttgtgtgctgggaatgagctcttctactgcctcctctacctgttccatttctctgagggacctttagttggctctgtgggactgttccggatgggcctctgggtcactgcccccatcagccttgctgaagtcgctcatcagcgtcatccacctgatcacggccgcccgcaacatggcttgccctgggacggcagcaggaccgcgccaagaagaagtgacgctggagccccgggtcctggctgcccacctgccctgggaagtcttgctgtgccacacagctccccaccccctgcttaggaggtcccagtctcacagccttcctcatgtgttgttctaccttgctgggatggtgggtcaatccctctttggtgacgtcacgtttctctggggatcctgaggaaccggggccttaaatcagggaggatacgcaggaaggccccttcaatccaggcggtgctcctggggtgccgggaccgggcaatgtcacaacctgcctgctcagtcctggggtccgaa

SEQ ID NO: 124073 - DNA, 645 bp, Homo sapiens
atggtgcgctcctgttttgtggatgacagaagaaagcgctgtaatttcaacagacaggccagtgaggtcctaaatgagtatttctactcccacgtgagtaacccatatcatagtgaggaggccaaggaggagcttgccaaaaagtgtggcatcactgtgtctcaggtctccaaccggtttggcaacaagaagattcgatataagaaaaacatcggagagttccaagaggaggcaaacatatatgctgtcaagacagctgtgtcagtcacccaggggggccacagcagcaccagcttccccgacacccccttcctgtgcaggctgtggcggctctttcaatatctcaggatctggagacatgtttctggggatgcctgggctcaacggagattcctattctgcttcccaggctctggaatctggagacgccagccctgcccaatcagagatgccaaaaatggggacatgacttctggacagaggacatgggacacgcccccatgcatccccacccctgcccctccagacagcttacttacctcatacgcagctcatcttaaaccaatagaatcgcttggtggacgagagtgtctgactcagatatctacctcggagggagtttctgctactttagggaattattga

SEQ ID NO: 124074 - DNA, 3261 bp, Homo sapiens
cctccctcctccctctctctcacacacacccccgcttgggcctcctctctctctccggctccattttctccgccgccgggggccggggtctcctgtggggggcccagccggtatcccaggtctcccttcagtgccggggtgaacccccgggggagccgggagccgggggcagacgggcgggggttggggcggagggagcagcggccccagcgagtttggggggagaagtaaccaggcggggggaggggcggagcagggagggggcctcagggcccccccccagctatggacgaacggctactggggccgccccctccaggcgggggccgggggggcctgggattggtgagtggggagcctgggggccctggcgagcctcccggtggcggagaccccggtgggggtagcgggggggtcccgggaggccgagggaagcaagacatcggggacattctgcagcagataatgaccatcaccgaccagagcctggacgaggcccagggccaaaaaacaccgcccttaaactgccccccgaaagaagcctgttctttttagcggccggggtgaaatcaaggagaaaaccggccctcagcattcggagctcccaggaggaggagccggtggacccacagctgatgcgcttggacaacatgcttctggcagagggtgtggctgggcccgagaaagggggcggctcagcagcagcagctgcagccgctgcagcctctggtggtggcgtgtcccctgacaactccatcgaacactcggactatcgcagcaaacttgcccagatccgtcacatataccactcggaactggagaagtatgagcaggcatgtaatgagttcacgacccatgtcatgaacctgctgagggagcagagccgcaccaggcccgtggcccccaaagagatggaacgcatggtgagcatcatccatcgaaagttcagcgccatccagatgcagctgaagcagagcacctgcgaggctatgatgatgctgcgctcccgtttcctggatgccagacgaaagcgccgtaacttcagcagacaggccactgaggtcctaaatgagtatttctactcccacctgagtaacccatatcctagtgaggaggccaaggaggagcttgccaagaagtgtggcatcaccgtgtctcaagtctccaaccggtttggcaacaagaagattcgctataagaaaaacatcggaaagttccaagaggaggcaaacatctatgctgtcaagacagccgtgtcagtcacccaggggggccacagcagcaccagctccccgacacccccttcctctgcaggctctggcggctctttcaatatctcaggatctggagacatgtttctggggatgcctggggctcaacggagattcctattctgcttcccagggtgggaatcactccgacactcgatgggggccaggggggttattgggggataaaccttcggggggagggccagatgttacagcccacggggaaatgagggcaaatggcagctggcaagaggctgtgaccccctcttcagtgacatccccaacggagggaccagggagtgttcactctgatacctccaacttgatcttgcccctcagggtcacaggggtgggggctctcacaaggcgacttgaagaggacgcaggcttccagaggacaaaccccaatacaggagaagcacaagacagagaagggccaatggggtcatcccctccctaacgagactctctgtgctgggggtgctaattacatggcaggaagaatggggcctctagaggggagtgtggggtctgtctctcccttttttccatctttttcctctctcgctttctttcttacacagaaacatacacataccgagaaacctatttctcagaccccttttttctcctctgtctttctctctccctctcccacacctcacacacacatactcccacttgcaactattctgtttctctcccctgggttccccccaactttccccttccccccacccccacttgtatgctctggaatctgtggagacgcccagccctgccccaatcagagatgcccaaaaatggggacatgacttctggacagaggacatgggccacgcccccatgcatccccaccccccgcccctccggacgggcttacttacctcatacgcagctcatcttaaaccaatagaatcgctcgggtgggacgagagtgtctgactcagatatctacctcggagggagtttctggctactttaggggaattattgactgggctttggggttgaactttttttttttttaaagaaagaaaaagaaaccctgggatccatctgttttttttgttgttgttgttgtttttgttgttgttgttggtggtggtggtggtggttctttaatttttaatttagtttggggaagtagcttgtttttttttttataaatatgttgatttcttgttttcttttttttttatttcttactttcccatattaggggtgatagccaaaggggttctggtaagagaaagggggacaaacagaactggtaaagaggcccccctggctccaggcctgtccatcaggaaggtaaattttacagggcaccaagctttgccccctaaaatcccttaggtgttctttgttcatgcaggcaggtttctgccgcatttgatgtggaggcagtgaagggcttgccctgctggcctctcatcccccttcttcccacaacccttgggcagggctggactcagtaattttgaggaaattgaagatgccatcttcccctgtgagtgacatgtctttaattttttaaaaaactactatttgaaaattggagggggaagaatgggaagggagttattgccaaatatgttaaatatgggttggggtgcttgtatatgtatcttcctcaatttccccataaatgaggtatctttttgtcacaccaaaatcaaggggtagggagagggaggaggttgcaaaaagccagatgtgggggaaaagtaacatcaacactgtcccatcctcagccctgaactagctaccatctgatcccctcagacattctcaggattttacaagactgtcagagtggggaacccctcccattaaagatccgggcaggactgggacaggttggaagtgtgatgggtgggggggtgggaggcatgggccggggggctagttctctcctcacttgtaaacttgtgtagtttcacagaaaaaaaacaaaatgcagttttaaataaagaaatttcttttt

SEQ ID NO: 124075 - DNA, 830 bp, Homo sapiens
tttttttttaacttttaattttaaaaatgataaagaaacggggataaaaataaaccacctaaatgagtcatattagtttctttagctttttcaaatagtttctaaaatggaaggagattgaaagccagttttttaagatttatttcaagtgttgtgcaaagagggcttatgcaattcttcagaccctatttattttatttatttatttatgtacattcttctggaaaggattactaaagccaaactaagaaaagtatgtaagtgatggattatcaggcgcccttgtttgaggtcagagtaaacagacagactcccgataggttggtttaaaagtagatacctagattgcctggaagcattcaactcagctttgtgggagcatttggtcaaacttccaagtcattgttttttttgtgtgtgttcattttgttacttttccagttcttcctttgttctgtttatgtgccaatgtgcacagaggaaggatcaacatccccattggcccatgcggcggcatgtgtctttcagtcaagggacgctgtgaacccgtcctgaaggaatttggatttgcctggccagagagtctgaactgcagcaaattcccaccacagaacgaccacaaccacatgtgcatggaagggccaggtgatgaagaggtgcccttacctcacaaaacccccatccagcctggggaagagtgtcactctgtgggaaccaattctgatcagtacatctgggtgaaaaggagcctgaactgtgtgctcaagtgtgctatgatgcttgcttatacagccgctcagcccaagaagtcactggatatctggatggct

SEQ ID NO: 124076 - DNA, 1962 bp, Homo sapiens
  misc_feature (1)...(1962): n = a,t,c or g
atggcctggcggggcgcagggccgagcgtcccgggggcgcccgggggcgtcggtctcagtctggggttgctcctgcagttgctgctgctcctggggccggcgcggggcttcggggacgaggaagagcggcgctgcgaccccatccgcatctccatgtgccagaacctcggctacaacgtgaccaagatgcccaacctggttgggcacgagctgcagacggacgccgagctgcagctgacaactttcacaccgctcatccagtacggctgctccagccagctgcagttcttcctttgttctggttatgtgccaatgggcacagagaagatcaacatccccattggcccatgcggcggcatgtgtctttcagtcaagagacgctgtgaaaccccgtccctgaaaggaatttggatttgccctggcccagagagtctgaactgcagcaaaatcccnacccacagaacgacccacaacccacatgtgccatggaagggcccaggtgatgaagaggtgcccttacctcacaaaacccccatccagccctggggaagagtgtcactctgtgggaaccaattctgatcagtacatctgggtgaaaaggagcctgaactgtgtgctcaagtgtggctatgatgctggcttatacagccgctcagccaaggagttcactgatatctggatggctgtgtgggccagcctgtgtttcatctccactgccttcacagtactgaccttcctgatcgattcttgtaggttttcctaccctgagcgccccatcatatttctcagtatgtgctataatatttatagcattgcttatattgtcaggctgactgtaggccgggaaaggatatcctgtgattttgaagaggcagcagaacctgttctcatccaagaaggacttaagaacacaggatgtgcaataattttcttgctgatgtacttttttggaatggccagctccatttggtgggttattctgacactcacttggtttttggcagcaggactcaaatggggtcatgaagccattgaaatgcacagctcttatttccacattgcagcctgggccatcccgccagtgaaaaccattgtcatcttgattatgagactggtggatgcagatgaactgactggcttgtgctatgttggaaaccaaaatctcgatgccctcaccgggttcgtggtggctcccctctttacttatttggtcattggaactttgttcattgctgcaggtttggtggccttgttcaaaattcggtcaaatcttcaaaaggatgggacaaagacagacaagttagaaagactgatggtcaagattggggtgttctcagtactgtacacagttcctgcaacgtgtgtgattgcctgttatttttatgaaatctccaactgggcactttttcggtattctgcagatgattccaacatggctgttgaaatgttgaaaatttttatgtctttgttggtgggcatcacttcaggcatgtggatttggtctgccaaaactcttcacacgtggcagaagtgttccaacagattggtgaattacacataaggtatccagtggatttttcttctctgtcttcctctcttaaatttcaacatctctcttcttggctgctgctgttttcttcattttatgttaatgactcaaaaaaggtatttttatagaatttttgtactgcagcatggtgtttctggcgatgttctcttctcttgattgatgattcctcagagcctgcccacctcctagggctaaactggctcaattttaagaatggatgaaaaatgtgaagctctcctcgactcttctgtgaactccatgaaagcagaacactgtcttttctgtcctggtgtctctgcttctagccaggtcctggaaccatgactgccccaggaattctcggttttcatttccacaccagaatctaattctcttcctttagtctttcccat

SEQ ID NO: 124077 - DNA, 979 bp, Homo sapiens
ctccagagatcaagaggatcttctccctcatgttcttaaaatgtcctggctgcgcagctggcagaagagatttgccattcagctggaatgcgcacgacaaattctcttcaaggtcagtccaagttctttcatcatcaaagtccattttactcagacttagggatgaggatctcgagggctcagacactttatgttttatgctttccatgatagactcatcgctactgtaatctttatcagacaaatccagatcaacatctctccttttatcttcttgggtcctggtgtccttaaaaggccccttatcatcacagacttgtgggctatcctctctgctgctgatgcccctctctctatcctcagtcgatggttttatggtaacatcaagctgttcctcagagtcagtgctactgtcactatttggaacaccttcatcgtcacgtgcattccattcagtctgattttcagaagtgctcttttggacggctttcctgattttacaaggctgttccctcaattcatcagctagatgtcccacagacacatcagccgtagagcactggacttgtacagaaggtgtactcaaggagtaaacacgtgtctctgtagccaaaatattactatgttcagttagtaccaaaattagaccatttgatcttctattaagtaagttttcagttaacaaccactgaacataaatcttctcaggagatattacattacagatatgcacaggcaattccttattataaagtgactgaaaattctcattaggtagagattttgcagacacaggatttaagttgtgtacttcatttgaaataatttcttctggagaaggatcccaaacttcaatatgcttttgagaattatctttgaggatgtatagggtcatcccacagaacgtctgacttagaatcacttgggacattgctaagtctatagattcctgggccccaatccagatttcccgaatcat

SEQ ID NO: 124078 - DNA, 957 bp, Homo sapiens
atgcgtgcaccagagcctgttaccctggtggccatcggcccgttaaccaatattgcgctgttactttcacaatgcccggaatgcaagccgtatattcgccgtctggtgatcatgggtggttctgccggacgcggcaactgtacgccaaacgccgagtttaatattgctgccgatccagaagctgctgcctgtgtcttccgcagtggtattgaaatcgtcatgtgcggtttggatgtcaccaatcaggcaatattaactcctgactatctctctacactgccgcagttaaaccgtaccgggaaaatgcttcacgccctgtttagccactaccgtagcggcagtatgcaaagcggcttgcgaatgcacgatctctgcgccatcgcctggctggtgcgcccggacctgttcactctcaaaccctgttttgtggcagtggaaactcagggcgaatttacctcaggcacgacggtggttgatatcgacggttgcctgggcaagccagccaatgtacaggtggcattggatctggatgtgaaaggcttccagcactatgacgatgtgaaagcttataccccggcctgggccgagcagattaccggcgtttctcgcagccagattattcgcatcgcccgtgaatttgccgataacgctgataaaacgcacggtcgttcgatgattatcgtcggtgcggggctgaaccactggtatcacctcgatattcataaccagacctggggcactcagacaaggactggtggccaggccagaggagcagagctcaggtggtctgtacgcgatgccatcattgccatcgcccagaacagactctgccacgggaatttaagcataatcagatgtccgagcactggcgctaacaccggaatgatgcagatatacggagaacgcaatatgcaactgcgcttcgctggcattgagatcggcggcgatgcgcggtaa

SEQ ID NO: 124079 - DNA, 1346 bp, Homo sapiens
tcatggtaaggtagcatgagcctccaagcaattccgggagtgggcggctgtctgtgcagcgtgtgcacagactctccgtggctgtgaggctattgacaggtactccggtttccgcgcacgtcctaaggacgcacacgagaggcaacttggcgtgtctacagtgtcgcagtcggcgtttctcgcagccagattattcgcatcgcccgtgaatttgccgataacgctgataaaacgcacggtcgttcgatgattatcgtcggtgcggggctgaaccactggtatcacctcgatatgaactatcgtggtctgatcaacatgctgattttctgcggctgtgtcggtcagagcgggggcgctgggcgcactatgtaggtcaggaaaaactgcgtccgcaaaccggctggcagcctggcgtttgccttgactggcagcgtccggcgcgtcacatgaacagcacttcttattttttgctagttccataaaaaccagcgcatctctaagagacacaggcatatcactgcttattttattcggtggtggtttttgcagatctacaataagcacaccatcttcttctctaaaaactttcattgaaacagccttgttatttaccattttcaaaaattccactttagcttcctcttcccagccttcattcgcaagccagaggaaatcccgccaactccctccaccacttaacatcaaagggacagggccttcatcgtcacgtgcattccattcagtctgattttcagaagtgctcttttggacggctttcctgattttacaaggctgttccctcaattcatcagctgaggacaatgaatgaagttgtttgggtgcgacttcacactcactctccttctcacgtgcagtgtggtccaaatcctcactgcggttacaatgactaatgggatctgccggatttgtcttctgtggcacagctttgacaggggtggaagacatccggtgacctttgcagatctgttgatccctttctaagattttcagtacaaatgaggaattactagaaaatgatatttcatcagcagcttgttctaaaaacaaaaattcatctaattccaaattttccttttccttttctcgttcccaagtctctaactttttctgaagagaaacgtcaagagaagattcagactctttcatggtctcccttatggggctcttagcagccagccggctggccggccctgttgaaagaggaagtctgtctataccttgtgtcttattccaccctgtgcagccagtatcgcaaggttttggacactcagttacattttctttattattagatgtggctttgttttcaaaattctcgtgccgaa

SEQ ID NO: 124080 - DNA, 408 bp, Homo sapiens
  misc_feature (1)...(408): n = a,t,c or g
agcacatctttctcacactttgctctttggaaggcccaggagaacatccgcgaaggctgttggaggtgctccgagcactgtggcatgtctggcacatggcccccaggctgcggttgcctgggttggttgggggaggaagtggggggagtgttccgggaccatggtggcccaggctgcagccgcctttgggccatccgagaggctctggcagcccctgtgctttatggagcaaccgtgagccgagcccagaggcctgggcctgcactgcctgcagccgacatgcgacagcggggggtcgggggagggccaccgactggctctgctgccagcacaggcccctccctggaagtcctcgggagcggagcgcggatcggcacgggctctgngctccccgtggagagaagctgg

SEQ ID NO: 124081 - DNA, 199 bp, Homo sapiens
  misc_feature (1)...(199): n = a,t,c or g
gagatgacttcctcgatctagcggagtctccaaatgcctcggacaccgaatncagcgacgaaatccccctgaaggctggtccagggaccctcatcatggccacaggagtccaggactttaaccggacagagtttgatcgactgaatgngatcaaaggtcacctggaaattngccttattggaaaaacatttttttacag

SEQ ID NO: 124082 - DNA, 455 bp, Homo sapiens
ggtctgtggcctcgctgtgttccctccaggccttgactcagaactcaccttctcccgaggctttcccagagcagccctgtgtccagcctgccccgtgctcttctcaggccccctggccagcttgagctgtgggctgtccccgctggcccagggcctttgctctgctgccgacgcgtcccagaacctcacccagcacatggaggcgctggcatcccagagtcggggtcgcgtggacatgagcgatggtcacctggccgttctctcccccatagaggaggagctccggaagctgcgagaagaaaccaacgcggagatgctgcggcaggagctggaccgcgagcggcagcggcggatggagctggagcagaaggtgcaggaggtgctgaaggccagaaccgaggagcagatggctcagcagcccccaaaagggcaggcccaggccagcaatggagcag

SEQ ID NO: 124083 - DNA, 4306 bp, Homo sapiens
gacaaaatcaggttcagaggtcacaagagagatgacttcctcgatctagcggagtctccaaatgcctcggacaccgaatgcagcgacgaaatccccctgaaggtaccgcggacctcgccccgggacagcgaggagctgagggaccctgctggtccagggaccctcatcatggccacaggagtccaggactttaaccggacagagtttgatcgactgaatgagatcaaaggtcacctggaaattgccttattggaaaaacatttcttacaggaggagctccggaagctgcgagaagaaaccaacgcggagatgctgcggcaggagctggaccgcgagcggcagcggcggatggagctggagcagaaggtgcaggaggtgctgaaggccagaaccgaggagcagatggctcagcagcccccaaaagggcaggcccaggccagcaatggagcagagcgccggagccaggggctgtcctcgcgcctgcagaagtggttctacgagcggtttggggagtacgtggaggacttccggttccagcccgaggagaacactgtggagacagaggaacccctgagcgcccgcaggttaactgaaaatatgagacggctcaagcgcggtgccaagccggtcactaactttgtgaagaacctctctgccttatccgactggtactccgtctacacgtctgccattgccttcaccgtgtacatgaatgccgtgtggcatggctgggccatcccattgttcttatttctagcaattctgaggttatccctcaattacctcatcgccagggggtggcggatacagtggagcatcgtgcccgaagtgtctgagcccgtggaacctccaaaggaagacctgactgtgtctgagaagttccagctggtgctggacgtcgcccagaaagcccagaaccttttcgggaagatggctgacatcctggagaagatcaagaacttgttcatgtgggtccagccggagatcacacagaagctgtatgtggcgctctgggctgccttcctggcctcctgcttcttcccctaccgcctggtggggcttgccgtgggactctatgctggtatcaagttcttcctcattgatttcatctttaaacgctgcccgaggctgcgcgccaagtacgacacgccctatatcatctggaggagtctccccaccgacccgcagctcaaggagcgctccagcgccgcagtctcacgcaggctgcagacgacctcgtcacggagctacgtacccagcgcaccggccggcctgggtaaagaggaggacgccggtcgcttccacagcaccaagaagggcaatttccacgagatcttcaatctgacagaaaacgagcgtccgctggcggtgtgcgagaatggctggcgctgctgcctcatcaacagggaccggaagatgcccacggactacatcaggaacggggtgctctacgtcacggcagaattacttgtgcttcgaaagctccaaatctgggtcctcaaagaggaacaaagtcatcaagctagtggacatcacggacatccagaagtacaaggtcctgtctgtcctcccaggctcaggcatggggattgccgtgtcgacgccatccacccagaaaccgctcgtgtttggtgccatggtgcacagggatgaggccttcgagaccattctcagccagtacatcaagatcacctcagcggcagcgtctggcggggacagctagtattgacttgcccaggacgttgctggaattttctttttctttttctttttctttttttttttttacgatttggtagtggaaacaattggacatcctcatgagcttttgcaataattctcctggacctgtggttctattgtgttgacctctgcgttttatcgaccaagaaggggccagggctcacagggacgggggtgcccctctcccacagggcacgtcaggtgcctctgagggccacccgcagactgggggagggggcagaggccctcgggggcccgtggagaagacacacaggacccctggccctgcccttctccgttccagcctggacagagaaacctctccagccaccccaagaggttctcgcaaccttgtgtcccgctctccagaggccagaagctcgtccaccaccaaagccatagctgaagagtgcggggcccttcctcctggggacagaaagatgtcgtcaaggagggacatgggggcctttcaccaaccaccgagaaacgggcctggcggccctccttcctcttacatgagaccctcctgtggcatttgcccttggtgccgggctggggccgggcgcagtgaccctgcctgcgctccacactcgctccacgggaacagagagggtgagaagggcccacccctcacctgccctcagtgtctttggtggcaccttccttgctggcctccagggcgctcagcaccgtgtctgtaagggcctgcctgctgctctcggcctgacacgccggccaggaggtctgtagctggggaccagtaagggcacaggatggtgcaggtaaaagcacatctttctcacactttgctctttggaaggcccaggagaacatccgcgaaggctgttggaggtgctccgagcactgtggcatgtctggcacatggcccccaggctgcggttgcctgggttggttgggggaggaagtggggaggagtgttccgggaccatggtggcccaggctgcagccgcctttgggccatccgagaggctctggcagcccctgtgctttagggagcaaccgtgagccgagcccagaggcctgggcctgcactgcctgcagccgacatgcgacagcgttccctcccccgcgtgcctagccggtgccggtccgggcacagacccccccagcccccgccctgccccagggaagcctgggcttcccgggaacaaggtggcatttgtggagggagcgcccgcaggcctggtctgctggggccgcctgcgctgggctgaagggagggaaaggcggcttgggcctcctgggaaggagttggccaccccgcgggcctgcgtgtctgctggggcggatcccgcagctccctcagcttgtcctgagtcccttgggtgtcgttgagattgttgttttttgaagaaacagaagattctattttttacagcgagcaagctggttttcttatttttgtatcctttttcagatgtaatttttatctttgctccgatcctcatttgctggagtgggtgagggatccggcggcatgggctggtttcacccccttcacgaggggcccgagagtcacacgctggtgccgggggtgctttggggggagctgcgccgatcaccagattaagcacatgtcctatcccaggcggtggagcggagcccccgtggctctggactgcgcggacgttggcgtcaggatagaccacacggcggcctttcccgaatggggacagaacccgcatctgagccagtgggtctggctcctgtaggggactggctctcttggtgcaccaggggagggggacatatcccagtgaaccccaccagttggcgcctgaggcaaaactagggtgggcactgacccaccctcaggggctggctgcagaggcagtgcccgcaaacaatggccacacctctctccccaaggcccggcagtgcccaaggatgggtccggggccttcggggcaaatgagcgcctcttcctaaggtgctggggatttcagttccccaaacacagcgggatggggttccttgggggcagattggggggctttaccagcgtggggtggtttagttcgagtcccttttgtggagaaagggagatgaaaactgaccacgtgccagggtgttggcccgaagccccccagggagggccacagttcggggagctgggaggtcgggggagggccaccgacttggcttttcttccaaccccgggcccctccctggaagtcctcgggagcggagcgcggatcggcacgggctctgggctccccgtggagagaagctgtagtttttaccaaattggtgtacatctgggccagatgttttaatttctgtgactaatcactgaactagaccgaatgttaaattttttatgtcctgaagcctgagtctattttggatctgtaaataatcattgccagtgtgacttttgttcaacaaaaggattgtactgtattaagaaccgatgaaaaaaattctcctgtaacatttttttaagaaaactttgtttgtttacagcaaaaagtcttgtataaattataatttttatttaaataaacctaaaatgactttgtgctaaggctaaaaaaaaaaa

SEQ ID NO: 124084 - DNA, 573 bp, Homo sapiens
  misc_feature (1)...(573): n = a,t,c or g
ccgcccggaattctcgngtcgacgatttcgtggagggcgagaggactgagtgtgctgagcccccccgggacgaacccccggctgatggagctctgaagcgggcagaggagctcaagactcaggccaatgactacttcaaagccaaggactacgagaacgccatcaagttctacagccaggccatcgagctgaaccccagcaatgccatctactatggcaaccgcagcctggcctacctgcgcactgagtgctatggctacgcgctgggagacgccacgcgggccattgagctggacaagaagtacatcaagggttattaccgccgggctgccagcaacatggcactgggcaagttccgggccgcgctgcgagactacgagacggtggtcaaggtgaagccccatgacaaggatgccaaaatgaaataccaggagtgcaacaagatcgtgaagcagaaggcctttgagcgggccatcgcgggcgaaaggggctggccagagggtctgctccctggacagataggaaggaggaggagcagctggggctgggggcacagtctgggcattctgtggg

SEQ ID NO: 124085 - DNA, 438 bp, Homo sapiens
  misc_feature (1)...(438): n = a,t,c or g
aaccggtntcaccntgaatgacatccggaaaatttgagcggaatcgaaaacccccaagattcagggccccatgtgtgaccttgttcttgntcagatccacagccaacagaacggcggctcgaatcagcaancgggcgtgagctgtcagtttgggcctgacgtcaccaaggccttcttggaagagaagcagctaggaatgatgtgaggtgacgggcggggcgcctgcatcccagggcccctccaatcccaccggacccagccctgggctagggcagagcaggccccccccagggcaatgttggacccccttttactttgtaaagtttgtatttattcccctcctanntcgcatggtggggctaggctgggctcacccccctccccagctattttatgtctgtaattaaatatgttaaaataaagtcattatcggaagtc

SEQ ID NO: 124086 - DNA, 278 bp, Homo sapiens
  misc_feature (1)...(278): n = a,t,c or g
gaacaaagcctcctacatccacctccagggctctgactacggcctcagttccaccagttcacagcagtgcctcatcccaacgtcaangccatgcctatgccaacacgctcttagggccccgccataggaagacccccagagagagggtcagcaggggggccccgcctgcgcctcccctcctatagccccatggtggggctaggctggggctcacccccctccccagctattttatgtctgtaattaaatatgttaaaataaagtcattatcggaagtc

SEQ ID NO: 124087 - DNA, 335 bp, Homo sapiens
ttgacttccgataatgactttattttaacatatttaattacagacataaaatagctggggaggggggtgagccccagcctagcccttgcttgagtgggggaggagccatgcaaatgaggggggcagggcagccactcggccccaccccaccccgaggacggcctccccacagaatgcccaggctgtgcccccagccccagctgctccacctccttcttctctgtccagggagcagaccctctggccagcccctgactctgcccctaccccctctgcaaacctaaaggggaataaatacaaactttacaaagtaaaagggggtccaacattgccct

SEQ ID NO: 124088 - DNA, 373 bp, Homo sapiens
ctcacccttttcggcttaaagctcctgtacccagagggtctgctcactggacagagaggaaggaggtggagcagctgggtctgggggcacagcctgcgcattctgtggggagcccgtcctcggggtgggatggggccgagtggctgccctgcccccctcatttgcatggctcgtcccccactcaagcaatagggccccgccataggaagacccccagagagagggtcagcaggggggccccgcctgcgcctcccctcctatagccccatggtggggctaggctggggctcacccccctccccagctattttatgtctgtaattaaatatgttaaaataaagtcattatcggaagtcaaaaaaaaaaaaaaaaa

SEQ ID NO: 124089 - DNA, 279 bp, Homo sapiens
atgaaccagatctacggtttcgagggtgaggtgaaggccaagtacacagcccagatgtacgagctctttagcgaggtgttcgagtggctcccgttggcccagtgcatcaacggcaaagtgacctgcaggcacgagtgaagatcgtgaagcagaaggcctttgagcgggccatcgcaggcgacgagcacaagcgctccgtggtggactcgctggacatcgagagcatgaggcgctccatccgcagcccaaagctccgtctcatgattcccaatgggcgag

SEQ ID NO: 124090 - DNA, 194 bp, Homo sapiens
  misc_feature (1)...(194): n = a,t,c or g
aggaggggaggcgcagcggggccccctgctgaccctctctctgggggtcttcctatggcggggcctattgcttgagtgggggaggagccatgcaaatgaggggggcagagaagacggtgacacagcggcctccgtgagccacctcgtagccctcgnccttgacttcgtggctncggatgatatagtccaggttg

SEQ ID NO: 124091 - DNA, 571 bp, Homo sapiens
  misc_feature (1)...(57): n = a,t,c or g
ggcctcgtgccatctccaagctgagcacgctcgtggaaaccacactcaaattgacagagaagattacagtatgtggggacacccatggccagttctatgacctcctcaacatattcgagctcaancccatgtccatgctggatgtcccctgcccaacacccacccaggctgggctgtggggtcagcacctggccgggccaggaggtggcctgtgagtgaccacccccggggaggtggacgagtccctaatgtttccctcgctccccaccagggcccatgtgtgacctgctctggtcagatccacagccacagaacgggcgctcgatcagcaagcggggcgtgagctgtcagtttgggcctgacgtcaccaaggccttcttggaagagaacaacctggactatatcatccgcagccacgaagtcaaggccgagggctacgaggtggctcacggaggccgctgtgtcaccgtcttctctgcccccaactactgcgaccagatggggaacaaagcctcctacatccacctccagggctctgacctacggcctcagttccaccagttcacagcag

SEQ ID NO: 124092 - DNA, 422 bp, Homo sapiens
gcagaaagaacctggtggcaaagttccagaggttagcggagcctagcatggaggcggtggtcaaggtgaagccccacgacaaggatgccaaaatgaaataccaggagtgcaacaagatcgtgaagcagaaggcctttgagcgggccatcgcaggcgacgagcacaagcgctccgtggtggactcgctggacatcgagagcatgaggcgctccatccgcagcccaaagctccgtctcatgattcccaatgggcgagtggccgtggtcgctgactctcgtgtctcccctgttcacatgccagccatcgagggtgagtacagcggacccaagcttgaggacgacaaagtgacaatcaccttcatgaaggggctcatgcagtggtacaaggaccagaagaaactgcaccagaaatgcgcctaccag

SEQ ID NO: 124093 - DNA, 1090 bp, Homo sapiens
cagattctggtacaggtcaaataggtcctctccaagatgagcacgctcgtggcaaccacactcaaacaggtgcgcgttgtggggcagtgcgagaagggccagcaggggtgggctctctggctggggagggcccacagagctcaggaacttacggatccacctccctctctccctcacaccccacccctgtgcctttcctcctgaatatcccatttctctcctggcctcttggtcttcgtttgtgttccctgcgtgtgtctcgtgcatgattcttcttggtctactgtgaactcttacccttcccctcacctctgccccctccccacgtctctctctcggcccctccctctccggtggcctcttttctttcagacagagaagattacagtatgtggggacacccatggccagttctatgacctcctcaacatattcgagctcaacggtttaccctcggagaccaacccctatatatttaatggtgactttgtggaccgaggctccttctctgtagaagtgatcctcacccttttcggcttcaagctcctgtacccagatcactttcacctccttcgaggcaaccacgagacagacaacatgaaccagatctacggtttcgagggtgaggtgaaggccaagtacacagcccagatgtacgagctctttaggcgaggtgttcgagtgggctcccgttgggcccagtgcatcaacgggcaaagtgctgattcattgcacggagggcccacgcgggccattgagctggacaagaagtacatcaagggttattaccgccgggctgccagcaacatggcactgggcaagttccgggccgcgctgcgagactacgagacggtggtcaaggtgaagccccatgacaaggatgccaaaatgaaataccaggagtgcaacaagatcgtgaagcagaaggcctttgagcgggccatcgcgggcgacgagcacaagcgctccgtggtggactcactggacatcgagagcatgaccattgaggatgagtacagcggacccaagcttgaagacggcaaagtgacaatcagtttcatgaaggagctcatgcagtggtacaaggacc

SEQ ID NO: 124094 - DNA, 2145 bp, Homo sapiens
atggcgatggcggagggcgagaggactgagtgtgctgagcccccccgggacgaacccccggctgatggagctctgaagcgggcagaggagctcaagactcaggccaatgactacttcaaagccaaggactacgagaacgccatcaagttctacagccaggccatcgagctgaaccccagcaatgccatctactatggcaaccgcagcctggcctacctgcgcactgagtgctatggctacgcgctgggagacgccacgcgggccattgagctggacaagaagtacatcaagggttattaccgccgggctgccagcaacatggcactgggcaagttccgggccgcgctgcgagactacgagacgggaggggcaaccagggagctgggagccgcgagtctgcagttggtcgcggggctgagaagcacgagtctgcagtcggtggagccagctcagacactgtcctggctgttggccgctggcctggggtggagggtggacttcaggccagaaaatggtgacaagaggagtggccgcctccggatggctgtggctgtgatgacatggttgagtaaaggtcacgagctgcagggctcagtaatgagtaaccaaggacagtcggtgttgggttggggcagggctccagctatcacactggtccacgacactgatggcattttactaattggacctagtgagcatgaagcagctactctgtacttattggtggtcaaggtgaagccccatgacaaggatgccaaaatgaaataccaggagtgcaacaagatcgtgaagcagaaggcctttgagcgggccatcgcgggcgacgagcacaagcgctccgtggtggactcgctggacatcgagagcatgaccattgaggatgagtacagcggacccaagcttgaagacggcaaagtgacaatcagtttcatgaaggagctcatgcagtggtacaaggaccagaagaaactgcaccggaaatgtgcctaccagattctggtacaggtcaaagaggtcctctccaagctgagcacgctcgtggaaaccacactcaaagagacagagaagattacagtatgtggggacacccatggccagttctatgacctcctcaacatattcgagctcaacggtttaccctcggagaccaacccctatgtatccttctcagcagagccaccctctccccacctccacccccagccgcagcctcaggtctgcacagagtgggaggagcccttgccaggaaaagacgtgaccttggaaaggagaggcctggccatgctggggcaccaaggacagatatttaatggtgactttgtggaccgaggctccttctctgtagaagtgatcctcacccttttcggcttcaagctcctgtacccagatcactttcacctccttcgaggcaaccacgagacagacaacatgaaccagatctacggtttcgagggtgaggtgaaggccaagtacacagcccagatgtacgagctctttagcgaggtgttcgagtggctcccgttggcccagtgcatcaacggcaaagtgctgatcatgcacggaggcctgttcagtgaagacggtgtcaccctggatgacatccggaaaattgagcggaatcgacaacccccagattcagccctgcctcggaggatgggctttgtgcccttggcaagaaacagcgggtctgagcctcagtttcctcacctgcgacttgggccagtgcacctccttcatggggctgtgatggcaagcacggtcgtgaccatggtgcggggtgaaggcacggtgaccgccgagcacacctgtccttatttatttaacgggcgctcgatcagcaagcggggcgtgagctgtcagtttgggcctgacgtcaccaaggccttcttggaagagaacaacctggactatatcatccgcagccacgaagtcaaggccgagggctacgaggtggctcacggaggccgctgtgtcaccgtcttctctgcccccaactactgcgaccagatggggaacaaagcctcctacatccacctccagggctctgacctacggcctcagttccaccagttcacagcagtgcctcatcccaacgtcaagcccatggcctatgccaacacgctgctgcagctaggaatgatgtga

SEQ ID NO: 124095 - DNA, 3702 bp, Homo sapiens
gcaccgccccgtaattcccgggtcgacgattccgtgcggagggcgagaggactgagtgtgctgagcccccccgggacgaacccccggctgatggagctctgaagcgggcagaggagctcaagactcaggccaatgactacttcaaagccaaggactacgagaacgccatcaagttctacagccaggccatcgagctgaaccccagcaatgccatctactatggcaaccgcagcctggtctacctgcgcactgagtgctatggctactcgctgtgagacgccacgcgggccattgagctggacaagaagtacatcatgggctattaccgccgggcctgccagcaacatggcactgggcaagttccgggccgcgctgcgagactacgagacggtggtcaaggtgaagccccatgacaaggatgccaaaatgaaataccaggagtgcaacaaagatcgtgaagccaaaagcctttgagcgggccatcgcgggcgacgagcacaagcgctccgtggtggactcgctggacatcgagagcatgaccattgaggatgagtacagctgacccaagcttgaagacggcaaagtgacaatcagtttcatgaaggagctcatgcagtggtacaaggaccagaagaaactgcaccggaaatgtgcctaccagattctggtacaggtcaaagaggtcctctccaagctgagcacgctcgtggaaaccacactcaaagagacagagaagattacagtatgtggggacacccatggccagttctatgacctcctcaacatattcgagctcaacggtttaccctcggagaccaacccctatatatttaatggtgactttgtggaccgaggctccttctctgtagaagtgatcctcacccttttcggcttcaagctcctgtacccagatcactttcacctccttcgaggcaaccacgcagacagacaacatgaaccagatctacggtttcgagggtgaggtgaaggccaagtacacagcccagatgtacgagctctttagcgaggtgttcgagtggctcccgttggcccagtgcatcaacggcaaagtgctgatcatgcacggaggcctgttcagtgaagacggtgtcaccctggatgacatccggaaaattgagcggaatcgacaacccccagattcagggcccatgtgtggacctgctctggtcagatccacagccacagaacgggcgctcgatcagcaagcggggcgtgacgtgtcagtttgggcctgacgtcaccaaggccttcttggaagagaacaacctggactatatcatccgcagccacgaagtcaaggccgagggctacgaggtggctcacggaggccgctgtgtcaccgtcttctctgcccccaactactgcgaccagatggggaacaaagcctcctaacatccacctccaggggctctgacctacggccttcagttccaccagtttcacagcagtgccttcatcccaacgtcaaggcccatggcctatgccaacacgctgtctgcagcttagggaattgatgtgaggtgacggggcgggggcggccttgcattcccaggggcccctccaatcccacgggacccaggccctgggctaaggggcagagcaaggccccgccccagggcaagtgttgggaccccctttttactttggtaaagtttttgtatttattccccctttaggtttgcagagggggtaggggcaagagtcaggggcttggcaagagggtctgctcccctggacagagaggaaggaggtggagcagctggtggctgggggcacagcgtgggcattctggtggggaggccgtcctcggggatggggtggggccgaagtgcctgccctgcccccctcaattggatgggtccttcccccattcaagcaatagggccccgccataggaagacccccagagagagggtcagcaggggggccccgcctgcgcctcccctcctatagccccatggtgggggtagggctggggctcacccccctccccaagctattttatgtcttgtaattaaatatgttaaaataaaagtcattatcggaagtgtgaagccccatgacaaggatgccaaaatgaaataccaggagtgcaacaagatcgtgaagcagaaggcctttgagcgggccatcgcgggcgacgagcacaagcgctccgtggtggactcgctggacatcgagagcatgaccattgaggatgagtacagcggacccaagcttgaagacggcaaagtgacaatcagtttcatgaaggagctcatgcagtggtacaaggaccagaagaaactgcaccggaaatgtgcctaccagattctggtacaggtcaaagaggtcctctccaagctgagcacgctcgtggaaaccacactcaaagagacagagaagattacagtatgtggggacacccatggccagttctatgacctcctcaacatattcgagctcaacggtttaccctcggagaccaacccctatatatttaatggtgactttgtggaccgaggctccttctctgtagaagtgatcctcacccttttcggcttcaagctcctgtacccagatcactttcacctccttcgaggcaaccacgagacagacaacatgaaccagatctacggtttcgagggtgaggtgaaggccaagtacacagcccagatgtacgagctctttagcgaggtgttcgagtggctcccgttggcccagtgcatcaacggcaaagtgctgatcatgcacggaggcctgttcagtgaagacggtgtcaccctggatgacatccggaaaattgagcggaatcgacaacccccagattcagggcccatgtgtgacctgctctggtcagatccacagccacagaacgggcgctcgatcagcaagcggggcgtgagctgtcagtttgggcctgacgtcaccaaggccttcttggaagagaacaacctggactatatcatccgcagccacgaagtcaaggccgagggctacgaggtggctcacggaggccgctgtgtcaccgtcttctctgcccccaactactgcgaccagatggggaacaaagcctcctacatccacctccagggctctgacctacggcctcagttccaccagttcacagcagtgcctcatcccaacgtcaagcccatggcctatgccaacacgctgctgcagctaggaatgatgtgaggtgacgggcggggcggcctgcatcccagggcccctccaatcccaccggacccaggccctgggctaggggcagagcaggccccgccccagggcaatgttggacccccttttactttgtaaagtttgtatttattcccctttaggtttgcagagggggtaggggcagagtcaggggctggccagagggtctgctccctggacagagaggaaggaggtggagcagctggggctgggggcacagcctgggcattctgtggggaggccgtcctcggggtggggtggggccgagtggctgccctgcccccctcatttgcatggctcctcccccactcaagcaatagggccccgccataggaagacccccagagagagggtcagcaggggggccccgcctgcgcctcccctcctatagccccatggtggggctaggctggggctcacccccctccccagctattttatgtctgtaattaaatatgttaaaataaagtcattatcggaagt

SEQ ID NO: 124096 - DNA, 207 bp, Homo sapiens
agaaagtaaagtgaagatagtattaaccacacccgcgctgatggtggcatagatgggctgttgaacacctgcatccttgaagattcctgttgagtaatagaacaccttgttagccaagatggtctcgatttcctgacctcgtgatctgcccgcctcggcctcccaaagtgctgggattacaggcgtgagccaccgcgcccggtgcat

SEQ ID NO: 124097 - DNA, 602 bp, Homo sapiens
agaatagagggggagcttgcaggaaccagcaatgataaggtcaggaaaagaaagagctgaaaatggagaaaaccagagttagaactgttggatacaggagaagaaacagcagctccactaccgacccccccccaggtttgatgtccttccaagaataaagtctttccctggggaaggtctctcgctctgtctttccagcatccactctcccttgtccttctgggggtgtatcacagtcagccagtggcttcttcatgatggtggttggggtggttgtcatgtgacgggtcccctccaggttactaaagggtgcatgtcccctgcttgaaccctgagaggcaggtggtaggccatggccacaatccccagctgaggagcaggtgtccctgagaacccaaacttcccagagagtatctgagaaccaaccaatgaaaacagtcccatcgctcttagccggtaagtaaacagtcagaagattagcatgaaagcagtttagcattgggaggaagcacagatctctagagctgtcctgtcgctgcccaggattgacctgtgtgtaagtcccaataaactcccctactccccaaaaaaaaaaaaaaaaa

SEQ ID NO: 124098 - DNA, 1310 bp, Homo sapiens
gagatggagtctcgctctatcgcccaggatggagtgcagtggctcaatctcggctcactgcaaactccgcctcccgggttcacaccattctccggcctcagtctcccgagtagctgggactacaggcacctgccaccacgcccggctaatttttttgtattttcactggagacggggtttcactgtgttagccacgatggtctccatctcctgacctcgtgatctgcccacctcggcctcccaaagtgctgggattacaggcgtgagccaccgcgcctggccaaaatgcagacattttattagggggataaggagggcaaggtaaagcttatggaactgagtgttagtgactttggcatttgtgtagctgagcacagcaagggaggggttaatgcagatggcaagtgcaccaaggagaaggcaggaacactggagcctgcaataagggaggagaggggactggagagtgtggggaatgggaagaagtagtttactttggactaaagaatatattggggggaggaatagaggggaggtgtgcaggaaccagcaatgagaaggccaggaaaagaaagagctgaaaatgcagaaagccgaagagttagaacttttggatacagcagaagaaacagcggctccactaccgacccccccccccaggtttgatgtccttccaagaataaagtctttccctgggtgatggtctctcgctctgtctttccagcatccactctcccttgtccttctgggggtgtatcacagtcagccagtggcttcttcatgatggtggttggggtggttgtcatgtgacgggtcccctccaggttactaaagggtgcatgtcccctgcttgaacccaagctggacttgttcgagtcattctttggtctctcagctccttctaagctttgggggccatcagtctcaagtttttctcgtaatggtggtgatggtggttgtgatggcagcagagtggtgggggccttggcaagtggtcggtgctcttccagaccaggggacaccgatggaccgatgaagttccaggggaacttgaagtgctgcttccaaccctctaatggcttcccattactcttagcacaaagatgtaggccatgatgctgcctaaagtagcctgttgtggcctggggtccttccaatctcctatgcacgttgagtcctccttcttctttgtcataccaagtcatttctgaatttttggcgtcacaacgaagtggccagcatttacttgagggtggctcatccagccctgggcacagctggcatcccagcctgctgctggagcaaaccat

SEQ ID NO: 124099 - DNA, 1921 bp, Homo sapiens
  misc_feature (1)...(1921): n = a,t,c or g
gcgcggacgcgtgggcgtggccacactgctgactgtgctgctgtaatgcctgggctttgctggcgtcctctttggctggccttcactagtgtttgtcttcaagaatgaagattactttaaggatctgtgtggaccagatgctgggccgattggcaatgccacagggcaggctgactgcaaagcccaggatgagaggttctcactcatcttcaccctggggtccttcatgaacaacttcatgacattccccactggctacatctttgaccggttcaagaccaccgtggcacgcctcatagccatatttttctacaccaccgccacactcatcatagccttcacctctgcaggctcagccgtgctgctcttcctggccatgccaatgctcaccattgggggaatcctgtttctcatcaccaacctgcagattgggaacctatttggccaacaccgttcgaccatcatcactctgtacaatggagcatttgactcttcctcggcagtcttccttattattaagcttctttatgaaaaaggcatcagcctcagggcctccttcatcttcatctctgtctgcagtacctggcatgtagcacgcactttcctcctgatgccccgggggcacatcccatacccaccgccccccaactacagctatggcctgtgccctgggaatggcaccacaaaggaagagaaggaaatagctgagcatgaaaacagggagctacagtcaaaggagttccttttaagcgaagggaagagaccccagggcaagggcagaagcaggaactccgctccttctggagctacggntttctctcgggcgctttagcctgggnacctggtgtgggcttgtctgtgatacagttgtggcactacctctttcattggcactctcaactccttgctgaccaacatggccggtggggacatggcacgagtcagcacctacacaaatgcctttgccttcactcagttcggagtgctgtgtgccccctggaatggcctgctcatggaccggcttaaacagaagtaccagaaagaagcaagaaagacagggtcttttaacatccgaggaccacattctttatactttccaaatcatcacctgccccatgcaacttacagggataaagccaagatgaaactccccttacttctggctcttctatttggggcagtttctgctcttcatctaaggtctgagacttccacctttgagacccctttgggtgctaagacgctgcctgaggatgaggagacaccagagcaggagatggaggagaccccttgcagggagctggaggaagaggaggagtggggctctggaagtgaagatgcctccaagaaagatggggctgttgagtctatctcagtgccagatatggtggacaaaaaccttacgtgtcctgaggaagaggacacggtaaaagtggtgggcatccctgggtgccagacctgccgctacctcctggtgagaagtcttcagacgtttagtcaagcttggtttacttgccggaggtgctacaggggcaacctggtttccatccacaacttcaatattaattatcgaatccagtgttctgtcagcgcgctcaaccagggtcaagtctggattggaggcaggatcacaggctcgggtcgctgcagacgctttcagtgggttgacggcagccgctggaactttgcgtactgggctgctcaccagccctggacccgcggtggtcactgcgtggccctgtgtacccgaggaggctactggcgtcgagcccactgcctcagaagacttcctttcatctgttcctactgagctggtcccagccagcagttcagagctgccctctcctgggcagctgcctcccctcctctgcttgccatccctccctccacctccctgcaataaaatgggttttactgaaaa

SEQ ID NO: 124100 - DNA, 2316 bp, Homo sapiens
  misc_feature (1)...(2316): n = a,t,c or g
atgaaaagaggaaatggatccaggagaaggagacgactcctgagtgaaaacaacggggtttttcacattgagagctttgcccaacaccccaaagatgaaaagagcaggaaactgctggggccgattgaacactggacttttgttgtggaaaaaggcaaagggaagccggaagagactggaacagtttccatggtgctggaggatggggaagtggaggctgacattaagcagggatctgtcgtggggtgctgcaatgttcctccagatgctgcacgggagagggcagaaaaggcctatatggatggagaacagccaactttaatcttacttctctgggatttgaaaaagcaaattcctgttcataaaggtacccacagtgtgggacgtcatcaaacagagcttcttcctaataacggcggcggtgttgtaagatttttctacaccaccgccacactcatcatagccttcacctctgcaggctcagccgtgctgctcttcctggccatgccaatgctcaccattgggggaatcctgtttctcatcaccaacctgcagattgggaacctatttggccaacaccgttcgaccatcatcactctgtacaatggagcatttgactcttcctcggcagtcttccttattattaagcttctttatgaaaaaggcatcagcctcagggcctccttcatcttcatctctgtctgcagtacctggcatgtagcacgcactttcctcctgatgccccgggggcacatcccatacccactgccccccaactacagctatggcctgtgccctgggaatggcaccacaaaggaagagaaggaaacagctgagcatgaaaacagggagctacagtcaaaggagttcctttcagcgaaggaagtcagcacctacacaaatgcctttgccttcactcagttcggagtgctgtgtgccccctggaatggcctgctcatggaccggcttaaacagaagtaccagaaggaagcaagaaagacaggttcctccactttggcggtggccctctgctcgacggtgccttcgctggccctgacatccctgctgtgcctgggcttcgccctctgtgcctcagtccccatcctccctctccagtacctcaccttcatcctgcaagtgatcagccgctccttcctctatgggagcaacgcggcgcttcctcacccttgctttcccttcagagcactttggcaagctctttgggctggtgatggccttgtcggctcgtggtgtctctgctccagttccccatcttcaccctcatcaaaggctcccttcagaatgacccattttaacgtgaatgtgatgttcatgcttgccattcttctgacatttcttccacccctttctggtatatcgggaatgccgtacttggaaagaaagtccctctggcnattgcatagttcagaagccctcactttttcagccccgaggatggtttttgttcatctttccaccacctttggaggaccttgtgtcccaaaagactttggcctatcccagcaaaacacacacacacacacacacacacacaaaataaagacacacaaggacgtctggcgcagcaagaaaagaatctcagttgccaagcagatttgatatcacacaggactcaaagcaaagggcatgtggaacttctttatttcaaaacagaagtgtctcctttgcacttaagccttggcagacccttgactccaggggagatgacctgggagaaggaagtgcgacaactatttctttacgcctgtttggctcccaaacccatatgtgcctggaacctctgccacgggttaaattttcaggtgaagagtgaaggttgtcatgggcctcagctatgcttcctgggctctccctcaagagtgccagccttgggtaaggagaactcacagctctggggaaaaagagggagcagacagggttccctggggccccagtctccagcccagcccactgatgctggattgacctttgcccttgaccctggtctggttcttcagaattcaatttttcccatctgtaaaattgagatgaattttggtgttgaaaggttcttcctggagcagatgtcctagaaggttttttagggaatagtgacagagtcaggccaccccaagggccatgggagccaagctaacatgatttgaccgaaagattttctgacagactatctttngggggatgttttcaagaagggatataagttatttacttttngggcatttaaaagaaaatttctctcgggaataattttatagaaaaataaagcttctgtgtctaaggcaaaaaaaaaaaaaa

SEQ ID NO: 124101 - DNA, 454 bp, Homo sapiens
ggttaaggcatggaacctggggcatcagagttctgtgtagcagggaagagtcctaccccaggcagctttgctgtgctacgagcatcaccatggctgattctacctttcagtgctcttaattgtgtctggcctttgccctggaccccctaattcctgtagaaatcccaatctgttggtcacctcttacttcctggaagaactaaatctaagctgcaggttgccctgaagcacccctccctgggctgggtacttctccccatggggtggggggtccccatccctctaattgctccttctggaatctgttacctttagttgaaaggagacgaaggttcaacatcaatgaccgcatcaagggagtgggattgctgatccccaaggccaatgacctgtgagcaggtttctgagggggagggtgatgggtctgggtgggcagcagctgacaagtattatc

SEQ ID NO: 124102 - DNA, 1686 bp, Homo sapiens
cgcatgcagcaacaggctgtcatgcattacatgcagcagcagcagcagcagcaacagcagcagctcggagggccgcccaccccggccatcaatacccccgtccacttccagtcgccaccacctgtgcctggggaggtgttgaaggtagggcctgttctggcctgccccccaccctgtccccactagtcccagcctcccctagagcccttgccttacctgtccgagacctatgggaacaagtttgctgcccacatcagcccagcccagggctctccgaaacccccaccagccgcctccccaggggtgcgagctggacacgtgctgtcctcctccgctggcaacagtgctcccaatagccccatggccatgctgcacattggctccaaccctgagagggaggtgagtgaggagctggccagtggccatgctgcttgcagagctcgtgcccactgctgtgcttctgagactatgcccaacacggtactcctggctagggtggggtgggtgtgcaagggttctagggaggggggcacccactgtggctctgagcctggagagagtggagtcaccagcagctcctgccctgcggacctgacccagaagcgagagctcacaggtactgcctccctctacccctgtgcctttgaatacccgactcctccctccttttctccctccctcccagccgcccctctccctgcctccctcttccttgttctcacctgggctggctaaaaagccaatgacctgtgagcaggtttctgagggggagggtgatgggtctgggtgggcagcagctgacaagtattatctgccctcctgcaaaagtccagggagctggagaaccactctcgccgcctggagatgaccaacaagcagctctggctccgtatccaggtctggtcctgaacttggacttctttggtaactctgacccttaacctggctcctggccctaaggggcagtactttaggatgttttgctttggtaacaaacaatcctcagcatctttaagcaacacatatcagctggaggttctgttctgtgagaccctcattctggcacccacgctgctggcacccagctctctgatggcacatctagagctggctcttaaagccattgtcactcttaaggtgccacatgtcacttctgttcaatgggcttggccaatgcaagcacactctacaagtactctaacctcactggcccagcaggtggtgaagcaggagctgcctagcgaagagggcccaggggaggccctgatgctgggggctgaggtccctgaccctgagccactgccagctctgcccccgcaagccccgctgcccctgcccacccagccaccatccccattccatcacctggacttcagccacagcctgagctttgggggcagggaggacgagggtcccccgggctaccccgaacccctggcgccggggcatggctccccattccccagcctgtccaagaaggatctggacctcatgctcctggacgactcactgctaccgctggcctctgatccacttctgtccaccatgtcccccgaggcctccaaggccagcagccgccggagcagcttcagcatggaggagggcgatgtgctgtgaccctggctgcccctgtgccagggaacaggggccggcctgggggctgggagggccaggggcacctccctc

SEQ ID NO: 124103 - DNA, 2405 bp, Homo sapiens
ggtggagtgacagccggagcccgggcgccggcgcggggctcggtgacagcggaggcggcggcccgggcgggacgagggagcggccgcggcgccgacggcgggcgggaagggcggacggggcgggcctccctggtggcacggggccggagcaggccgggagcaggtggcgggcacagcttgcgggccaggcacccgaacttgcgacaagttgccggagccgcggggcgcgggcggcggacagattgaccttcagagcgagggagccagcgccggcagccaccatggcgtcacgcatagggttgcgcatgcagctcatgcgggagcaggcgcagcaggaggagcaacgggagcgcatgcagcaacaggctgtcatgcattacatgcagcagcagcagcagcagcaacagcagcagctcggagggccgcccaccccggccatcaatacccccgtccacttccagtcgccaccacctgtgcctggggaggtgttgaaggtgcagtcctacctggagaatcccacatcctaccatctgcagcagtcgcagcatcagaaggtgcgggagtacctgtccgagacctatggaaacaagtttgctgctgcccacatcagcccagcccagggctctccgaaacccccaccagccgcctccccaggggtgcgagctggacacgtgctgtcctcctccgctggcaacagtgctcccaataagccccatggccatgctgcacattggctccaaccctgagagggagttggatgatgtcattgacaacattatgcgtctggacgatgtctcttggctacatcaatcctgaaatgcagatgcccaacacggtactcctggctaggctacccctgtccagcagccacctgaatgtgtacagcagcgacccccaggtcacagcctccctggtgggcgtcaccagcagctcctgccctgcggacctgacccagaagcgagagctcacagatgctgagagcagggccctggccaaggagcggcagaagaaagacaatcacaacttaattgaaaggagacgaaggttcaacatcaatgaccgcatcaaggagttgggaatgctgatccccaaggccaatgacctggacgtgcgctggaacaagggcaccatcctcaaggcctctgtggattacatccggaggatgcagaaggacctgcaaaagtccagggagctggagaaccactctcgccgcctggagatgaccaacaagcagctctggctccgtatccaggagctggagatgcaggctcgagtgcacggcctccctaccacctccccgtccggcatgaacatggctgagctggcccagcaggtggttgaagcaggagctgcctagcgaagagggcccaggggaggccttgatgctgggggcttgagggtcctggaccctgagccactgccagctctgcaccggcaagccccgttgcccttgcccacccaagcaccgtccccatttcattcaactgggatttcagccacagccttgagctttggtgggcagggtggacgactggtccccggggctaccccgaacccctggcgccggggcatggctccccattccccagcctgtccaagaaggatctggacctcatgctcctggacgactcactgctaccgctggcctctgatccacttctgtccaccatgtcccccgaggcctccaaggccagcagccgccggagcagcttcagcatggaggagggcgatgtgctgtgaccctggctgcccctgtgccagggaacaggggccggcctgggggctgggaagggccaggggcacctccctcccacccttcaggctgcactgtgtgtgaagtagccacctgccctgcctccctcctccccgttggcccctgtttggacttagtgcctgtctggcagcctgtggggtcaggagaagcacccccagggcagccctcttgactggcgcagtgggaagaggccttcagcccctctcccggagatggaatcgcggggcagggaggggcagggtgttctagaggtgagaagagggcctggtggagattccctgtcttctgagcccgagcccctcattaccagtgagaggacatgcttgaggggttcgggaagctcctcatctgaggcaactggtccctgggggtgctcaggcctgccctttttgggactcagatggcaggaggtccaccccgcagcctggtcctcggctctcccacaggtgggcaccccccactttggtgctaatagctctccaccaggtggtgtgagcgcgggggctgccagaagcgggaggggtcactgccggaagagcaggctgccctccgacccctcactttgtgcctttagtaaacactgtgctttgtaaaaaaaaaaaaaaaaaaattcctgcggccgcaagcttat

SEQ ID NO: 124104 - DNA, 405 bp, Homo sapiens
aacaccacttgctccaccacctaaacctgttcgaagaagattaaaatccagaagatgaattaaggccagaagttgatgaacatacacaaaagacgggtgtcttagctgctgttcttgcatcacaaccttctattcccaggatgttcttgaggagagaatttccctggaagttcaactggaacaacttcgaccattctctcacctataagccaattgccgttaactgaacatacttgtttttaagtggttttgggttcaaagccaatttggagacctagacattcagctcactgcttaactcaacattaaattttatgattctgttttgccctatatgttcaccgttgtatttaagtatcttttattttttaatttcgacaataaaaaggtcaggatggcgtttta

SEQ ID NO: 124105 - DNA, 438 bp, Homo sapiens
tttcgtggagcgggtcccgggatgtgaccggggctctgcttgtggctgcggcggtggcttctgaggctgtcgggtctttgcgggttgcggaagggggccccaatacccttcttcttcaggtatgtaggggaagcaaaggaacctccgcaacctgcccctttaggcccttcccaccactctggtcactgctgggtactgggcggtgaagggtcatcgcttcggtagattggggaaggggaatgaggtgatgtcaagagggatgcccagtggtactgcttggaggcaagacctggcacttaaaaccactgtgtgaataagtaactatgagcagtttacttattatgccttctctaaaacattctttgctgtttgatatacaggaagggtttcagtgctcttgtgacagatgtaattttccaaaaacgaggaaatcgcgag

SEQ ID NO: 124106 - DNA, 495 bp, Homo sapiens
atgccgagggcggagccaagagcgacactgggggagcaggaaaaggcggggcttccgcttggggcatggaggctgtacctcttacgtcacttccgtaaacaaacggagctgcggaggagcgggtcccgggatgtgaccggggctctgcttgtggctgcggcggtggcttctgaggctgtcgggtctttgcgggttgcggaagggggccccaatacccttttttttcaggtcttaagaagctggccgtggtgcaataaggaacttaaaacaatggaagagcggaaagtgaagaggaggagtcctaagtcttttagtgcccactgtactcaggttgtcaatgccaaaaaaaatgccattccaaagggacataaccaaagacaagagaagatttggaagaagtattccaatgagtaccaaatgataaacagcagttttgaggatttccttcgaataaattatcagaatggggtttttgtcatggaagagtttaattag

SEQ ID NO: 124107 - DNA, 3275 bp, Homo sapiens
gaaacaaacggagctgcggaggagcgggtctcgggatgtgaccggggctttgcttgtggctgcggcggtggcttctgaggctgtcgggtctttgcgggttgcggaagggggccccaatacccttcttcttcaggtcttaagaaggctggaccgtggtgcaataaggccactcaaacaatggaagagcggaaagtgaagaggaggagtcctaagtcttttagtgcccactgtactcaggttgtcaatgtccaaaaaaaaatgtccattccagtgtagtaaaagtcacagggttttcaaatcctgcatcacaagtcaacttcacaagccgaccaaaagttaaaaaagaagtgatgaaaagaaaagaccaaacctcaagggttggaagaagggcaaaggcactccagtcaactcccgatccaacactccttcctcacttgatgtctccagatgttccaggaagatggagagagggctgctcagtctttttgaatgatttccactcctggaaaactttcaaacattttggaaattgaatgttccatttgaacagatggaacatgtttccggggaattgcaggagaaattagctcgcttgaatttggagctctatggggagttagaggaacttcctgaggataagagaaaaacagccagtgactcccaatctggataggcttctgtcagattgcagagaaatgataccagcattccgaactttcctgaagaggcatgataagaccattgttaccaaaatgctgagcctgccagagctgctgctgtacccatcccgaagatttgaagaataccttaatcttctctacgctgtcaggcttcatacccctgcagagcatgttgaccgtggggacttgaccactgcaattgaccaaatcaaaaaatataaaggttatatagatcagactctatcagaagtaaacagatatctgattagggtacaagatgtagcccaacttcattgctgtgatgaagaaataagtttctctttaagtgtggcctgcagatctgtggactcagcatcaccagagagcttgccagaaatgcagaattctcaggccaccctagctctactcaatcagaatttgcattttaacaaaatcaccaggctctatgaacacatccatgatctcagccttttcctcttcaatgatgccctgctcgtttctagtcggggcacatctcacactccatttgagaggacttcaaaaacaacctaccagttcattgcatcagtggcccttcatcggttactcatagaaaatattccagattccaagtatgtcaagaatgcatttattcttcagggtccaaaatataaatggatttgtgctacagaaatagaggatgataagttcctatggctgtcagtacttcgaaatgcaatcaaaagcagtatggagaaggcatgtggccttgtatttacagggcagtttatgtttgacaccatgggtatgaccaacattctaaacaaccaagatactgcgcaagctctggcagatggattgatggagttgtcaaaagaagattctaaatgtggcaaaaagatcaaagatgttgaaggaaatgttattccaacaaaatgtgacccaaagacaacattcagtttattcatgaaggaaagaaatgttgtagaagacaattcttgggacacaaagtccaggctcagcaaaaatgatttaaattttgaagcactgattaatctggagagaatactccagaaggactcagcagaaaagcgagctagagttgtcagagaactcttacagagtgagagaaaatacgtgcagatactggaaattgtgagagatgtttatgtcgcaccactgaaagcagcattgtcatcaaacagagcgattctgagtgctgccaatatccagatcattttctgtgacattctacagattttaagtctcaacaggcagtttctagataacctgagagacagactgcaggaatggggcccagctcactgtgtgggagaaatagtcacgaagtttggaagccagttaaacacatataccaatttcttcaacaattaccctgtcattctgaaaactattgagaagcagtgggagacatttagtgaacgctcttcaagctcacaaactctgacccaatttgattctaacattgcaccagctgatcctgatactgctattgttcatccagttcccattcgtatgactccaagcaaaatccacatgcaggaaatggaacttaaaagaactggcagcgaaagcatggtaccagcatctgcttcttgtgaagcctcaggaaacttagaatcatggcagaaggcaaagtgggagccggtgtgtcacatgagcaaaggcacaacaccacttgctccaccacctaaaacctgttctgaagaagattaaaatcagaagatgaattaaggcccagaagttgatgaacatacacaaaagacgggtgtccttagctgctgttccttgcatcacaaccttcctattccccagatctgttgggaaagataagaaagctattcaggcatcaaattagacgtaataaggaaaccaacaccgttttggcccagattgaaatagcgaattgccagcaacaattaaaggatgttccttgaggagagaatttcccccggaagttccaactggaacaacttcgacccattcctcctcaccctataagcccaattgcccgttaactgtgaacatacttgtttttaagtggttttgggttcaaaagccaatttggagacctagacattcagctcactgcttaactcaacattaaattttatgattctgttttgccctatatgttcaccgttgtatttaagtatcttttattttttaatttcgacaataaaaaggtcaggatgggcgttttctgggagggtaggattgtgtttgttgggcacacccaccttttctgttccctaggcatctgggggatatggcaatgcttctatgggataatacccacacacccaattttaatttatagaatggggctccctcatttacatctcaggtcacaggactcagggaataaatgtcagtttgtccttttatgtttaatattttacataaagcatctataaaaatctttagaaagagtttcccatttaattttgattttaaagaattatattggataaggtggttttcaccataagctaatttactctctgcagccgtctacattcttcacaaatcatgtggtacattgaagcctcttttacatgtcaacttgtgacaaatacaaacatgtgagatttt

SEQ ID NO: 124108 - DNA, 454 bp, Homo sapiens
gctgacgaattcggcacgagagaagattaagaaggcgaatcaacttttaaaagtgaaaagtctggagctggagcagccgccggccagtcagcatcagaaatccatgcacaaagacctggctgccatcttggaagagaagaagcaaggagggcccgccattggacgtcgtaatcgaatggaccgattctccagacttctccgtgtgggccttgccgctttgccaggagcttgctctcggtgctgtgcggaaggaggagcaccttattcacctgccgaaactctcgagcatctttattgaactctctagccggggtctccaggccctgggtcagatttctgcctataaatcacccaaccaggtccagttgctcccatatcttatagcctgtcatagcatgctggccatcttgttccatcagaccttcctcctgatagtctttgagagcaaggaggc

SEQ ID NO: 124109 - DNA, 369 bp, Homo sapiens; identical to SEQ ID NO: 89210

SEQ ID NO: 124110 - DNA, 2561 bp, Homo sapiens
tctagagaggaaggatctccccagctgtcttcagcaaggccgtctcctgcccagagaaatagtcagcctagcagttctaccatgatcagcgtgcttcgagcgggtggagctctcagaaacatctggaccgatcaccagatcaggcaagccttgtttcccagccgacggtccccgcaggagaatgaggatgatgaagatgattatcagatgttcgtgccgtcattttcctcctcagatctgaactctaccagactatgtgaagatagcacttctagtcgcccttgcagctggcatatgggacagatggagtccacagagacctccagctctggtcacaggattgtcaggcgggccagcagtgctggggagagcaacacatgccctcctgaaataggaactagtgacagaactagggaactgcagaacagccccaaaacagaagggcaggaggagatgactccctttgggtcatccatagagttgactattgatgacatagaccatgtctatgataacatcagttatgaggacttaaaactaatggttgctaagcgggaagaagctgaatccactccctctaaatcagccagggactccgttcgccccaagagcaccccagagttagccttcacaaagaggcaagctggccacagtaagggctctctttacgcacaaacagatggcaccctctcaggtggagaggcatccagccaaagcacgcatgaactccaagcggttgaggagaacatctattgacaccatagggctcccagatcctccgtcgctggggtttttaagtgcagcagccttaaagcgttgcaaagcgggacacctttttgggtctggaggccgacttcgtgtgctgtgacagcctgaggccatttgtttcccaagacagcctccagctcagtgaggacgaagccccttaccatcaggccactcccgatcatggttatctgagtttgctgtatgactctcccagtggtaacttgtctatgcctcataagcctgtatctgataaactgtccgaagaagtagatgaaatctggaatgacctggaaaattacatcaagaaaaatgaagacaaggccagagaccgtctcctggcagcgtttcctgtgagcaaggatgatgtgccagacaggctgcacgcagagagcacccctgagctgagccgggacgtggggcgctctgtgtccacgctgtccctgcctgagagccaggctctcctcacgcccgtgaagagcagggctggcagagccagccgcgccaactgcccctttgaggaagacctgatttctaaagaaggctcctttatgagccttaaccggctttctctggctagtgaaatgcccctcatggacaatccctacgacctggccaacagtggcctgtctcaaacagacccagaaaaccctgacctggggatggaggccacagataagacaaaaagcagggtgtttatgatggctcggcagtacagtcagaagattaagaaggcgaatcaacttttaaaagtgaaaagtctggagctggagcagccgccctggctgccatcttggaagagaagaagcaaggagggcccgccattggtatgtgcaccctgcccttcttccttctccaaagtaagaggggagaccacttcctgtgcccactaggctttccgtcagttgacatgatgactccttttctctttcttgtttatctgggcacaggacgtcgtaatcgaatggaccgattctccagacttctccgtgtgggccttgccgctttgccaggagcttgctctcggtgctgtgcggaaggaggagcaccttattcacctgccgaaaaaaagtactcccaggcaattgtccgcagcttgctctgtgccttctcttcaaacctctgaccctctgccaggctctgtgcagagatgcagcgtggtagtaagtcagcccaacaaagagaactggtgtcaggaccatctttacaactccttgggtcggaaagggatcagcgctaaatctcagccttatcacaggtcccagtcatcttcctccgtcttgatcaacaaatcaatggattccatcaactaccctagtgatgtgggaaagcagcagctgctgtctttacacagaagttcaaggtgtgagagtcaccaggacttgctgccagatattgctgactcgcatcaacagggcactgaaaaactctcagatctcacactccaagactcacagaaagttgtggtggtcaatagaaatttacccttaaatgcccaaattgcaacacagaattatttttccaatttcaaagagactgatggagatgaagatgactatgtggaaatcaagtcagaagaagatgagtcggagttggagctatctcacaatcgtagaaggaaatctgactcaaagtttgtggatgctgacttttctgataatgtctgcagcggcaacacattgcattctttgaatagtccgcgcactccaaaaaagccggttaacagcaaacttggcctttcaccatatctgacaccatataatgattctgacaaactgaatgactatctttggagg

SEQ ID NO: 124111 - DNA, 3475 bp, Homo sapiens
ctatgatgtggtgcttgatgctatagacacaatgcagcgagtcgcctggcatatcaatgacatgaagcggaaacacgagcacgcggtccggttacaggagatacagagtttgctcactaactggaaggggccagacctgaccagctacggggaactggtgcttgagggaaccttccgcatccagcgagccaagaatgagcggacgctcttcctcttcgacaagctgctgctcatcacgaagaagagagatgacacgtttacatacaaagctcacatcctgtgtggcaacctcatgcttgtggaggtgattccaaaagagccgctcagcttcagcgtcttccactacaagaatcccaagctgcagcacacagtccaggccaaatcccagcaagacaaacgcctctgggttctgcacctaaagagactgattctggagaaccatgcagccaagattccagctaaggccaagcaagcaatccttgaaatggatgccattcatcatccaggcttctgttacagtcctgagggagggacgaaagcactgttcggctctaaagaaggttctgctccatatcggctgagaagaaaatctgaaccttcctcacggtcacataaagttttgaagaccagtgaaacagcacaagacatccaaaaggtttctagagaggaaggatctccccagctgtcttcagcaaggccgtctcctgcccagagaaatagtcagcctagcagttctaccatgatcagcgtgcttcgagcgggtggagctctcagaaacatctggaccgatcaccagatcaggcaagccttgtttcccagccgacggtccccgcaggagaatgaggatgatgaagatgattatcagatgttcgtgccgtcattttcctcctcagatctgaactctaccagactatgtgaagatagcacttctagtcgcccttgcagctggcatatgggacagatggagtccacagagacctccagctctggtcacaggattgtcaggcgggccagcagtgctggggagagcaacacatgccctcctgaaataggaactagtgacagaactagggaactgcagaacagccccaaaacagaagggcaggaggagatgactccctttgggtcatccatagagttgactattgatgacatagaccatgtctatgataacatcagttatgaggacttaaaactaatggttgctaagcgggaagaagctgaatccactccctctaaatcagccagggactccgttcgccccaagagcaccccagagttagccttcacaaagaggcaagctggccacagtaagggctctctttacgcacaaacagatggcaccctctcaggtggagaggcatccagccaaagcacgcatgaactccaagcggttgaggagaacatctatgacaccatagggctcccagatcctccgtcgctgggttttaagtgcagcagcctaaagcgtgcaaagcggagcacctttttgggtctggaggccgacttcgtgtgctgtgacagcctgaggccatttgtttcccaagacagcctccagctcagtgaggacgaagccccttaccatcaggccactcccgatcatggttatctgagtttgctgtatgactctcccagtggtaacttgtctatgcctcataagcctgtatctgataaactgtccgaagaagtagatgaaatctggaatgacctggaaaattacatcaagaaaaatgaagacaaggccagagaccgtctcctggcagcgtttcctgtgagcaaggatgatgtgccagacaggctgcacgcagagagcacccctgagctgagccgggacgtggggcgctctgtgtccacgctgtccctgcctgagagccaggctctcctcacgcccgtgaagagcagggctggcagagccagccgcgccaactgcccctttgaggaagacctgatttctaaagaaggctcctttatgagccttaaccggctttctctggctagtgaaatgcccctcatggacaatccctacgacctggccaacagtggcctgtctcaaacagacccagaaaaccctgacctggggatggaggccacagataagacaaaaagcagggtgtttatgatggctcggcagtacagtcagaagattaagaaggcgaatcaacttttaaaagtgaaaagtctggagctggagcagccgccggccagtcagcatcagaaatccatgcacaaagacctggctgccatcttggaagagaagaagcaaggagggcccgccattggtgccaggattgctgagtattcccagttgtatgaccagattgtattcagagagtctcccttgaaaattcagaaggatggctgggccagccctcaagaatcctccctcctgaggtctgtgtcaccttcccaggtccaccatggtagtggagactggcttctgcattcaacctatagtaatggagagttagcagatttctgtctcccaccagagcaagacttgaggtcaagatatcccacgtttgagatcaatacaaaaagtactcccaggcaattgtccgcagcttgctctgtgccttctcttcaaacctctgaccctctgccaggctctgtgcagagatgcagcgtgggtagtaagtcagcccaacaaagagaactggtgtcaggaccatctttacaactccttgggtcggaaagggatcagcgctaaatctcagccttatcacaggtcccagtcatcttcctccgtcttgatcaacaaatcaatggattccatcaactaccctagtgatgtgggaaagcagcagctgctgtctttacacagaagttcaaggtgtgagagtcaccaggacttgctgccagatattgctgactcgcatcaacagggcactgaaaaactctcagatctcacactccaagactcacagaaagttgtggtggtcaatagaaatttacccttaaatgcccaaattgcaacacagaattatttttccaatttcaaagagactgatggagatgaagatgactatgtggaaatcaagtcagaagaagatgagtcggagttggagctatctcacaatcgtagaaggaaatctgactcaaagtttgtggatgctgacttttctgataatgtctgcagcggcaacacattgcattctttgaatagtccgcgcacctccaaaaaagccggttaacagcaaacttggcctttcaccatatctgacaccatataatgattctgacaaactgaatgactatctttggagggggccatctcccaatcaacaaaatattgtccagtctctaagggaaaaatttcagtgtctcagttcaagcagctttgcttaaggttcttcataataactgcttgaatcaacttcttattttgctcataaaacagttacagatactgatgaggtgttttatgtataccagaattaaagacaattttgtaagaaccagaggtgtaaaatatact

SEQ ID NO: 124112 - DNA, 483 bp, Homo sapiens; identical to SEQ ID NO: 93124
  misc_feature (1)...(483): n = a,t,c or g

SEQ ID NO: 124113 - DNA, 1090 bp, Homo sapiens
atgagacaaaagagaaaagaagagaaagaactgtttcacaataaagattgtgaaaagaaggaaaaaaattcctgggaacgaatgagacatacaggaactgagaaaatggcatctgaaagtgaaacacctactggagctatttcacagtataaagaaaggatgccttctgtcactcatagtccagaaataatggatctgtcagaactacgaccattctctaaaccagaaatagcactgacagaagccctgaggcttttggctgatgaggattggataagcaactccatgcactggaacagctgctggcttcctgctacagcgggaccagacataccacaagcagcttccactgtgggcaccagggaatgtggtggcacccagaagcttggagatgccagcaactgcagaaccccaaagagagcctggaaaaagcaccataagttctcactccagtctgtggaactagcagcccactcccacaagcttcagtctgtccctggcttgaaggtgaaaaatttacgttctggagtttctcgtgctgctgtggtctgtttaagtgatcttttcacttatttgaaaaagagcatggatcaagagctagataccacagtaaaagttttgttgcacaaggctggtgaatcaaatacatttataagagaagatgttgacaaagcattgagagctatggttaataatgtaactcctgcacgtgcagttgtttctcttatcaatggtggacaaagccatttacacattgctgtaagaaggtgtacagcccagcatttatcagatgtattggaatttatggaaccagaacgtattttatctgcagcaaaggatatggctgaacgcatattaccagctgctgctaagtttgctcaagacagttcacaagaaaccaggtattatggtcgaaagatgctgttcttcatgatgtgtcatcctaactttgaaaaaatgcttgaaaagtatgtcccatctaaagatttgccatatattaaggactctgttagaaacttacagcaaaaggtatgtgggaaaagtttgttttataaacagctttataagcaaagcttgtttttacatccag

SEQ ID NO: 124114 - DNA, 669 bp, Homo sapiens
ctatatctccaggcttaactcatactgagaggtgacaacgtgctggcagtcctcacggccgtcgctccctctcggcgcctcgtctgcctgggctcccactttggcggcacttgaggagcccttcagcccgccgctgcacttgtggaagcccctttctgggctgggccagcagctgctgtgctcaatttctccccgggccttagctgccttcccgtggggcagggctcgggacctgcagcccgccatgcctgaacctccccccgctcctccgtgggctcctgtgcggcctgagcctccccgacgagcgccgccccctgctccacgcacccagtcccatcgaccacccaagggctgaggagtgcgggcgcacagcctgggactggcaggcagctccacctgcagctctcctgcgggatccactgggggaagccagctgggcttctgagtctggtggggacggtagagaacctttatgtctagctcagggattgtaaatacaccaatgggcactctgtatctagcttttccatctctgtaaacagctctaccatcgacccagttaccaaagccagaagcctgagagtcattcttgacttctccctttccgtcatcccccacatccaattcatcagcaggccctgtcaattctctctccaaaatatacctcat

SEQ ID NO: 124115 - DNA, 801 bp, Homo sapiens; identical to SEQ ID NO: 120330

SEQ ID NO: 124116 - DNA, 1278 bp, Homo sapiens; identical to SEQ ID NO: 114123

SEQ ID NO: 124117 - DNA, 3918 bp, Homo sapiens
atagaccaataacaggagctgaaattgtggcaataatcaatagcttaccaaccaaaaagagtccaggactagatggattcacagccgaattctaccagaggtacaaggaggaactggtaccattccttctgaaactattccaatcaatagaaaaagagggaatcctccctaactcattttatgaggccagcatcattctgataccaaagccgggcagagacacaacaaaaaaagagaattttagaccaatatccttgatgaacattgatgcaaaaatcctcaataaaatactggcaaaccgaatccagcagcacatcaaaaagcttatccaccatgatcaagtgggcttcatccctgggatgcaaggctggttcaatatacgcaaatcaataaatgtaatccagcatataaacagaaccaaagacaaaaaccacatgattatctcaatagatgcagaaaaagcctttgacaaaattcaacaacccttcatgctaaaaactctcaataaattaggtattgatgggacgtatttcaaaataataagagctatctatgacaaacccatagccaatatcatactgaatgggcaaaaactggaagcattccctttgaaaactggcacaagacagggatgccctctctcaccactcctattcaacatagtgttggaagttctggccagggcaattaggcaggagaaggaaataaagggtattcaattaggaaaagaggaagtcaaattgtccctgtttgcagatgacatgattgtatatctagaaaaccccattgtctcagcccaaaatctccttaagctgataagcaacttcagcaaagtctcaggatacaaaatcaatgtacaaaaatcacaagcattcttatacaccaacaacagacaaacagagagccaaatcatgagtgaactcccattcacaattgcttcaaagagaataaaatacctaggaatccaacttacaagggatgtgaaggacctcttcaaggagaactacaaaccactgctcaaggaaataaaagaggatacaaacaaatggaagaacattccatgctcatgggtaggaagaatcaatattgtgaaaatggccatactgcccaaggtaatttacagattcaatgccatccccatcaagctaccaatgactttcttcacagaattggaaaaaactactttaaagttcatatggaaccaaaaaagagcccacatcgccaagtcaatcctaagccaaaagaacaaagctggaggcatcacactacctgacttcaaactttactacaaggctacaataaccaaaacagcatggtactggtaccaaaacagagatatagatcaatggaacagaacagagccctcagaaataacgccgcatacctacaactgtctgatctttgacaaacctgagaaaaacaagaaatggggaaaggattccctatttaataaatggtgctgggaaaactggctagccatatgtagaaagctgaaactggatcccttccttacaccttatacaaaaatcaattcaagatggattaaagatttaaacgttagacctaaaaccataaaaaccctagaagaaaacctaggcattaccattcagaacataggcatgggcaaggacttcatgtccaaaacaccaaaagcaatggcaacaaaagacaaaattgacaaatgggatctaattaaactaaagagcttctgcacagcaaaagaaactaccatcagagtgaacaggcaacctacaaaatgggagaaaattttcgcaacctactcatctgacaaagggctaatatccagaatctacaatgaactcaaccaaatttacaagaaaaaaacaaacaaccccatcaaaaagtgggcaaaggacatgaacagacacttctcaaaagaagacatttatgcagccaaaaaacacatgaaaaaatgctcatcatcactggccatcagagaaatgcaaatcaaaaccacaatgagataccatctcacaccagttagaatggcaatcattaaaaagtcaggaaacaacaggtgctggagaggatgtggagaaataggaacacttttacattgttggtgggactgtaaactagttcaaccattgtggaagtcagtgtggcgattcctcagggatctagaactagaaataccatttgacccagccatcccattactgggtatatacccaaatgactataaatcatgctgctataaagacacatgcacacgtatgtttattgcggcattattcacaatagcaaagacttggaaccaacccaaatgtccaacaatgatagactggattaagaaaatgtggcacatatacaccatggaatactatgcagccataaaaaatgatgagttcatgtcctttgtagggacatggatgaaattggaaatcatcattcttagtaaactatcacaagaacaaaaaaccaaacaccgcatattctcactcataggtgggaattgaacaatgagatcacatggacacaggaaggggaatatcacactctggggactgtgtaacaagttttgtgcagattgccagtctaaaggtagcgcatcccacctggcgggccaggggtccagccgcgccggggtggtgggggtgggctgcgtgatgagccagatctgcctcagctgtggccatccgtcagcgtaaggttgctctggtggtcgtcttcagtttgtccagctcttccccttatcccccatcctccctgctgaggtgtgtgggcgcacagcgcgggactggcgggcagctccacctgcagccccagtgcgagatccactggatgaagccagctgggctcctgagtctggtggggccttggagaacctttatgtctagctcagggattgtaaatacaccagtcggcactctgtgaatctgggggtgcacatatccagggtaaagtcagttaacctcgaccagtggactcaagaacagattcaggtacttagcccaagagtgagtcagctgcttccatatatctatgtaaaaggaattccagatgaatttgtttttgagaaggtgaaaatggtaagttgggaagtatttgcactgtatggacagcctcaggtatgtgtatatttgtgaaagggaatggatttgttgggccttggtaagagttggacttttcagcttccatgttcttacaaattttgataaattctcagtgaccctggtctgttggcctctgttccatccccttcttcttccggttccagaaaggtgagtcttgtgggctcctcaggattaaagaacattctgaaatgggtgattttgatatcttaatcggagccagggagcaaatcagaagaaataggcaagaaacagctctctaaagactccattctttcactgtatggatcccagacgcctcaaatgcctactcaaggtagatttcatgggtgtcatggccatgtgccaggtagagacatgagggcttccatgcaggaattacctcctaacagcataatggggagcatgatgcctccaccagtaggcatggttgctcagccaggagcttctgggatggttgcccccatggccatgcctgcaggctatatgggtggcatgcaggcatcaatgatgggtgtgccgaatggaatgatgaccacccagcaggctggctacatggcaggcatggcagctatgccccagactgtgtatggggtccagccagctcagcagctgcaatggaaccttactcaggtaagctaccccattttacttgcagcaagagttttgagccttcctcaagtttttctcggtttgtcaatgagtggcggaaatggacaggcagcaaatcagactctcagtcctcagatgtggaaataaaaacaaaacacctgtatggctgccattctcttcagccctcgctctcccctttccacagcctcca

SEQ ID NO: 124118 - DNA, 722 bp, Homo sapiens
aatagttggtttgctagtcacattgctacgtcttattgcatttttggtcagacgctgtcattgatgctctaatgggtctgtgccctatggtctgtaacccaaagcctgcccacacaacccggtcagaatgcagggactgctgcgctttgaagatcaagactctgcacgtggggatcagaacattgccatgttctatccaacctccacccaaatggtaatggtagattatttaaacaaaattccagtaattagtatttctaaggttcaccggataacacagtgttgcctctctgttaagaaataattaaatatttgaagtacagtttgctgttttcttcttaggtttatcggcgggggcttcaggcacatccctcttagtgttgacctttggatacattatataaaaatcttaaaagaaacattggaccctggtgatcctgagacaaacaatacaataagagggtatgtggaacattgatactgaaatgttttttatgatataaataattattctgatgttgataatagagctcatgaaagctaagctggaagtttaacttctattccattgttaaaaaaatgatacatgtaataaacttaagctttatgatttgaaaatgcagataataaagccctcctacagtccatgcctcttatgtccccaattccactcctcaaggttaatagcttggggtgtgttctttcagatatatgtataagta

SEQ ID NO: 124119 - DNA, 812 bp, Homo sapiens
gtgcctcctctgcctgggctcccactttggcggaaattgaggagaccttcagcccaccgctgcactgtgggagcccctttctgggctggccaaggccggagcccgctcccttagcttgcagggaggtgtggggggagaggcacgagcgagaaccagggctgcgcgtggcgcttgcgggccagctgcagctccgggtgggcatgggcttggcggccacgcactcggagcagccggccggccctgctggccctgggcaggttagggacctgcagcctgccatgcctgagcctcccaccctctccgtgggctcctgtgccgcccgagcctccccgatgagtgccgccccatgctccagggcgcccagtcccatcggccacccaaaggctgaggagtgcgggcgcacagcgcaggactggcaggcagctccacctgtagccccagtgcgggatccactgggtgaagccagctgggctcctgagtctgggtttgtgaatgcaccaatcggcactctttatctagctactctggtagggccttggagaacctttatgtctagctcagggattgtaaatacaccaatcggcactctgtatctagctcaagtctgcagcttcactcctgaagccagcgagaccacgagcccaccgagaggaacgaacaactccagacgcaccgccttaagagctgtaacactcactgcgaaggtctgcagcttcactcctgagccagcgagaccacgaacccaccagaaggaagaaactccgaacacatccgaacatcagaaggaacaaactccagacgtgctaccttaa

SEQ ID NO: 124120 - DNA, 477 bp, Homo sapiens
  misc_feature (1)...(477): n = a,t,c or g
gagtgcaccagtcgacactctgtatctagctgctctggtggggcctcggagaacctttatatctagctcagggattgtaaatacacccatcggcactgtgtatctagctcaaggtttataaacacaccaatcaacaccctgtgtctagctcagggtttgtgagtgcaccaatcaacactctgtatctagctgctctgggtggggggccttgggagnaacttttgtgttcaatactctgtatctaactaatctgatggggacgtggagaacctttgtatctagctcagggattgtaaatgtaccaatcagcaccctgtcaaaacaggccacttcggctctaccaatcagcaggatgtggggtggggccagattaagagaataaaagcagggctgcccgagccagccagtggcaactcgctcgggtccccttccacgctgtgggagctttgttctttgcaataaatcttgctactgctc

SEQ ID NO: 124121 - DNA, 4537 bp, Homo sapiens
cggagaaagctccaaaagcaagccctgggccctgaacaaaatctagagacattattaaacctggcaacctcggtgttctataatagggaccaagaggaacaggtccaaaaggaaaagcgagatcagagaaaggccgcagccttagtcatggccctcagacaaacaaaccttggtggttcagagaggacagaacatgaagcaggccaatcacctggtaaggcttgttatcagtgtggtttactgggacactttaaaaaagattgtccaatgagaaacaagctgccccctcgtccgtgtccactatgctgaggcaatcactggaaggtgcactgccccagaggatgaaggttccctgggtcagaagcccccagccagacgatccaacaacaggactgagggtgcctggggcaagcgccagctcatgtcatcaccctcactgagccccgggtatgtttaactattgagggccaggaaattgacttcctcctggacactggcgcggccttctcagtgttaatctcctgtcctggacgactctcctcaacctccgttaccatccaaggaatcctgggacagcctgtaaccaggtatttctcccacctcctcagttgtaattgggagactttgctcttttcacatgcctttcttcttatgcctgaaagacccacagggttattagggagggatatattagccaaggctggagctattatctacatgaatatggggaacaagttacccatttgttgtcccctacttgaggagggaatcaaccctgaagtctgggcattggaaggacaatttggaagggcaaaaaatgcccacccagtccaaatcaggttaaaagatcccaccacttttccttatcaaaggcaatatccctaaggcctgaagctcataaaggattacagaatattgttaaacatttgaaagctcaaggcttagtaaggaaatgcagcagtccctgcaacaccccaattctggaagtacaaagaccgagactagtgcaagatcttagactcattaatgaggcagtaatttcactatatccagttgtacccaacccctataccctgctctctcaaataccagaggaagcagaatggttcacagttctggacctcaaggatgccttcttctgtgttcccctgcactctgattcacagttcctctttgcttttgaggatcccacaaaccacacatcccaacttacatggatggtcttgccccaagggtttagggatagccctcatctgtttggtcaggccctagccaaagatctaggccacttctcaagtccaggcactctggtccttcaatatgtggatgatttacttttggctaccagttaggaagccttgtgccagcaggctactctagatctcttgaactttctagctaatcaagggtacaaggtgtctatgtcgaaggcccagctttgcctacagcaggttaaatatctaggcctaatcttagccaaagggaccagggccctcagcaaggaatgaatacagcctatactggcttatcctcgccctaagacattaaaacagttgagggagttccttggaattaccagcttttgccgactatggatccctggatacagcgagacagccaggcccctctaatcaaggaaacccagagggcaaatactcatctagttgagtgggaaccagaggcagaaacaaccttcaaaaccttaaagcaggctctagtacaagctccagctttaagccttcccacaggacagaatttctctttatatgtcagagagagagccaggatagctcttggagtcctcactcaaactcatgggacaaccccacaaccagtggcatacctaagtaaggaaattgatgtagtagcaaaaggctggcctcactgtttaagggtagttgcagcagtggccgtcttagcatcagaggctatcaaaataatacaaggaaaggatctcactgtctagactacttatgatgtaaatggcatactaggtgccaaaggaagtttatggctatcagacaactgcctacttagataccaggcactactccttgagggaccagtgcttcaaatatgcacatgcatggccctcaaccctgccacttttctcccagaggatggggaaccaatcaagcatgactgccaacaaattatagtccagacttatgccgcccgagatgatctcttagaagtccccttaactaatcctgaccttaacctatatactgatggaagttcatttgtggagaatgggatacgaaggttagtgatgtaaccatacttgaaagcaagcctcttcccccagggaccagtgcccagttagcggaactagtggcacttacctgggccttagaactgggaaagggaaaaagaataaatgtgtatacagatagcaagtatgcttatctaatcctacatgcccatgctgcaatatggaaagagagggagttcctaacctctgtaggaacccccattaaataccacaaggaaattatagagttattgcacgcaatgcaaaaacacaaagaggtgggaatcttacactgacaaagccatcagaataggaaggagaggggagaacagcagcataagcagctggcagaggcagcagaaaggaaagaaagagacaggaagtcaaagaaagagacagagaggaagagacaagaagttagagagaaagagggacagacacagaagtcaaagagagggtaaaaaagagaggaagagacaaagaagaagtcaaagagagagatggaagtagtaaagaaaaaacagtgtacctattcctttaaaagccagggtaaatttctctctacccacgcaaggcaattctctattggatctcaacccatatctgcctctcaaacagttgaagaaataatgaaatctatccttactttacaatcccaaataagactctttggcagcagtgactctccaaaaccgctgaggcctagatctcctcactgctgaaaaaggaggactctgcaccttcttaggggaagagtgttgtttttacactaaccagtcagggatagcatgagatgccacccagcgtttacaggaaaaggcttctgaaatcagacgcctttcaaattcttataccaacctctggagttgggcaacatggcttctcccctttctaggtcccgtggcagccatcttgctgttactcgcctttgggccccgtatttttaaccttcttgtcaaatttgtttggtctagaatcgaggccatcaagctacagatggtcttacaaatcgaaccccaaatgagttcaactaacaacttctaccgaggacccctggactgaccagctggcacttcccctggcctagagagttcccctctgaaggacactacaactgcaaagccccttcttcgcccctatccagcaggaagtagctagagcagtcatcggccaaattcccaacagcagttggggtgtcctgttgattgaggggtgacagcatgctggcagtcctcacagccctcactcgctcgctcactctcggcacctcctctgcctgggctcccactttggcagcacttgaggagcccttcagcccgccactgcactgtgggagcccctttcagggctggccaaggccggagccggctccctcagcttgcggggaggtgtggagggagaggcgcggtgggaaccagggctgcacgcggtgcttgcgggccagcgcgagttccgggtgggcgtgggctctgtgggccccgcactcggagccgccggctagccccgccagcctgggcagtgaggggcttagcacctggaccagcagctgctgtgctcgatttctcactgggccttagctgccttcctgcggggcagggctggggacctgcagcccgccatgcctgagcctcccccctcccctccgtgggttcctgcgcagtccgagcctccccgatgagcgccgccccgctgctccatggcacccagtcccatcggaggcccaagggctgaggagtgcctttggagcagggcacgggactggcaggcagctctacctgcagcccctgtgcaggatccactgggtgaaagccagctgggctcctgagtctggtggggacttggagaacctttatgtctagctaagggattgtaaataaaccaattggcactctgtatctagctcaaggtttgtaaacacaccaatcagcaccttgtgtctagctcagggtttgtgaatgcaccaatagacactctgtatctagctactctggtggggacttggaaaacctttttgtcaacactctgtatctagttaatctggtggggacatggagaacctttgtgtctagctcagggattgtaaacgcaccaatcggcaccctgtcaaaacagaccacttgactctctgtaaaatggaccaatcagcaggatgtgggtggggcgagacaagagaataaaagcaggctgcctgagccagcagtgacaacccccctcgggtcccctcccacgccgtggaagctttgttctttcgctctttgcaataaatcttgctgctgctcacaa

SEQ ID NO: 124122 - DNA, 5254 bp, Homo sapiens
cgcagtcgtccttccgccccagagaccgatgatagtcgagttgggggcattatgagaggagagaaaaactactacttccgtggagctgcgggggaccacggttcctgccccactacaacttcgcctctggcctcggccctcttgatgccctcggaggcagtctcaagcagctggtctgagtctggaggcggtttgtcagggggagatgaagaggacactcggctccttcaactcctccgcactgcccgggatccttctgaggccttccaggctttgcaagctgctttgccgcggcggggcggtcgacttggcttcccccgacgcaaggaagctttgtatcgggcactgggccgagtgcttgtggaaggaggtagtgatgagaagcggctctgcttgcaacttctctcggacgttctccggggtcagggggaggcaggccagcttgaagaggcctttagcttagcacttttgcctcaactagttgtctcgttacgggaagagaatccagccctgcggaaagatgcgctgcagatccttcatatatgtctgaaacgtagtcctggagaggtgctgagaacgcttatacaacaaggactggaaagtaccgatgcccgacttagagcttccacagcactactgcttcccatcttgcttactactgaggacttgttgcttggtctggatctcaccgaggtgataatatccctagcccgaaagcttggtgatcaggagacagaagaagaatctgagacagctttctccgcacttcaacaaattggggagcgacttggccaagacaggtttcaatcttacatttctcgtctgccctctgccctgaggagacactacaatcgccgcctggagtcccagtttggaagtcaggttccttattatttggaacttgaagcctctggatttcctgaagatccccttccctgtgcagtgactctttccaacagcaatcttaaatttgggattattcctcaggagctgcattcacgattattggatcaggaagactataagaaccggacccaggccgtcgaagaactaaagcaggtgctgggaaaatttaaccctagttctactcctcattctagtcttgttggcttcattagtttgctatataatttgttagacgattctaacttcaaagtggtgcatggcacacttgaagtcctgcatttactggttattcgccttggagagcaggtacagcagttcttgggaccagttatagcagcttctgtcaaagtgctggcggacaacaagttggtgatcaaacaagaatacatgaaaatcttcctcaagctaatgaaggaagtaggacctcagcaggtgctttgtttactcctgaaacatctcaaacataagcattccagagtgagagaggaggtggtgaacatttgcatctgctccctgctgacctatcctagtgaggattttgacttgcccaaactgtcctttgatcttgccccagctcttgtagatagcaaacgcagggtacgccaagcagctttagaagcttttgccgtattggcatcatcaatgggctcaggtaaaaccagcatcctttttaaagctgtggatacagttgaactgcaagataatggagatggagtgatgaatgctgtgcaggccagattggctaggaaaaccttaccaaggctcacagagcagggatttgtggaatatgcagtactgatgccatcttctgccgggggtaggtcaaaccatttggcacatggagcagatacggactggcttttggctggtaacagaactcagagtgcacactgtcactgtggtgaccacgtgagggatagcatgcacatttatggatcttacagcccaactatctgtacccgaagggtattaagtgcaggaaaaggaaaaaataaattaccatgggaaaatgagcaacctggaatcatgggagaaaaccagacctccacttccaaggatatagagcagttttcaacatatgatttcatcccatctgcaaaattaaagctttctcaaggaatgccagtcaatgatgatttatgttttagcagaaaaagagtatcaagaaacttatttcagaatagtcgggattttaacccagattgtcttcctttatgtgctgctggtactactgggactcatcaaacaaatctttctgggaaatgtgcacaacttggattttcacaaatatgtggtaaaactggcagtgtgggttctgacttacaattcctagggacaactagcagtcatcaagaaaaagtgtatgctagcctcaattttggcagtaagacacagcaaacatttggtagtcaaacagagtgtacttcctcaaatggtcaaaatccaagtccaggagcttacatccttccatcctatcctgtctcatcacctcgaactagtccaaagcatacatctcctcttattatatctccaaagaagtctcaagataattctgttaatttctcaaattcctggcctcttaaaagcttcgaaggactatcaaagccaagtccacagaagaagcttgtcagccaaaaatcgtctgatcctacgggtagaaatcatggagaaaattctcaagaaaaacctccagttcagcttacacctgccttggtgagatcgccatcttcccgacgaggtctaaatgggacaaagcctgttcctcccataccaaggggaataagccttttgcctgataaagctgatttaagcacagtgggacacaaaaagaaagagcctgatgatatttggaagtgtgaaaaagatagtcttccaattgatctttcagaattaaatttcaaggataaagatttggatcaagaagagatgcatagctctcttaggtcccttcgtaatagtgcagctaagaaaagagcaaaactgagtggcagtactttagatcttgaaagccctgattctgcaatgaagctcgacttgacgatggactccccgtctctgtcttcctcaccaaacatcaattcttacagtgaaagtggagtttacagccaagaatcattgacttcttctctgtctacaactccccaggggaagagaataatgtcagacatatttccaacatttgggtcaaaaccttgtccaacaagactttcttctgcaaagaaaaaaatttctcatattgctgaacaaagccccagtgcagggtcatcatcaaatccacagcaaatttccagttttgacttcacaaccacaaaggctttatcagaagactcagtagtagttgttggaaaaggcgtatttggaagtttaagttcagcaccagcaacctgcagccaatcagtgatatcttctgtggaaaatggggatacattttcaattaaacaaagtattgaaccaccatcagggatttatggaagatcagtccagcaaaatatttcatcatatcttgatgttgagaatgaaaaagatgctaaagtttctatttctaaatctacttataacaagatgagacaaaagagaaaagaagagaaagaactgtttcacaataaagattgtgaaaagaaggaaaaaaattcctgggaacgaatgagacatacaggaactgagaaaatggcatctgaaagtgaaacacctactggagctatttcacagtataaagaaaggatgccttctgtcactcatagtccagaaataatggatctgtcagaactacgaccattctctaaaccagaaatagcactgacagaagccctgaggcttttggctgatgaggattgggagaagaaaattgagggactgaattttattagatgcttagctgcttttcattctgagatactgaacacaaagttgcatgaaacaaattttgcagttgttcaagaggtgaaaaatttacgttctggagtttctcgtgctgctgtggtctgtttaagtgatcttttcacttatttgaaaaagagcatggatcaagagctagataccacagtaaaagttttgttgcacaaggctggtgaatcaaatacatttataagagaagatgttgacaaagcattgagagctatggttaataatgtaactcctgcacgtgcagttgtttctcttatcaatggtggacaaaggtattatggtcgaaagatgctgttcttcatgatgtgtcatcctaactttgaaaaaatgcttgaaaagtatgtcccatctaaagatttgccatatattaaggactctgttagaaacttacagcaaaagggtttgggggagataccattagatactccttcagcaaaaggaagacgatctcatactggcagtgttggaaatacaagatcatcatctgtttctagagatgctttcaattcagctgaaagagctgtaactgaagttcgtgaagtcaccagaaaatcagtccctcgtaattccttagaaagtgctgagtaccttaaactcataactggcttattaaatgcaaaagactttcgtgatcgtattaatgggattaagcagcttttatcagatacagaaaataatcaagaccttgttgttggaaacattgtgaagatttttgatgcttttaaatctcgacttcatgattctaatagtaaagtaaatctggtggctctggaaacaatgcacaaaatgattcctctacttagagaccacttatctcctataatcaacatgctaattccagcaatagtggataacaatctgaattccaagaatccaggcatctatgcggctgctacaaatgttgttcaggcactgagtcagcatgtagacaattacttacttctacagccattttgcacaaaagctcagtttttaaatggaaaagcaaaacaggacatgacggaaaagcttgctgatattgttacggaactttatcaaaggaagccgcatgccacagagcagaaagtgttggttgttttatggcatctcttaggaaatatgacaaatagtggctctctgcctggagctggaggaaatatacgaacagccacagctaaattatcaaaagcactctttgcacagatgggtcagaatctgttaaatcaggctgcatctcaaccaccacatatcaaaaagagtttggaggaattactcgatatggacaattttaaatgaattatgaatcttcgataaaatactgtatgatgaacaaaagtgtttacatgatgacaaatggaactttctaaaagttatgttatcagcgcctgcacttcacatccagcaaattaagtcaatggctatttttatttgcagcctatgagtacacatctgtcctatatcaacc

SEQ ID NO: 124123 - DNA, 2457 bp, Homo sapiens
tgaaattcttctctgtccatccttacccttcaactgtcagtatattcttgttcttcttggaagcagaataagagctcgggaaccgccaatggcagtacaagctgtaacacagggtccaccaaaatatactaaatctgttctgaaaaagggagataaaaccaactttcccaaaaagggagatgttgttcactgctggtatacaggaacactacaagatgggactgtttttgatactaatattcaaacaagtgcaaagaagaagaaaaatgccaagcctttaagttttaaggtcggagtaggcaaagttatcagaggacatgtagctaggaagtttttagatgatgaagcagaactttctgaagaagatgcagaatatgtttcatcagatgaaaatgatgagtcagaaaatgaacaagattcctcattacttgactttttaaatgatgaaactcaactttcacaggctataaatgcttggtttgcctgtaaatcaccatcaatcatctgtgtagatgatgaagttgtatcttctgtatgtgctttcttttcctctggttcttctgatctatataaaacgtcagaatggaaactttcaaaactcccacagtttcttgcagaacataaattattaggaaacattaaaaatgtggccaagacagctaacaaggaccacttggttacagcctataaccatctttttgaaactaagcgttttaagggtactgaaagtataagtaaagtgtctgagcaagtaaaaaatgtgaagcttaatgaagataaacccaaagaaaccaagtctgaagagaccctggatgagtttattcagttgcgaagggaattagcttctgtaaatggtcatagtggtgatgatggtcctcctggtgatgatctaccatcgggaattgaagacataaccgatcctgcaaaggtaaccagtcttattctaaagttcgtcagtggccagctaattacagaaatagaaaacatgagacatagaatcattgagattcatcaagaaatgtttaattataatgagcatgaagttagtaaaaggtggacatttgaagaaggtattaaaagaccttactttcatgtgaaacctttggaaaaggcacaactaaaaaactggaaagaatacttagaatttgaaattgaaaatgggactcatgaacgagttgtggttctctttgaaagatgtgtcatatcatgtgccctctatgaggagttttggattaagtatgccaagtacatggaaaaccatagcattgaaggagtgaggcatgtcttcagcagagcttgtactatacatctcccaaagaaacccatggtgcatatgctttgggcagcttttgaggaacagcagggtaatattaatgaagccaggaatatcttgaaaacatttgaagaatgtgttctaggattggcaatggttcgtttacgaagagtaagtttagaacgacggcatggaaatctggaagaagctgaacatttgcttcaggatgccattaagaatgccccatcatatatatgagatcttcattttatgctgtcaaactagcccggcatcttttcaaaatacagaaaaaccttccaaaatcaagaaaggtgcttttggaagcaatcgaaagagacaaagagaacacaaagttatacctcaatttacttgaaatggaatatagtggtgacctcaaacaaaatgaagaaaatatcctaaattgttttgacaaagctgtacatggttcattacctattaaaatgagaattacattttctcagagaaaagtggaatttcttgaagattttggttccgatgttaataaagctgtaactgaagttcgtgaagtcaccagaaaatcagtccctcgtaattccttagaaagtgctgagtaccttaaactcataactggcttattaaatgcaaaagactttcgtgatcgtattaatgggattaagcagcttttatcagatacagaaaataatcaagaccttgttgttggaaacattgtgaagatttttgatgcttttaaatctcgacttcatgattctaatagtaaagtaaatctggtggctctggaaacaatgcacaaaatgattcctctacttagagaccacttatctcctataatcaacatgctaattccagcaatagtggataacaatctgaattccaagaatccaggcatctatgcggctgctacaaatgttgttcaggcactgagtcagcatgtaggagacacatcaaggatgtttaggagaacaaagagctatgacagcctgctgactaccttaattggcgctggaatccgaattcttttcagttcctgccaagaagaaaccgcagatttgctaaaggaactgtctttagtggaacaaagaaagaatgttggtattcatgttccaacagtggtgaatagtaataaaactcacttcaagaaatctccatgtatgcacaagtaa

SEQ ID NO: 124124 - DNA, 3414 bp, Homo sapiens
gtcgactctagaggatccccgggtaccgagctcgaattctccaaatttacagatgacactacatacttctgggtagtgagatgccaagtcacagggatgaacttcatgaaaacggcacaagactgtgtgagtgggcagaaaagtggcagaagaacttcattatgggcaaatgtaaggtattatggtcgaaagatgctgttcttcatgatgtgtcatcctaactttgaaaaaatgcttgaaaagtatgtcccatctaaagatttgccatatattaaggactctgttagaaacttacagcaaaagggtttgggggagataccattagatactccttcagcaaaaggaagacgatctcatactggcagtgttggaaatacaagatcatcatctgtttctagagatgctttcaattcagctgaaagagctgtaactgaagttcgtgaagtcaccagaaaatcagtccctcgtaattccttagaaagtgctgagtaccttaaactcataactggcttattaaatgcaaaagactttcgtgatcgtattaatgggattaagcagcttttatcagatacagaaaataatcaagaccttgttgttggaaacattgtgaagatttttgatgcttttaaatctcgacttcatgattctaatagtaaagtaaatctggtggctctggaaacaatgcacaaaatgattcctctacttagagaccacttatctcctataatcaacatgctaattccagcaatagtggataacaatctgaattccaagaatccaggcatctatgcggctgctacaaatgttgttcaggcactgagtcagcatgtagacaattacttacttctacagccattttgcacaaaagctcagtttttaaatggaaaagcaaaacaggacatgaccggaaaagcttgctggatattgttacggaactttatcaaaggaagccgcatgccacagagcagaaagtgttggttgttttatggcatctcttaggaaatatgacaaatagtggctctctgcctggagctggaggaaatatacgaacagccacagctaaattatcaaaagcactctttgcacagatggggtttgtgaatgcaccaatcgacactctgtatctagctactctggtggggccttggagaacctttatgtctagctcagggattgtaaatacaccaatcggcactctgtatctagctcaagggacactgacgcatgcgcatcgtgccctggaccaggcggccgtggcgcgggtggcggctgctgtgctggctgtggggacggaggcggtgaagtgccatcttcggctaggtcgtcacaggctccggctcatggcatcaagtggcatccatcataagatatggtcaaatccaagatcgttaactgaagacaatatgcaaaattctcacatggatgaatacagaaattctagtaatggcagcacaggcaacagttcagaggtagtggtagaacatcctactgatttcagtactgagattatgaacgttacagaaatggaacagtcacctgatgactctcccaatgtgaatgcatctacagaagaaactgaaatggcaagtgctgtggaccttccagtgacgctgacagaaacagaagcaaatttccctccagaatatgaaaaattttggaaaactgtagaaaataatcctcaggattttacaggctgggtatatttgcttcaatatgtagaacaggagaatcacttgatggctgccaggaaggcatttgacagatttttcatacactatccgtattgctatggttactggaaaaagtatgcagaccttgaaaagcggcacgacaacattaaaccatcagatgaggtttatcggcgggggcttcaggcaatacctcttagtgttgacctttggatacattatataaacttcttaaaagaaacattggaccctggtgatcctgagacaaacaatacaataagaggaacttttgagcatgctgttctagctgcaggaacagatttccgttctgacagactgtgggaaatgtatataaactgggaaaatgagcagggaaacctgagagaagttacagctatatatgatcgtattcttggtattccaacacagctgtatagtcatcattttcagagatttaaagaacatgtacagaataatttgcctagagatcttttaactggtgaacagtttattcagttgcgaagggaattagcttctgtaaatggtcatagtggtgatgatggtcctcctggtgatgatctaccatcgggaattgaagacataaccgatcctgcaaagctaattacagaaatagaaaacatgagacatagaatcattgagattcatcaagaaatgtttaattataatgagcatgaagttagtaaaaggtggacatttgaagaagagaattaaaagaccttactttcatgtgaaacctttggaaaaggcacaactaaaaaactggaaagaatacttagaatttgaaattgaaaatgggactcatgaacgagttgtggttctctttgaaagatgtgtcatatcatgtgccctctatgaggagttttggattaagtatgccaagtacatggaaaaccatagcattgaaggagtgaggcatgtcttcagcagagcttgtactatacatctcccaaagaaacccatggtgcatatgctttgggcagcttttgaggaacagcagggtaatattaatgaagccaggaatatcttgaaaacatttgaagaatgtgttctaggattggcaatggttcgtttacgaagagtaagtttagaacgacggcatggaaatctggaagaagctgaacatttgcttcaggatgccattaagaatgccaaatcaaataatgaatcttcattttatgctgtcaaactagcccggcatcttttcaaaatacagaaaaaccttccaaaatcaagaaaggtgcttttggaagcaatcgaaagagacaaagagaacacaaagttatacctcaatttacttgaaatggaatatagtggtgacctcaaacaaaatgaagaaaatatcctaaattgttttgacaaagctgtacatggttcattacctattaaaatgagaattacattttctcagagaaaagtggaatttcttgaagattttggttccgatgttaataagcttctgaatgcttatgatgaacatcaaacactcctgaaagaacaggattctttaaaaaggaaagcagaaaatggatcagaagaaccagaggaaaagaaagcacatacagaagatacaacttcatcatctacacagatgattgatggtgatttacaggcaaaccaagctgtatataattatagtgcgtggtatcaatacaattatcagaatccttggaattatggacaatattatcctccccctccaacctga

SEQ ID NO: 124125 - DNA, 908 bp, Homo sapiens
atgaagcacatcccggtcctcgaggacgggccgtggaagaccgtgtgcgtgaaggagctgaacggccttaagaagctcaagcggaaaggcaaggagccgcggcgcgcgaacggctataaaactttccgactggacttggaagcgcccgagccccgcgccgtagccaccaacgggctgcgggacaggacccatcggctgcagcggtcccggtaccggtccggtgccagtcccagtggcgccggccgttcccccaagagggggcacggacacagccggggagcgcgggggctctcgggcgcacgaggtctccgacgcgcggaaacgctcgttgccctaggcgcagtggggccaggactccccacgccgccgccgccgccgcctcctgcgccccagagccaggcacctgggggcccagaggcacagcctttcgggagccgggtctgcgtcctcgcatcttgctgtgcgcaccgcccgcgccccgcgccgtcagcacccccagcaccgccagcgcccccggagtccactgtgcgccctgcgcccccgacgcgccccggggaaagttcctactcgtcaatttcacacgcatttacagctacaaatttcccttttggcacagcttaagctacaacccggccagagtggggtcaagtggggaccatggaggaggacatgagatcctaacaggcgacctcaaactgctgtacaagcccagcaaccctgaccgctccccaacccacaaccagcaaaggagctcagatgtttggagattgccaatagaagtcaatgtggcagagcttgctctgtttcctgggccgtgggctctgggaactggcatctcagagcctcatggcccgagaagctgtgtagctacccctgttcctattggtgaagccacccagcacccttag

SEQ ID NO: 124126 - DNA, 1264 bp, Homo sapiens
atggccaccctggctggggaaggaaggccggccgggtgggtgccctggatcagcctccttgccgtgggagtcctgatcatctggaagctatggcctgccccgcccattggaggtgaactccagtttgcttttgtgtgcttcctgctggggaatgtgtacgaggcatttgagcattggaagcggctcctgaacctcctgtgccggtcagaagcagccatgaagaaaacgccacgcgcctgtggatcaacctcatatccatcctgcaccaccagctgggtgagatccccgctgacttcttcgtagacattgtctcccaacacaacttcctcaccagcaccttacaggttttcttttcctctgcctgcagcattgccgtggatgccaccctgagaaagaaagctgaaaagttccaagctcacctgaccaagaagttccggtgggactttgctgaggaacctgaggactgtgccccggtggtggaggagctccctgagggcatcgagatgggctaactcggggagcgctctcagctgcgaggggccccttcccacagggctgcagtcctggcctctccatttacttcttcccatcctgggacctgccagggcagcaatcttttccaggtcctgcaaagatggagccagaattccctttttcactgattaaatatatttctttcatttgccaaagaggctgttacccatcctgaaagggcacatttgtggggtttccccatcagccaggccttggtgctaacctggctgaatttcacacaggctcttacacacacacgctcctaaggagacatcttgcctacacggcaaccatattttcctttggaatgagaaggaatttgaaccaaaagtccaagaaagaactgattgcttgttccataaggagcttaggaaacaaagaaaccctggattgcccagggggtcttgagaagttggttggtgactttttttgcggttaaatgaagggtgatggggagatcagcccgtaattgccgcctgcctcttgctaaataggagcagaggacttggcctgcagctccttgggaccactttgattgggaagagagtttcaagggaggcagctggattcaatctagcaggtggtcagcttcagttttcttccattcgaaatcccatttcttcctgttccagaggcccagtgggtcatctcccaagggtgggtgttggaccctgggccttcagaggccttgcttggtgctgtcacctcccacctgttccattccgaggcc

SEQ ID NO: 124127 - DNA, 2771 bp, Homo sapiens
atggactacatccgcaccgacctaaccaccgccgcgcccagcccgccgcgccgcctggggccgccaccgcccggcgagcagccgccttcgggcagtggccacgtccgcccgccgggggccaggcccccgcaccgaggtggcggcaggggcggtggcggcggggacccggcggcgcccccagctcgcggcggcggcggtggcgggaaggcgcggccccctggcggcggcgcggctccctgcgagcccgggtgccagtgccgcgcgcctatggtgagcgtgtccagcgagcgccacccgctctacaaccgcgtcaagacaggccagatcgctaactgcgcgctgccctgccacaacccctttttcagccaggacgagcgcgccttcaccgtcttctggatcggcctgtggtcggtgctctgcttcgtgtccaccttcgccaccgtctccaccttccttatcgacatggagcgcttcaagtacccggagcggcccattatcttcctctcggcctgctacctcttcgtgtcggtgggctacctagtgcgcctggtggcgggccacgagaaggtggcgtgcagcggtggcgcgccgggcgcggggggcgctgggggcgcgggcggcgcggcggcgggcgcgggcgcggcgggcgcgggcgcgggcggcccgggcgggcgcggcgagtacgaggagctgggcgcggtggagcagcacgtgcgctacgagaccaccggccccgcgctgtgcaccgtggtcttcttgctggtctacttcttcggcatggccagctccatctggtgggtgatcttgtcgctcacatggttcctggcggccggtatgaagtggggcaacgaagccatcgccggctactcgcagtacttccacctggccgcgtggcttgtgcccagcgtcaagtccatcgcggtgctggcgctcagctcggtggacggcgacccggtggcgggcatctgctacgtgggcaaccagagcctggacaacctgcgcggcttcgtgctggcgccgctggtcatctacctcttcatcggcaccatgttcctgctggccggcttcgtgtccctcttccgcatccgctcggtcatcaagcaacaggacggccccaccaagacgcacaagctggagaagctgatgatccgcctgggcctgttcaccgtgctctacaccgtgcccgccgcggtggtggtcgcctgcctcttctacgagcagcacaaccgcccgcgctgggaggccacgcacaactgcccgtgcctgcgggacctgcagcccgaccaggcacgcaggcccgactacgccgtcttcatgctcaagtacttcatgtgcctagtggtgggcatcacctcgggcgtgtgggtctggtccggcaagacgctggagtcctggcgctccctgtgcacccgctgctgctgggccagcaagggcgccgcggtgggcgggggcgcgggcgccacggccgcggggggtggcggcgggccggggggcggcggcggcgggggacccggcggcggcggggggccgggcggcggcgggggctccctctacagcgacgtcagccactggcctgacgtggcggtcgggcacggcgagctccgtgtcttatccaaagccagatgccattgtcccaggtttgagcggaggggagggggcgcccaggaaggggtggggaggggggcgagaagaaacccaagtgcaagcgaagggacacttgatgggctgaggttcccaccccttcacagtgttgattgctattagcatgataatgaactcttaatggtatccattagctgggacttaaatgactcacttagaacaaagtacctggcattgaagcctcccagacccagccccttttcctccattgatgtgcggggagctcctcccgccacgcgttaatttctgttggcctgaggagggtggacctctgcgggcgtttcccagaaccccgaggattttggagccctcccctggctgcacttggctgggtttgcagtccagatacacagatttcaccctgggagaacccctttttctccctcgactcttcctacgtaaactcccacccctgacttaccctgggaggaggggttaccgccacctgatgggattgcacggttttgggtattctttaatgaccatggcaaatgccttaagtaaacaaacaagaaatgtcttaattatacaccccacggtaaatacgggtttcttacattagaggatgtatttatataattatttgttaaattgtaaaaaaaaaaagtgtaaaatatgtatatatccaaagatatagtgtgtacatttttttgtaaaaagtttagaggcttacccccctgtaagabacagatataaagtattctattttgtcgaataaaatgacttttgataaatgatttaaccattgccctctcccccgccttttttgagctgtcacctttaaagtgcttgctaaggacgcatggggaaaatggacattttctggcttgtcattctgtacactgaccttaggcatggagaaaattacttgttaaactctagttcttaagttgttagccaagtaaatatcattgttgaactgaaatcaaaatgagtttttgcaccttccccaaagacggtgtttttcatgggagctcttttttgatccatggataacaactctcactttagtggatgtaaatggaacttctgcaaggcagtaattccccttaggccttgttatttatcctgcatggtatcactaaaggtttcaaaaccctgaaaaaaaa

SEQ ID NO: 124128 - DNA, 475 bp, Homo sapiens
cgcacagctcgttgaattccgtggacaaggcgcgcgccctggaggcggacaacggcgagctagaggtgaatattcgcgactggtaccagaagcaggggcctggggcctcccgcgactacagccactactacacgaccatccaggacctgcgggacaagattcttggcgccaccattgagaactccaggattgtcctgcagatcgacaacgcccgtctggctgcagatgacttccgaaccaagtttgagacggaacacgctctgcgcatgagcgtggaggccgacatcaacggcctgcgcagggtgctggatgagctgaccctggccaggaccgacctggagatgcatatcgaaggcctgaaggaagagctggcctacctgaagaagaaccatgaggaggaaatcagtacgctgaggggccaagtgggaggccaggtcactgtgtaggtggattccgctccgggcaccgatctcgg

SEQ ID NO: 124129 - DNA, 1326 bp, Homo sapiens
atggctatagtcaaaacgacagacaatatcaagtgtagaatgggatgtggagcaactggaaccccctcataccccagagatgggaagaaaagttccagtcccccagcaggcacaggggctccagcagccgcggcgtgtccttgtcctccttcggggggctacagcggcatcctgtctgggtccaacggattgcttgcgggcaacgagaagctcaccatgcataacctcaacaactgcctggcctcctacctggacaaggtgcacgccctggaggcagccaacagcaagctggagtttggtttgagtgtttgggtgctggatgaggtgaccctggccaggactgatctggaggcacagatcaaaggcctgaaggaagagctggcctacctgaagaagaagcatgaggaggaaatcaatgccctgaggggccaagtgggagaccaggtccatatcctgagtgacaggcaaagccaatatgagatcatggccaagcagaactggaaggatgctgaagcctggttcaccagctggactgaggaactgaaccaggaggtcactggccacatagagcagctccagataagcaggtctgaggtcactgacctgcagtgcaccctccagggtcttgagattgagctgcactcgcagctcagcgtgaaagctcccttagaaggcacactggcagaaacagaggcatgctttggagcccagctggtgcagatccaggcactgatcagcagtattgaagcccagctgggcgatgtgcgagctgatggtgagtggcagaatcaggagtaccagcggctcctggagcaggagatcgccacctatcgcagcctgcttgagggccaggaagatcattacaacaacctgtccacctccaaggtccagatcccagagtgtactgtatccaacgtgcctgtggctagcgtgtgtctacagactctggaaccacactccttggcttccaaccctggctccagcacatactctgtgacttttggccagtacattaacctttctgtgtctccatttctccttctggaagccaccattgcaggggccaagaaggcagccactggaaacaactcgacccagttttcaccccctgcagagaggcagctgtgcattttcacatgccccaggacaattccactgaccacagctagtcatgcaggtagttatgggccaaagctagtgaagtacacatccctcagacccctgcctatggctgctcccactgaaagcaaccctgccctccccagtagcagggccacagcacacaggctgctgcctgcacctggccatttccccagtggcctatag

SEQ ID NO: 124130 - DNA, 462 bp, Homo sapiens
ggacaaagctgagctatgcgggtctctgctcacctggttacagacgttccacgttccgtctccctgtgccagccctcaggacctgagcagcggccttgccgtagcctatgtgctgaaccagatgtgagtggagctgaaggggaggatcccaaaagtgtcccccagtctgctcatcccaccttctcgcccccagagacccctcctggttcaacgaggcatggctccagggcatctcggaagaatccaggtcccaactggaagctgaaggtgacaagtggactcctgattagaggacagactggtgaagagatgaccagggacgggccagctaggcacatgtcctgggtgatgggcaggaagagggacagatgtctggtgatcaaccatttgttcatccattcatctatggagtactcaccctgtgccaggcctgggcattcagcaaggaataacacagacaag

SEQ ID NO: 124131 - DNA, 2545 bp, Homo sapiens
atgagcgtggacaaagctgagctatgcgggtctctgctcacctggttacagacgttccacgttccgtctccctgtgccagccctcaggacctgagcagcggccttgccgtagcctatgtgctgaaccagatagacccctcctggttcaacgaggcatggctccagggcatctcggaagatccaggtcccaactggaagctgaaggtcagcaatctgaagatggtcttacggagcctagtagagtactcccaggatgtcctggcgcatcctgtgtcagaagagcatctcccagatgtgagcctcattggagagttctcagacccggcagagctcggcaagctgcttcagctggtgctgggctgtgccatcagttgcgagaaaaagcaggaccacatccagagaatcatgacgctggaagaatcggttcagcatgtggtgatggaagccatccaagagctcatgaccaaagacacttccttgactccctgtcaccagagacgtatggcaactttgacagccagtcccgcaggtactatttcctaagtgaggaggctgaggagggggacgaattacagcagcgctgtctggatctggagcggcagctgatgctcctgtcagaggagaagcagagcctggcgcaagagaatgcagggctgcgggagcggatgggccggcctgaaggcgagggtaccccaggtctcactgccaagaagctgctgctgctgcaatcccagctggagcagttgcaggaggagaacttcaggctggagagtggcagggaggatgagcgcctgcgctgtgccgagctggagagggaggttgcggagcttgcagcaccggaaccaggcgctgactagcctggcccaggaggcacaggccctgaaggatgagatggatgaactacggcagtcttcggagcgtgctgggcagctggaggccacgctgaccagttgccggcgccgcttgggcgagctgagggagctgcggcggcaggtgcggcagctggaggaacgcaacgccggccacgccgagcgcacgcgacaactggaggatgagctacgccgagcgggctccctgcgcgcccagctggaggcgcagcggcggcaggtgcaggaactgctaggccagcggcaggaggaggccatgaaggccgagaaatggctatttgaatgccgcaacctggaggaaaagtatgagtcggtgacaaaggagaaggagcggctgttggcggagcgggactccttgcgggaggccaatgaggagctgcgctgcgcccagctgcagccgcgggggttgacccaggccgatccctcactggatcccacctccacacccgtggataacttagccgcagagatcctgcctgcggagctcagggagacgctcctgcggctttcatcttggagaacaagcggctgtgcaggcaggaggcggccgaccgggagcggcaggaaggaagctgcagcgccacctggaggatgccaacccgcgcgcgccacgggtttggagacgcagccaccggctgaaccagcaagcagcttattccgagctgcgggcccaggtggaggacctgcagaaagccctgcaggagcaggggggcaagactgaagatgccatttccattttgctgaaaaggaagctggaggaacatttgcagaagcttcatgaggcagatctggagttgcagaggaagcgggagtacattgaggagctggagccacccactgacagcagcacagccctggcggatcgaggagctgcagcataacttgcagaagaaggacgcggacttgcgggccatggaggagcgataccgccgctacgtggacaaggcccgcatggtcatgcagaccatggaacccaagcagcggccagctgcgggggcacctccagaactccattccctgaggacacagctccgagaacgggatgtccgcatccgacacctggagatggactttgagaaaagccgaagtcagcgggagcaggaagaaaagctgctcatcagtgcctgggtataatatgggcatggccttgcaagcagcgagctggggagggagccggcgcctgccccatgccccagtcatttcctgggcacagcagcgggctggcaaccaaattctcgcccgtggacccttgggacgcctggcatctctgaaccttcgccccactgacaagcactgacagacctcacaatcaagccagcctgggctccacccaccctggcttcctccagctcacatggcgcccagcactgggcttcagccaggtgctcgagagctttgaggccatgatctctgctcttccctctcccaagattggtggggagggagggcgggaggtagatatagcgcctgttctttttagcaattgtgattcttgttgttagattctctctctggagttcatgtgctgcctcaggagacatctgattttatatttgagaaaatagaggcgttacaatctcccctcgctgtctctggccacaaggtgagggaaaaaaagggggcccaatatttatcccccttttttttaaaaaaatatt

SEQ ID NO: 124132 - DNA, 690 bp, Homo sapiens
gcatcattcttaacaaagaagttaaatattggtgggaaaagagtaaaccttgccatatggaaaaaaataatgagagggggggaacaggcgcgcctgccagcacttcccaaccccaagcccgacggatcaccccaggtcaagagcggcacaccagcccacccactatggaaaaatccggtccctacgggaaacccaaaaattagccggcagctaagacaggctgggtctggggaatcaggactgcagaaaagaaaatcaagatgcagcagcagcaagtctgaccagcaggtaatctacctaaaagagcaaaaagttaagggccatggttgctgtgtccatataccaacattgctgtggaatactgaatctgggaatgctgaaccacagactctagcaccagcccaaaatgccaagagcagccttctatcagaagctttgtcttcaaatgtgatggtttatatgctcctgaacttacattcttatgagtcaggaggccagcatcttaacagggacacagccaccaggaagttcaaaccagaaatcttgatgaattcctggaggccaacaagaggccagctccagaatgtgaagctgctggagggtcccataaagggaggtctccccctacccgctccaccctgggcttttcctccaggaaacccacgaggctcccatagggtcaaaggttaa

SEQ ID NO: 124133 - DNA, 1107 bp, Homo sapiens
atgaaactcatggaaacacttaaccagtgcataaacgctggtcatgaaatgacgaaggctatcgccattgcacagtttaatgatgacagcccggaagcgaggaaaataacccggcgctggagaataggtgaagcagcggatttagttggggtttcttctcaggctatcagagatgccgagaaagcagggcgactaccgcacccggatatggaaattcgaggacgggttgagcaacgtgttggttatacaattgaacaaattaatcatatgcgtgatgtgtttggtacgcgattgcgacgtgctgaagacgtatttccaccggtgatcggggttgctgcccataaaggtggcgtttacaaaacctcagtttctgttcatcttgctcaggatctggctctgaaggggctacgtgttttgctcgtggaaggtaacgacccccagggaacagcctcaatgtatcacggatgggtaccagatcttcatattcatgcagaagacactctcctgcctttctatcttggggaaaaggacgatgtcacttatgcaataaagcccacttgctggccggggcttgacattattccttcctgtctggctctgcaccgtattgaaactgagttaatgggcaaatttgatgaaggtaaactgcccaccgatccacacctgatgctccgactggccattgaaactgttgctcatgactatgatgtcatagttattgacagcgcgcctaacctgggtatcggcacgattaatgtcgtatgtgctgctgatgtgctgattgttcccacgcctgctgagttgtttgactacacctccgcactgcagtttttcgatatgcttcgtgatctgctcaagaacgttgatcttaaagggtatgcagaatctgtgggagcaaaacattatcatacttcagccaaacagaacaaaggaattgaggaactctttcttgacctttgtaaaaggatgatagaaacagcacaagtggatgagagagcaaaaggcaatggctctagtcagccgggaactgcaaggcgaggtgtacagattattgatgatgaacctcaagcccagaccagtggtggagggtgctgttcttctggataa

SEQ ID NO: 124134 - DNA, 2629 bp, Homo sapiens
atggctgcggccggcggcggcggcggcggggcggcggcggcgggccgagcctactcgttcaaggtggtgctgctgggggaaggctgcgtggggaagacgtcgctggtgctgcgctactgcgagaacaagtttaacgacaagcacatcaccactctgcaggcatcattcttaacaaagaagttaaatattggtgggaaaagagtaaaccttgccatatgggatacggcaggtcaagagagattccatgcattgggtccaatttactacagagattcaaatggagcgattttagtttatgacataacagatgaagattcttttcagaaggtaaaaaactgggtcaaagaattacggaaaatgttgggaaatggaaacctgtttatgtatagttggtaataaaatagacttggaaaaggagagacatgtttccattcaagaagcagagtcgtatgcagaatctgtgggagcaaaacattatcatacttcagccaaacagaacaaaggaattgaggaactctttcttgacctttgtaaaaggatgatagaaacagcacaagtggatgagagagcaaaaggcaatggctctagtcagccgggaactgcaaggcgaggtgtacagattattgatgatgaacctcaagcccagaccagtggtggagggtgctgttcttctggataactgttcacgcctaagaaattaaaagacagaacaaaactgtggatcattgccctcaacatgaagactgccatattccaagtcacattattttaccaatggaattatagaattaacagtattttaaattacgtttataacactgcagagaccttaagtgctaaacttagtggagtttgtgaccagagaattggcattttctacaaatgtttttttttggtttttttttggttttttttgggtttttttgagacggagtctcgctctgtcacccaggctggagtgcactggcttgatctcggctcactgcaagctccacctcccaggttcacgccattcttctgcctcagcctcccgagtaggtgggactacaggcacaccgcaaccatgcccggctaattttgtttttgtattttttagtagagaaggggtttcaccaggatgtgttagccaggatggtctcgatctcttgacctcgtgatcccgcccggctttgggcctcccaaagtgctcggattacaggcatgagccactgcacctgaccaaccataacaatttttttttttgagacggagtcttgctctgtcgcccaggctggagtgcagtggcgcgatctcggctgactgcaagctccacctcccaggttcgtgccattcttctgcctcagcctcccgagtagctgggactacaggcgcccaccaccatgcctagctaattttttgtattttttttttagtagagacagggtttcaccgtgttagccgggatggtctcgatctcctgacctcgtgatccgcctgcctcggcctcccaaagtgctgagattacaggcatgagccatcgtctgcgcttctatttcgatcaccaagatgtggctcggaatgcggggcttacttcttccatgaattggccaaggagaagcgcaagcttggaccaggagttgctaccttgtgcggagaacgtgtggtgcataagaaaaccgagcctctgctcttcgaaaatgtatattctggccagggcgaggccagccagcgcacaactgcagggggcgccgttcccacagcagccctgcaaaggagtgtgcctgagaaacttccgcctcccctgcacccagccctgtttaggcacgaggctgaatcaatggggtcatcccgcttcaagccagtgcctcttcccagctcccatggggaccaccgaagccagctccggatggaaaacgtggacgtgaaggaggaatggcaggacgaagatttcccaggacctctggcagccccgtgcaaatgttctgcccggaatggaatatttcccagggtagccaaggagccagtgccctgggtcaaactcgggcagcacgggctgcggcttcaagaagtgatctgggccggagacacccccgtggccaccgccaagaacatgcccggggacagcgcggatcatttggggacggcacgacggaggacggcagcgccgccaacgggcgcctgggcggacagtgatcatcggggagcaagagcaccgtatagacctgcacatatccggccttacatgaaagtggtcacccacggagggggttcgcagtgcccctctctgatgcacggggatgttaagccgtcaactcgcttcggtggacggactgtgggcaaggcgtgcatgggtactacggcgaaggctcaacgccatcatcgtcttcgcagcctgcttccttccagacagcagcctcccgactaccactacatcatggagaacctcttccttccgccaggacagcagacaacacctggaccagtggggctgaccagccagcggcaggagtggaggcaggcagggtcggcaccgcaggtgtcctaccctggacccctccatgttgggtccctgccttctgtgccccgtgagcagtacgtcatcagcagcttagagctcctggtggctgaggactacatgatctgtacctga

SEQ ID NO: 124135 - DNA, 1470 bp, Homo sapiens
atggccctggtctgcctgggcgccgatatcacgaggacgcgccggccgacagcagggcgaggcggcaagagggaccgcagcagcccccgcttccgcacggcccgccgggtcgcgaggaggctgggtcaggagcccgttgccagccctggagatctcccaggagagcggagaggatggggtgtgtgcggccacatcgcgggaacccagtccagggccctgcagcggccccacggcgccccccagggacgagaagcagaggtgcaggagccggagcccccactggtgccccaggctctcctgctggtcagaggccctgctgcggccagggaggaagccgtccagccaccgaaggaagaagtcacacagcgaccgggcggtcactcttccccagatgtgtttgcacatctgaaggggccacgtcctgtcgtcgaaatccgcatcgaggcaggggtgtggctgctggtgttctcagctatctccccggaatctagcactgggcctgccacacaggtgctcagtaaatacgtgttgaagagtgaatggatgggtgagtgtcccagcccggggcgcggtagcgccaccaaacggaagaagaagcagcggcggaaccgcaccacgttcaacagcagccaactgcaggcgctggagcgcgtgttcgagcgcacgcactaccccgacgcctttgtgcgcgaggagcttgcccggcgcgtcaacctcaacgaggcgcgcgttcaggtctggtttcagaaccgccgcgccaagttccgcaggaatgaaagggccatgctggccagccgctctgcctcgctgctcaacacagtgccaccctacagccctgggagctcaggccccgcaaccccaggggtcaacatggccaacagcatcgccagcctccgtctcaaggccaaggagttcagcctgcaccacagccaggtccggggcctaggttggcaggatcccacatctccagatggggcattccgagctgcattctggatgcagtggcggcatggagatctgtcaggtggcacagaactactgccatggctggattccgaggagacgggccatatccccgttttacaaatgaggaaactaactcagcgaggggagacgccgtgtccagggacacacagtaagcaggtggcccaggaggaccccagaacccggctggaggtggcggtggggggcgaggggtgcctgcggaaggagaggaacaggagcagcgggagtccccacagcctacaggggctggaggaggtccagatgccattggaagcatcttcctttgacatccatgaaggcagacctcgaagcctgcctgaggagaaggccgccctgccagtggcgtccgagcgggtgtttgggagtgtcggaaaacggctggagagtttgcccaaagccctgtaccctggggccaaggaggagaccctggccagctcctcgtgttgggactgcgctggcctgtga

SEQ ID NO: 124136 - DNA, 244 bp, Homo sapiens
cacagtgccaccctacagccctgggagctcaggccccgcaaccccaggggtcaacatggccaacagcatcgccagcctccgtctcaaggccaaggagttcagcctgcaccacagccaggtccggggcctaggttggcaggatcccacatctccagatggggcattccgagctgcattctggatgcagtggcggcatggagatctgtcaggtggcacagaactactgccatggctggattccgag

SEQ ID NO: 124137 - DNA, 257 bp, Homo sapiens
atgtggtccatccgtacagtggaatgtgattcggccttcagaaggaaggagactctgacgcatgctacacgggtgagccctgtagacgtcacattaagtgaaataagacggtcacagaacggcaaatactgtaggattccacttacatacgagatccctaggatgcaagcacttcatcttccgaaatctctggaaaatgaatccacgtgggatcccaaggtttctcctgcagtgaatcctggggttttccaaagcag

SEQ ID NO: 124138 - DNA, 558 bp, Homo sapiens
gcggccgccgccttcgccctggacaagccggcgctgggcccggggccgccgccgcctccacccgcgctggggcccggcgactgcgcccaggcgcgcaagaacttctcggtgagccacctcctggacctggaagaggtggcggcggccgggcggctggcggcgcgccccggggccagggccgaggcgcgggagggcgcagcacgggagccgtccgggggcagcagcggcagcgaggcggcgccgcaggatggtgagtgtcccagcccggggcgcggtagcgccgccaagcggaagaagaagcagcggcggaaccgcaccacgttcaacagcagccaactgcaggcgctggagcgcgtgttcgagcgcacgcactaccccgacgcctttgtgcgcgaggagcttgcccggcgcgtcaacctcagcgaggggcgcgttcaggtctggtttcagaaccgccgcgccaagttccgcaggaatgaaagggccatgctggccagccgctctgcctcgctgctcaagtcctacagccaggaggccgccatcgagcagcccgtggct

SEQ ID NO: 124139 - DNA, 1007 bp, Homo sapiens
tttttttttttttttttggggcttaaaaaaatggttttatttcttaaagacaaaagctttttggttttaatacacaaactaaatgaggtccttggcaggctcttccaccttccggcccaacccctccaagggttgtgggctgcagtctctggtggccaaggacagaagagctgggcccggctgcaggggcctcaacagccctcgtgggctcggggagtccaggctggacagacgggccaggagagctcatccaggagaaggtcacttcctggggcgtctgcccccttttcttattgctgtccacccagggagggcgtctgggtcctggggggactggacttcagttcaccgtaggcacctggctgtggtgcaggctgaactccttggccttgagacggaggctggcgatgctgttggccatgttgacccctggggttgcggggcctgagctcccagggctgtagggtggcactgtgctgtagggggacgaggctgtccaggagagataatctggactcaagggcggtgggccggggagcccacgggctgctcgatggcggcctcctggctgtaggacttgagcagcgaggcagagcggcttgcccagcatggccctttcattcctgcgggactttggcgccgcggttctgaaaccagacgtgatcctcattttccaggtaggcaggtgcctgaacgcgcgcctcgctgaggttgacgcgccgggcaagctcctcgcgcacaaaggcgtcggggtagtgcgtgcgctcgaacacgcgctccagcgcctgcagttggctgctgttgaacgtggtgcggttccgccgctgcttcttcttccgcttggcggcgctaccgcgccccgggctgggacactcacagtatttgccgttctgtgaccgtcttatttcacttaatgtgacgtctacagggctcacccgtgtagcatgcgtcagagtctccttccttctgaaggccgaatcacattccactgtacggatggaccacat

SEQ ID NO: 124140 - DNA, 594 bp, Homo sapiens
atggaaaaagaaaaaggaaatgatgatggaataccagaccaagggaatttcttggatttttccgaacactttaaccaacttgaatttttggaaacacatggacaccttattcctactggtgctcaaagtctttgggtaggcaattctgaagaagacgaagagcaagatgaaaaaaatgaagagtggtatcaattgcaagaaaaaacaatggaaaaagacccaagcaaattgcttctttgggctgctgaaaaaaatcggcttactacagtacagagactactttctgaaaaggctgctcatgtgaacactagggatgaagatgagtatacccctcttcatcgtgcagcctacagtggacaccatgatgcagatatcaatgcccaaacaaaaggcctcttggcccccttgcatcttgctgctgggaacagagacagcaaggataccctagaactcctcctggtgaactgttacatcaagccagggctgaaaaacaacttggaagaaactgcatttgatattgccaggaggacaagtgtctatcactacctctttgaaattgtggaaggctgtgcaaattcttcacctcagtcttaa

SEQ ID NO: 124141 - DNA, 1926 bp, Homo sapiens
cggaagtgagatgcaaggcggcgattttcccttctgtcagatcttgatgaataaagttttcataattcatctctagaaagatttatatcctggcatttgaaatgctttttatttagaatagtagtaaaaaatggaaaaagaaaaaggaaatgatgatggaataccagaccaagagaattccttggatttttctgaacactttaaccaacttgaattgttggaaacacatggacaccttattcctactggtactcaaagtctttgggtaggcaattctgatgaagatgaggagcaagatgacaaaaatgaagagtggtatcgattgcaagaaaaaaaaatggaaaaagacccaagcagattgcttctttgggctgctgaaaaaaatcggcttaccacagtgcggagactgctttctgaaaaggccactcacgtgaacactaagggatgaagatgagtatacccctcttcatcgagcagcctacagtggacacttagatattgttcaggagctcattgcacagggggccgatgttcatgcagtgactgtggatggctggacgcccctgcacagtgcttgtaagtggaataataccagagtggcttctttcttactgcagcatgatgcagatatcaatgcccaaacaaaaggcctcttgacccccttgcatcttgctgctgggaacagagacagcaaggataccctagaactcctcctgatgaaccgttacgtcaaaccagggctgaaaaacaacttggaagaaactgcatttgatattgccaggaggacaagtatctatcactacctctttgaaattgtggaaggctgtacaaattcttcacctcagtcttaacaattctagtaattttcctaagtttctaaataccagtgcctcctgtgtgtgagatgtattcccataatcaaagttgacgtcaaacatcttactaccaaaaattccagtgacattcattataacattcttcccaagtgaattgcctgactttgatgtccaaaatgtatttgaaagtaatttgcatatatctttaattatttctgtggagtttgtgatttttttatcagaaataattttaatgtgtgtatacttaaacacttgacacgggttgtacagaaactggtatttttggtgctgatacaagagaaatgtatttttaaatatcccacatcctggatctttgttgggtatttagtatattgacatatatttttataaggtgaggtaactcagaacttaatttaaaagtcttaaatattctgatacaattcagctgtcttctctaccttaccatagccagttgctttcattttaaaccagagcaagtaacatattagtgacttgaatcttcataagtaaaaggacaaaacatcaaaaaacctagatctttgtcttttagaacacagaccattttcaggaaagcagttagctaagtgtttaattcatgaatattgaatactgcatcccctaccacaatttacacaatcctgtggatagccctacctcaccccggtcaaccctacatgacccttaagcctaatggcgaatcacgatgacccttgtagacatgcacacaactatacctttgtccaacagatcataatatatctgcctatcccaactggttttacctgcctaatcctactgatttgggcactgcttgtatagtctctcaagttcacaggaaatgttgattttctaagggtcctcatttttacagagtatacaggcaaagtgacaggggaaaaggaattagtctaagagtaaggggatgaattattatattgaggctaaaaccacaaagtggctcaggctttaaaaaaaaaaacactgtggataatgacaaaaagcataagtaaaaatatttgagaaaaataaagtacaagttttgaacaacaaaaaaaaaaaaaaaaaa

SEQ ID NO: 124142 - DNA, 395 bp, Homo sapiens; identical to SEQ ID NO: 118244
  misc_feature (1)...(395): n = a,t,c or g

SEQ ID NO: 124143 - DNA, 461 bp, Homo sapiens; identical to SEQ ID NO: 86076
  misc_feature (1)...(461): n = a,t,c or g

SEQ ID NO: 124144 - DNA, 749 bp, Homo sapiens
aggagatcctagtctcactagccattggcaattaacaaaggaggctgaggcagagttacagctgattgaaaagcaagtccataaagctcaaataaatagaatagatccagagaagattccagatttgctaattttttcaactcagcattctactggtgttattgttcaagagcaaggtcttgtagagtggctttttcttccacatactaattcacggactctaactccttatgtggatcaaatcgctactatgataggaaatgggagaactcagattgttaaattacatggatattatcctggaaaaattattgtccctctcatgaaggcacaaatacagcaagcttttataaatagtcttacttggcaaacccatttagctgactttgtggttattctcgataatcattttcctaaaatgaaactgtttcaatttttgaaattaactaattggattctccctaaaataactaaatttaaaccaattaaaggtgctgaaaatgtcttcacagatgggtctagtaatggtaaagcttcttattctgaattgaaaggacttttaactgaagggaatcaagtggctgaacacctagttgctactgcaatatctaatgctagacactttcacaatttaacccatgttaatgccgctggtctcaaacgcagatacagcattacctggaaagaagctaaagctattatccagcaatgtccaacttgccaaatgttgtattcctcatcttttacag

SEQ ID NO: 124145 - DNA, 1339 bp, Homo sapiens
atgggacaagtgtgggttctggttcattccaccttggaaccttttcacactaataatgaggaggaagcaaagtataacgaagtaacagaagaggtgacagagcaggtttgtttgccagctaaagctaacgcagcaaaggagaaagaggttcatccctacccttctgcacctcttaattattttgaagaaaaggagtggcctgaccctccagatctttcttttctggaggacactggaggagatcctagtctcactagccattggcaattaacaaaggaggctgaggcagagttacagctgattgaaaagcaagtccataaagctcaaataaatagaatagatccagagaagattccagatttgctaattttttcaactcagcattcacctactggtgttattgtccaagaacaggacttagtagagtggttttttcttccacatactgattcatggactctaactccttatttagatcaaatcactactatgataggaattgggagaactcggattgttaaattacatggatatgatcctggaaaaattattgtccctctcatgaaggcacaaatacagcaagcttttataaatagtcttacttggcaaacccatttagctgactttgtgggtattctcgataatcattttcctaaaatgaagctgtttcagtttctgaaattaactaattgcattctccccaaaataactaaatttaaaccaattgaaggtgctgagaatgtttttacagatgggtctagtaatggtaaagcatcttattttggatcaaaacgtaaagttttccagacaccctatacttctgctcaaaaagtggagcttgtagctgtaattgaattattgactgcttttgatatgcctattaatgtgatttctgattcttcatacgtggttcattccacacagttaattgaaaatgctcagttacgatttcatacagaagaaaaactgatgactttatttacccaattgcaaacagcagttagaagtagaatgcaccgattttacatcactcacattagggctcgctcatacacctcttccaggacctttgactgaagggaatcaaatggccgattgcctagttgctactgcagtatctaatgctagacactttcacagtttaacccatgttaatgcctctggtctcaaacacagatacagcattacctggaaagaagctaaagctattatccagcgatgcccaacttgccaagtggtacattcctcatcttttacaggaggagttaatcctagaggactggaacctaactcttttggcaaatggatgtcacacatgttccctcgtttgggagactag

SEQ ID NO: 124146 - DNA, 1268 bp, Homo sapiens
  misc_feature (1)...(1268): n = a,t,c or g
atgccacagaacagcttagaggagtgtgcattagagcttgggaaaaaatcacttcaggaaaatgtcaataattttcctaaaacaaagctgtttcagtttttgaaattaactaattggattctccctaaaataactaaatttaaaccaattgaaggtgctgagaatgttttcacagatgggtctagtaacggtaaagcttcttattttggattaaaaggtaaagttttccagacgccctatactgcagctcaaaaagtggagctggtagcggtaattgaggtattgactgcttttgatatgcctgttagtatgatttctgattctacatacgtggttcattccacacagttaactgaaaatgctcagttacgacttcatacagatgaacaactgatgactttattttctcaactgcaaacagcagttagaatgttttgcggtgatgggcattccagcttctaggaaaacagataatgtcccaggctatactatccaaactctagctacatttttctctatgtggaatattaaacacattactggtatcccatataattctcaaggacaagccatagtgggaagaataaatctttccctaaaacagcggttgcaaaagcagaaagagggaaatagagaatacagaaccccacagatgcaattgaatctagcattattagctttaatttttttgagcctgtccaaaggccagatgttatcagcagctgaacagcatctccagaaaccacctgcaaagacagaagcagaacaactgatttggtggagagatacaaaaacaagaagttgggaaataggtaaaataataacttgcggtagaggttatgcttgtgtttctccaggccaaaatcaacagccaatttggacaccatcaagacacctgaaaccctatcatgagccagatgccaaggaagagattccgggaggatcccgaggacccccccagttgcagccatgtcaagactgatgctgaggaggaccccaactgtcacgagcaacacccgtcaaacacagccatccacctgaggtcagatcaagaagctgtcacagatggcagaagaaaacctgaggaaagcgggacaaccagtcacaatgaataatttaatggcagctatgatagcggntatcaccactgcctctgcagatgcagatcccgattcctgcaagaagtagctcaccgtgacaaagcagcccttgcttttatctccttacaaatcaaagaagggagagatgttgggagcaagctccccaaa

SEQ ID NO: 124147 - DNA, 786 bp, Homo sapiens
gactctgtctgttggaccaatttgatgcctgtgcacgctcagggctctctgaaccccgctccttgactctcagggtcccctcttgcggaaagcccctcccgggaccaggagccaggctgggcagggaggtgacaccctgcctctcttttgcatttgcttggtgctggctgaagatgtgccaggaggaacagaccagctacatggtggtgcagacgagcgaggaggggctggcggctgacgccgagctcccgggaccgctcctgatgctggcccagaactgcgcagtcatgcacaacctgctgggccctgcctgcattttcctgcgcaagggcttcgctgagaacaggcagcctgtacagctccgagaggccttcagagaattcgacaaggacaaggatggctacatcaactgccgggatctgggcaactgcatgcgcaccatgggctacatgcccaccgagatggagctcatcgaactgtcccagcagatcaacatgaacctgggtggccatgtagattttgatgacttcgtggagctaatggggcctaaactcctggcggagacagcagatatgattggtgtaaaggaactgcggagatgctttccgagagtttgacaccaatggtgatggggaaataagcaccagtgagctgcgagaggctatgaggaagctcctgggtcatcaggtgggacaccgagacatagaggaaattatccgagatgtggacctcaatggggatggacgagtggactttgaagcacccttccctggttcctcaaactga

SEQ ID NO: 124148 - DNA, 565 bp, Homo sapiens
  misc_feature (1)...(565): n = a,t,c or g
cataaggccaggctcaccgtgaatgtgttgccatcattcaccaaacgcccnnacgacataaccatccggaccaccaccatggcccgcctcgaatgtgctgccacaggtcacccaaaccctcagattgcctggcagaaggatggaggcacggatttccccgctgcccgtgagcgacgcatgcatgtcatgccggatgacaggacagctccccgggaaacagagggtgccactgctgttggcaccaaaaagctaggttttgtctacctcagttcttgtcataccaatctctacgggaaagagaggtaggagaggctgcgaggaagcttgggttcaagcgtcactcatctgtacatagttgtaactcccatgtggagtatcagtcgctcacaggacttggatctgaagcacagtaaacgcaagaggggatttgtgtacaaaaggcaaaaaaaagtatttgatatcattgtacataagagttttcagagatttcatatatatcttttacagaggctattttaatctttagtgcatggttaacagaaaaaaattatacaattttgacaat

SEQ ID NO: 124149 - DNA, 449 bp, Homo sapiens
ttttttttttctttctctcaacccttcctgtttcgctttccttccctggccttaatttctggatgtttggaaactacaggactctgtttggaaacaagatcaagtctgtggctaagagagcattctcggggctggaaggcctggagcacctgtgagtatctcaccagccctgccctgaggcacagcctgctgaatgcggctgccggggagttctgctagcaatttaatcgcatctttgtaaactgagaaacaggctatttggaaacaccagctgcttccttctcattatgtcagcttcagctttggcctttatgttgcctatgccaggaacagttacagaacatatggccagtggatgtgctcccagttaattcagttggtatttggataaataccctacccgctcctgctgcgcagcctaacccctgcactggctccttcatggaccc

SEQ ID NO: 124150 - DNA, 383 bp, Homo sapiens
catctctctgcacagcgctgatggtcgtcactgggaggatcccctttctgagcttgacagtgaacgtgtgtctgcatttcttgtcactgagaccctggtgttctatttgttctgtctccttgcagatgaaaccgtcgtgccaccagatgttccaagctacctctcttctcaggggaccctttctgaccgacaagaaaccgtggtcaggaccgagggtggccctcaggccaatgggcacattgagagcaatggtaaggcctcagtaaccgtgaagcagagctctgctgtgactgtgtctctgggtgctggaggtggcctccaggtctttacagggcaggtacctggcattagatggggcaaacttggtgaagcccacgcgtccg

SEQ ID NO: 124151 - DNA, 2973 bp, Homo sapiens
acgcgtccgcaccgtggcccgcctcgaatgtgctgccacaggtcacccaaaccctcagattgcctggcagaaggatggaggcacggatttccccgctgcccgtgagcgacgcatgcatgtcatgccggatgacgacgtgtttttcatcactgatgtgaaaatagatgacgcaggggtttacagctgtactgctcagaactcagccggttctatttcagctaatgccaccctgactgtcctagagaccccatccttggtggtccccttggaagaccgtgtggtatctgtgggagaaacagtggccctccaatgcaaagccacggggaaccctccgccccgcatcacctggttcaagggggaccgcccgctgagcctcactgagcggcaccacctgacccctgacaaccagctcctggtggttcagaacgtggtggcagaggatgcgggccgatatacctgtgagatgtccaacaccctgggcacggagcgagctcacagccagctgagcgtcctgcccgcagcaggctgcaggaaggatgggaccacggtaggcatcttcaccattgctgtcgtgagcagcatcgtcctgacgtcactggtctgggtgtgcatcatctaccagaccaggaagaagagtgaagagtacagtgtcaccaacacagatgaaaccgtcgtgccaccagatgttccaagctacctctcttctcaggggaccctttctgaccgacaagaaaccgtggtcaggaccgagggtggccctcaggccaatgggcacattgagagcaatggtgtgtgtccaagagatgcaagccactttccagagcccgacactcacagcgttgcctgcaggcagccaaagctctgtgctgggtctgcgtatcacaaagagccgtggaaagcgatggagaaagctgaagggacacctgggccacataagatggaacacggtggccgggtcgtatgcagtgactgcaacaccgaagtgggactgttactccaggggacaagccttccacccccagcctgtgtccagagacagcacacagccaagtgcgccaaatggcccggagccgggtggggagtgaccaagagcatttttccacattcaccagttgcagcaggactgccgctgggtcctgccccagagtgccaagggtcgctctaccccagtaaccacgatagaatgctgacggctgtgaagaaaaagccaatggcatctctagatgggaaaggggattcttcctggactttagcaagggtgtatcacccggactccacagagctacagcctgcatcttcattaacttcaggcagtccagagcgcgcggaagcccagtacttgcttgtttccaatggccacctccccaaagcatgtgacgccagtcccgagtccacgccactgacaggacagctccccgggaaacagagggtgccactgctgttggcaccaaaaagctaggttttgtctacctcagttcttgtcataccaatctctacgggaaagagaggtaggagaggctgcgaggaagcttgggttcaagcgttcactcatctgtacatagttgtaactcccatgtggagtatcagtcgctcacaggacttggatctgaagcacagtaaacgcaagaggggatttgtgtacaaaaggcaaaaaaaagtatttgatatcattgtacataagagttttcagagatttcatatatatctttttacagaggctattttaaatctttagtggcatggtttaacagaaaaaaattattacaattttggacaatattatttttcgtatccggttgctgtttaattttgggagggggtggggaaatagttctggtgccttaacgcatggctggaatttatagaggctacaaccacatttgttcacaggagtttttggtgcggggtgggaaggatggaaggccttggatttatattgcacttcatagacccctaggctgctgtgcggtgggactccacatgcgccggaaggagcttcaggtgagcactgctcatgtgtggatgcccctgcaacaggcttccctgtctgtagagccaggggtgcaagtgccatccacacttgcagtgaatggcttttccttttaggtttaagtcctgtctgtctgtaaggcgtagaatctgtccgtctgtaaggcgtagaatgagggttgttaatccatcacaagcaaaaggtcagaacagttaaacactgcctttcctcctcctcttattttatgataaaagcaaatgtggccttctcagtatcattcgattgctatttgagacttttaaattaaggtaaaggctgctggtgttggtaacctgtggatttttctatactgatgttttcgttttgccaatataatgagtattacattggccttgggggacagaaaggaggaagttctgacttttcagggctaccttatttctactaaggacccagagcaggcctgtccatgccattccttcgcacagatgaaactgagctgggactggaaaggacagcccttgacctgggttctgggtataatttgcacttttgagactggtagctaaccatcttatgagtgccaatgtgtcatttagtaaaacttaaatagaaacaaggtccttcaaatgttcctttggccaaaagctgaagggagttactgagaaaatagttaacaattactgtcaggtgtcatcactgttcaaaaggtaagcacatttagaattttgttcttgacagttaactgactaatcttacttccacaaaatatgtgaatttgctgcttctgagaggcaatgtgaaagagggagtattacttttatgtacaaagttatttatttatagaaattttggtacagtgtacattgaaaaccatgtaaaatattgaagtgtctaacaaatggcattgaagtgtctttaataaaggttcatttataaatgtcaaaaaaaaattttttaaaaattaaaaaaaaaaaaaaaaa

SEQ ID NO: 124152 - DNA, 2436 bp, Homo sapiens
gcctggccgagctgagcagcctgagtgtcctgcgtctcagccacaattccatcagccacattgcggagggtgccttcaagggactcaggagcctgcgagtcttggatctggaccataacgagatttcgggcacaatagaggacacgagcggcgccttctcagggctcgacagcctcagcaagctgactctgtttggaaacaagatcaagtctgtggctaagagagcattctcggggctggaaggcctggagcacctgaaccttggagggaatgcgatcagatctgtccagtttgatgcctttgtgaagatgaagaatcttaaagagctccatatcagcagcgacagcttcctgtgtgactgccagctgaagtggctgcccccgtggctaattggcaggatgctgcaggcctttgtgacagccacctgtgcccacccagaatcactgaagggtcagagcattttctctgtgccaccagagagtttcgtgtgcgatgacttcctgaagccacagatcatcacccagccagaaaccaccatggctatggtgggcaaggacatccggtttacatgctcagcagccagcagcagcagctcccccatgacctttgcctggaagaaagacaatgaagtcctgaccaatgcagacatggagaactttgtccacgtccacgcgcaggacggggaagtgatggagtacaccaccatcctgcacctccgtcaggtcactttcgggcacgagggccgctaccaatgtgtcatcaccaaccactttggctccacctattcacataaggccaggctcaccgtgaatgtgttgccatcattcaccaaaacgccccacgacataaccatccggaccaccaccatggcccgcctcgaatgtgctgccacaggtcacccaaaccctcagattgcctggcagaaggatggaggcacggatttccccgctgcccgtgagcgacgcatgcatgtcatgccggatgacgacgtgtttttcatcactgatgtgaaaatagatgacgcaggggtttacagctgtactgctcagaactcagccggttctatttcagctaatgccaccctgactgtcctagagaccccatccttggtggtccccttggaagaccgtgtggtatctgtgggagaaacagtggccctccaatgcaaagccacggggaaccctccgccccgcatcacctggttcaagggggaccgcccgctgagcctcactgagcggcaccacttgacccctgacaaccagctcctggtggttcagaacgtggtggcagaggatgcgggccgatatacctgtgagatgtccaacaccctgggcacggagcgagctcacagccagctgagcgtcctgcccgcagcaggctgcaggaaggatgggaccacggtaggcatcttcaccattgctgtcgtgagcagcatcgtcctgacgtcactggtctgggtgtgcatcatctaccagaccaggaagaagagtgaagagtacagtgtcaccaacacagatgaaaccgtcgtgccaccagatgttccaagctacctctcttctcaggggaccctttctgaccgacaagaaaccgtggtcaggaccgagggtggccctcaggccaatgggcacattgagagcaatggtaaggcctcagtaactgtgaagcagagctctgctgtgactgtgtctctgggtgctggaggtggcctccaggtctttacagggcaggtacctggcattagatggggcaaacttggtgaagtagaaggcggtgtgtgtccaagagatgcaagccactttccagagcccgacactcacagcgttgcctgcaggcagccaaagctctgtgctgggtctgcgtatcacaaagagccgtggaaagcgatggagaaagctgaagggacacctgggccacataagatggaacacggtggccgggtcgtatgcagtgactgcaacaccgaagtggactgttactccaggggacaagccttccacccccagcctgtgtccagagacagcgcacagccaagtgcgccaaatggcccggagccgggtgggagtgaccaagagcattctccacatcaccagtgcagcaggactgccgctgggtcctgccccgagtgccaagggtcgctctaccccagtaaccacgatagaatgctgacggctgtgaagaaaaagccaatggcatctctagatgggaaaggggattcttcctggactttagcaaggttgtatcacccggactccacagagctacagcctgcatcttcattaacttcaggcaggtccagagcgcgcggaagcccagtacttgcttgtttccaatggccacctccccaaagcatgtgacgccagtcccgagtccacgccactgacaggacagctccccgggaaacagagggtgccactgctgttggcaccaaaaagctag

SEQ ID NO: 124153 - DNA, 602 bp, Homo sapiens
  misc_feature (1)...(602): n = a,t,c or g
cggaaccagggccaggcgaggaccaactccacctccgcacagaaaaatgagagagagtctatcagacagaagttggcacttggaagcttctttgatgatggcccaggaatttataccagctgtagcaaaagtgggaagccaagcctttcctcccggcttgaatgaagagttggtccagctgcttctcatccgagatgagctgcacacagagcaggatgccatgctggtggacattgaagacttgaccagacatgctgaaagtcagcagaagcacatggcagagaaaatgcctgcaaagtgaaaagaagccattcaaccagagaacaagctagaatttattttgcttctgtggttgtaaaaatgctgttgctaaaggtgggcgcagaaacaaatatcagtgttagtcattgataatgtctgaagcttaatgtccagtgattggcctttgcttcttaatttattttaattttttacttgtgccacttaatatcaggcattttaataaaatattgttacaaaaaatgtacagtactgacaccaccacnaatcatgggntaataaaagagagtagttttaactttatttttatttggttagagatt

SEQ ID NO: 124154 - DNA, 566 bp, Homo sapiens
cagaaaacagcagctgcccggtgccagagcaaggaaaggccagggaggctgggcggggcagtgtctgtgggacagagtggggcaagaacacacacggccgggcacagcctcttagccagctctccatgtcagtatgagcagtaaccagggaactgggcaattggcacatcagcctatcagaattcatgggaggttatttcttaagtgaaattctaaagagttaaaggatgaatttggacagtgatggaatggatgacatcatcagtcaagaatcctcattggatatggaggggaattataaaaaggcacagaaaaatgagagagagtctatcagacagaagttggcacttggaagcttctttgatgatggcccaggaattttataccagctgtagcaaaagtgggaagccaagcctttcctcccggcttgaatgaagagttggtccagctgcttctcatccgagatgagctgcacacagagcaggatgccatgctggtggacattgaagacttgaccagacatgctgaaagtcagcagaagcacatggcagagaaaatgcctgcaa

SEQ ID NO: 124155 - DNA, 1787 bp, Homo sapiens
agcgcgaccagcgagggtaccgggatgaccgctctccggcccgggaaccgggggacgtaagcgccaggacccgcagcggcggcggcgggggcaggagcgccaccaccgccatgccgcccccggtgcccaacggcaacctccaccagcacgacccccaggacctcaggcacaatggcaacgtggtggtggctggccggccgagctgttcccggggcccccgccgggcgatccaaaagccccagccggctgggggccggcgcagtggccgcggcccggcggctggggggctctgccttcagcccccagacggcgggacgtgcgtccccgaagagcccccggtgccacctatggattgggaggcgctggagaagcatctggccgggctgcagttccgggagcaggaggtacggaaccaggggccaggcgaggaccaactccacctccgcacagaaaaatgagagagagtctatcagacagaagttggcacttggaagcttctttgatgatggcccaggaatttataccagctgtagcaaaagtgggaagccaagcctttcctcccgactgcagagtgggatgaacttgcagatatgctttgtcaacgacagtgggcagtgataaggacagtgatgctgatgacagtaagactgaaaccagcttggacacccccttgtctcccatgagcaaacagagttcttcctattcttgatagagacactacttgaagaggagtctgaatccttgggatggacatgggacttcctttacaagggcaaaagaaatttgcaagctgaagccaaaatggcccttgccatggccaaaccaatggccaaaatgcaagtagaagtggagaaacagaacaggaaaaagtctcccgtcgctgatcttctgccacacatgcctcatataagtgaatgcttgatgaaaagaagtttaaaacccacggaccttagagaccattataatggggcagttacaagtaatagtcaatgatttcatttcccagtataaaaagcttgaatgaggagtgggtccagctgcttctcatcccaggatgagctgcacacagagcaggatgccatgctggtggacattgaagacttgaccagacatgctgaaagtcagcagaagcacatggcagagaaaatgcctgcaaagtgaaaagaagccatttcaaccagagaacaagctagaatttattttgcttctgtggttgtaaaaatgctgttgctaaaggtggcgcaaaaacaaatatcagtgttagtcattgataatgtctgaagcttaatgtccagtgattggcctttgcttcttaatttattttaattttttacttgtgccacttaatatcaggcattttaaataaaatattggttacaaaaaatgtacagtactgacacccacccacaaatcatgggttaatagaagagagtagtttttaactttatttttatttgtttagagattttaagttgggaacagtattttccccattgactacttttcattcttcactgtagttttaaagaagaactagtaaatgacggtgcgtatacaagtcaaaaaaatacaatgccctgcctcgtaagtgaaagttgtaggctctccgtaagtaatgtatattttactcaggttttcatacattttgtagaatagttgacatacctgaaagttcctttttagatgtgctattaacattctgttggattcagagggttccttgaaagttttatgtataaatatgtaaaataaaaattaaaactttgtttcataaaaaaaaaaaaaaa

SEQ ID NO: 124156 - DNA, 567 bp, Homo sapiens
cgcggtcctcgaaccgaaccgcaggacccctgctgtccccgggcagcggccggagcgcgtccctcgggtcctgggaagacctgccgcgtctgcggctgcctgggagcccaggcgccccgggtgctgggggaggagccggcacggccgctgggcgaaaggggcccgggctccctgaggaggcggctgcggacggggcctggcgactcggagaaggctgggcggcggcgagtgaggagcccgcaccacccggcccacacacgagccaacgtggagcgagccctccgcagccaggttgggcccgggccgctggactctccaaccaacccacgaaagacagaatatttggaggaagccataaagccgctccgcaggcctctgcagacagcccaacatctcttcaatgcggggctgcggggcactgtcccaaagccagccgcagggctttgggagacaatcctgaaacagaagcaacttcctccctttctcctactgaatggctacaatgaggatgtaatggctggagctcaagcagccatgttggaccatgaagtagatgccatgtggtga

SEQ ID NO: 124157 - DNA, 429 bp, Homo sapiens; identical to SEQ ID NO: 118058

SEQ ID NO: 124158 - DNA, 767 bp, Homo sapiens; identical to SEQ ID NO: 117048

SEQ ID NO: 124159 - DNA, 693 bp, Homo sapiens
atgacctttttcccatttgacaaaagagagacagacatacttctcatcctgaattttagtatggagcattgtaccagagggcaagatcctctggggtaccaaacaacaaagaagggattcaaggacacagagactcctgaaaaagagtccctggagagcaaagcagagtgtttgggaagaagaagaaagaagaagaataaggaggagaaagaggagaaggagaagaaggagaaggagaagaaggagaaggagaaggagaagaagaggaagaagaagaggaagaagaagaagaagaagaagaagaagaagaagaagaagaagaagaagaagaagaagaagaagaaggaggaggaggaggaggaggaggaggatgaggaagaggaggaggaggaggaggagaagaagaagaaggagaaggaggagaaggtgaaggagaagaagaaggaggagaagaagaagaagagaaggaggaggagaacaagaagaagagaaggaggaggaggagaaggaggagaaaagcagcagcagcaagtattcactcttagactctgttcctactctactaataagcctctgggttattctgaatactctgccagaactgctgcaaccagcataagcagcaaaatggaaggtgcaaatcctgcaagtagctccagatgtgcagttccacagagggaattcatggcttaa

SEQ ID NO: 124160 - DNA, 5976 bp, Homo sapiens; identical to SEQ ID NO: 119514
  misc_feature (1)...(5976): n = a,t,c or g

SEQ ID NO: 124161 - DNA, 1535 bp, Homo sapiens
ggaagcattccctttgaaaactggcacaagacagggatgccctctctcaccgctcctattccatagtgttggaagttctggccagggcaatcaggcagaagaaggaaataaagggtattcaattaggaaaagaggaagtcaaattgtccctgtttgcagacgacatgattgtttatctagaaaaccccattgtctcagcccaaaatctccttaagctgataagcaacttcagcaaagtctcaggatacaaaatcaatgtacaaaaatcacaagcattcttatacaccaagaacagacaaacagagagccaaatcatgagtgaactcccattcacaattgcttcaaagagaataaaatacctaggaatccaacttacaagggatgtgaaggacctcttcaaggagaactacaaaccactgctcaaggaaataaaagaggacacaaacaaatggaagaacattccatgctcatgggtaggaagaatcaatatcgtgaaaatggccatactgcccaaggtaatttacagattcaatgccatccccatcaagctaccaatgactttcttcacagaattggaaaaaactactttaaagttcatatggaaccaaaaaagagcccgcatcgccaagtcaatcctaagccaaaagaacaaagttggaggcatcacactacctgacttcaaactatactacaaggctacagtaaccaaaacagcatggtactggtaccaaaacagagttatagatcaatggaacagaaaagagccctcagaaataacaccgcatacctacaactatctgatctttgacaaacctgagaaaaacaagcaatggggaaaggattccctatttaataaatggtgctgggaaaactggctagccatatgtagaaagctgaaactggatcccttccttacaccttatacaaaaatcaattcaagatggattaaagatttaaatgttagacctaaaaccataaaaaccctagaagaaaacctaggcattaccattcaggacataggcatgggcaaggacttcatgtccaaaacaccaaaagcaatggcaacaaaagccaaaattgacaaatgggatctaattaaactaaagagcttctgcacagcaaaagaaactaccatcagagtgaacaggcaacctacaacatgggagaaaattttcacaacctactcatctgacaaagggctaatatccagaatctacaatgaactcaaacaaatttacaagaaaaaaacaaacaaccccatcaaaaagtgggtgaaggacatgaacagacacttctcaaaagaagatatttatgcagccaaaaaacacatgaaaaaatgctcatcatcactggccatcagagaaatgcaaatcaaaagcttccagaggaaggatcaggcagcaatatttgctattctgcagcctccactggtgataaccaggcaaacagggtctggagtggacctgaagcaaactccaacagacctgaagctgagggacctaactgttagaagaaaaatgaacaaacagaaagaa

SEQ ID NO: 124162 - DNA, 1494 bp, Homo sapiens
acgcaataaaaaatgataaaggggatatcaccaccaatcccacagaaatacaaactaccatcagagaatactacaaacacctctatgcaaataaactagaaaatctagaagaaatggataaattcctcgacacatgcactttcccaagactaaaccaggaagaagttgaatatctgaaaagaccaataacaggatccgaaattgtggcaataatcagtagcttaccaaccaaaaaaagtccaggaccagatggattcacagccgaattctaccagaggtacaaggaggaactggtaccattccttctgaaactattccaatcaatagaaaaagagggaatcctccctaattcattttatgaggccagcatcatcctgataccaaagccgggcagagacacaaccaaaaaagagaattttagaccaatatccttgatgaacattgatgcaaaaatcctcaacaaaatactggcaaaccgaatccagcagcacatcaaaaagcttatccaccatgaacaagtgggcttcaaccctgggatgcaaggctggttcaatatacgcaaatcaacaaatgtaatccagcatataaacagaaccaaagacaaaaaccacatgattatctcaatagatgcagaagaggcctttgacaaaattcaacaacccttcatgctaaaaactctcaataaattaggtattgatgggacatatttcaaaataataagagctatctatgacaaacccacagccaatatcatactgaatgggcaaaaactggaagcattccctttgaaaactggcacaaggcagggatgccctctctcaccactcctattcaacatagtgttggaagttctggccagggcaattaggcaagagaaggaaataaagggtattcaattaggaaaagaggaagtcaaactgtccctgtttgcagatgacatgactgtatatctagaaaatcccattgtctcagcccaaaatctccttaagctgataagcaacttcagcaaagtctcaggatacaaaatcaatgtacaaaaatcacaagcattcttatacaccaacaacagacaaacagagagccaaatcatgagtgaactcccattcacaattgcttcaaagagaataaaatacctaggaatccaacttacaagggatgtgaaggacctcttcaaggagaactacaaaccactgctcgaggaaataaaagaggatccaaacaaatgtaagaacattccatgctcatgggtaggaagaatctatatcgtgaaaatggccatactgcccaagtgctcaagctctgctaagggacagactgcctctgcaagtgggtccctgacccccctgcctcctgatggggagagacctcccaaaacgggtcgacagacacctcatacaggagagctccggctggcatcagggcagtaccctgcagggatggagcttccagaggaaggagcaggcagcaatctttgctgctctgcagccaccactg

SEQ ID NO: 124163 - DNA, 617 bp, Homo sapiens
cattaagccttatgcacactttcaaaaatagattaggcaatatcattcaggacataggcatgggcaaggacttcacgactaaaacagcaaaagcaatggcaacaaaagccaaaattgacaaatgggatctaattaaactaaagagcttctgcagagcaaaagaaactaccatcagagtgaacaggaaacctacagaatgggagaaaatttttgcaatctacccatctgacaaagggctaatatccagaatatacaaagaatttaaacaaatttacaagaaaaaaacaaccccatcaaaagcccaaaatctccttaagctgataagcaacttcagcaaagtctcaggatacaaaatcaatgtacaaaaatcacaagcattcttatacaccaataacagacaaacagagagccaaatcatgagtgaactcccattcacaattgcttcaaagagaataaaatacctaggaatccaacttacaagggatgtgaaggacctcttcaaggagaactacaaaccactgctcaaggaaataaaagaggatacaaacaaatggaagaacattccatgctcatgggtaggaagaatcaatatcgtgaaaatggccatactgcccaag

SEQ ID NO: 124164 - DNA, 1142 bp, Homo sapiens
aactagaaaagcaagagctaacacattcaaaagctagcagaaggcaagaaataactaagatcagagcagaactgaaggaaatagagacacaaaaaacccttcaaaaaattaacgaatccaggagctggttttttgaaaagatcaacaaaattgatagaccgctagcaagactaataaagaagaaaagagagaagaatcaaacagacacaataaaaaatgataaaggggatatcatcaccgatcccacagaaatacaaactaccatcagagaatactataaacacctctacacaaataaactagaaaatctagaagaaatggataagttcctggacacatacgtcctcccaagactaaaccaggaagaagttgaatctctgaatagaccaataacaggctctgaaattgaggcaataatcaatagcttaccaaccaaaaaaagtccaggaccagatggattcacagccgaattctaccagaggtacaaagaggagctagtaccattccttctgaaactatcccaatcaatagaaaaagagagaatcctccctaactcatcttatgaggccagcatcatcctgattccaaagcctggcagagacacaaccaaaaaagagaattttagaccaatatccttgatgaacatcgatgcaaaaatcctcaataaaatattggcaaacagaacccagcagcacatcaaaaagcttatccaccatgagcaagtgggctgcatccctgggatgcaaggctggttcaacatacgcaaatcaataaatgtaatccagcatataaatagaaccaaagacaaaaaccacatgattatctcaatagatgcagaaaagctgataagcaaattcagcaaagtctcaggacacaaaatcaatgtacaaaaatcacaagcattcttatacaccgataacagacaaacagagagccaaatcatgagtgaactcccattcacaattgcttcaaagagaataaaatacctaggaatccaacttacaagggatgtgaaggacctcttcaaggagaactacaaaccactgctcaatgaaataaaagaggatacaaacaaatggaagaacattccatgctcatgggtaggaagaatcaatattgtgaaaatggccctactgcccaag

SEQ ID NO: 124165 - DNA, 2151 bp, Homo sapiens; identical to SEQ ID NO: 118551

SEQ ID NO: 124166 - DNA, 1461 bp, Homo sapiens; identical to SEQ ID NO: 122738

SEQ ID NO: 124167 - DNA, 1251 bp, Homo sapiens; identical to SEQ ID NO: 119494

SEQ ID NO: 124168 - DNA, 1641 bp, Homo sapiens; identical to SEQ ID NO: 121942

SEQ ID NO: 124169 - DNA, 1419 bp, Homo sapiens; identical to SEQ ID NO: 119507

SEQ ID NO: 124170 - DNA, 2265 bp, Homo sapiens; identical to SEQ ID NO: 116371

SEQ ID NO: 124171 - DNA, 1794 bp, Homo sapiens; identical to SEQ ID NO: 121950

SEQ ID NO: 124172 - DNA, 1659 bp, Homo sapiens; identical to SEQ ID NO: 119496

SEQ ID NO: 124173 - DNA, 1599 bp, Homo sapiens; identical to SEQ ID NO: 123062

SEQ ID NO: 124174 - DNA, 1725 bp, Homo sapiens; identical to SEQ ID NO: 121179

SEQ ID NO: 124175 - DNA, 3171 bp, Homo sapiens; identical to SEQ ID NO: 121976

SEQ ID NO: 124176 - DNA, 1086 bp, Homo sapiens
atgaaaaggaatgaacaaaacctcaaagaactgtggaactatgtaaaagaccaaacctatgactgcttggactacctgaaagagacaaggagaatggagccacgttgggaaaacacacttcaagatatcatccaggagaacttccccaacctagcaagacaggccaacattcaaattcaggaaatccagagaaccccagtaagatactccacaagaaaatcaaccctcaagacacatagtcatcagattctccaagatcaaaatgaaggaaaaaatgttaaaggcagccagagacaagggcaggtcacctacaaggggaagcccgtcagactaaccgtgggcctctcagcagaaaccctacaagccagaagacagttggtgttggaagttctggccagggcaattaggcaggagaaggaaataaagggtattcaattaggaaaagaggaagtcaaattgtccctgtttgcagatgacatgattgtatatctagaaaaccccattgtctcagcccaaaatctccttaagctgataagcaacttcagcaaagtctcaggatacaaaatcaatgtacaaaaatcacaagcattcttatacaccaacagacaaacagagagccaaatcatgagtgaactcccattcacaattgcttcaaatagaataaaatacctaggaatccaacttaccagggatgtgaaggacctcttcaaggagaactacaaaccactgctcaaggaaataaaagaggatacaaacaaatggaagaatattccatgctcatgggtaggaagaatcaatatcgtgaaaatggccatactgcccaaggtaatttacagattcaatgccatccccatcaagctaccaatgactttcttcacagaattggaaaaaactactttaaagttcatatggaaccaaaaaagagcccacatcgccaaggcaatcctaagccaaaagaacaaagctggaggcatcacactacctgacttcaaactatactacaaggctacagtaaccaaaacagcatggtaccggtaccaaaacagagatatagatcaatggaacagaacagagccccagaaataa

SEQ ID NO: 124177 - DNA, 1023 bp, Homo sapiens
atgggagctatttatgacaaacccacagccaatatcatactgaatgggcaaaaactggaagcattccctttgaaaactggcataagacagggatgccctctctcactactcctattcaacatagtgttggaagttctggccagggcaatcaggcaagagaaggaaataaaggttattcaagtaggaaaagaggaagtcaaattgtccctgtttgcagatgacatgattgtgtatctagaagaccccatcatctcagccccaaatctccttaagctgataagcaacttcagcaaagtctcaggatacaaaatcaatgtgcaaaaatcacaagcattcttatacaccaataacagacaaacagagagccaaatcatgagtgaactcccattcacaattgcttcaaagagaataaaatacctgggaatccaacttacaagggatgtgaaggacctcttcaaggaaaactacaaaccactgctcaaggaaataagaggatacaaacaaatggaagaacattccatgctcatgggtaggaagaatcaatatagtgaaaatggccatactgcccaagccatatgtagaaagctgaaactggaccccttccttacaccttatacaaaaattaattcaagatggattaaagacttaaatgttagacctaaaaccataaaaaccctagaagaaaacctaggcaataccattcaggacataggcatggacaaggacttcacgtctaaaacaccaaaagcaatggcaacaaaagccaaaattgacaaatgggatataattaaactaaagagcttctgcacagccaaagaaactaccatcagagtgaacaggcaacctacagaatgggagaaaatttttgcaatctactcatctgacaaagggctaatatccagaatctacaatgaactcaaacaaatttacaagaaaaaatcaaacaaccccatcaaaaagtgggcaaaggatatgaacgacacttctcaaaagaagatatttatgcagccaaaagacacatga

SEQ ID NO: 124178 - DNA, 1569 bp, Homo sapiens
atggataaatttctcgacacatacactctcccaagactaaaccaggaagaagttgaatctctgaatagaccaataacaggagctgaaattgtggcaataatcaatagcttaccaaccaaaaagagtccaggaccagatggattcacagctgaattctaccagaggctgataagcaacttcagcaaagtctcaggatacaaaatcaatgtacaaaaatcacaagcattcttatacaccaacaacagacaaacagagagccaaatcatgagtgaactcccattcacaattgcttcaaagagaataaaatacctaggaatccaacttacaagggatgtgaaggacctcttcaaggagaactacaaaccactgctcaacgaaataagagaggatacaaacaaatggaagaacattccatgctcatgggtaggaagaatcaatatcgtgaaaatggccatactgcccaaggtaatttacagattcaatgccatccccatcaagctaccaatgactttcttcacagaattggaagaaactactttaaagttcatatggaaccaaaaaagagcccgcatcgccaagtcaatcctaagccaaaagaacaaagctggaggcatcacgctacctgacttcaaactatactacaaggctacagtaaccaaaacagcatggtactggtaccaaaacagagatagagaccaatggaacagaacagagccctcagaaataatgccacatatctacaactatctgatctttgacaagcctgagaaaaacaagcaatggggaaaggattccctatttaataaatggtgctgggaaaactggctagccatatgtagaaagctgaaactggatcccttccttacaccttacacaagaattaattcaagatggattaaagacttacatgttagacgtaaaaccataaaaaccctagaagaaaacctaggcaataccattcaagacataggcatgggcaaggacttcatgtctaaaacaccaaaagccatggcaacaaaagccaaaattgacaaatgggatctaattaaactcaagagcttctgcacagcaaaagaaactaccatcagagtgaacaggcaacctacaaaatgggagaaaatttttgcaacctactcatctgacaaagggctaatatccagaatctacaatgaactcaaacaaatttacaagaaaaaaacaaacaaccccatcaaaaagtgggcgaaggatatgaacagacacttctcaaaagaagacatttatgcagccaaaaaacacatgaaaaaatgctcatcatcactggccatcagagaaatgcaaatcaaaaccacaatgagataccatctcacaccagttagaatggcgatcattaaaaagtcaggaaacaacaggtgctggagaagatgtggagaaataggaacacttttacactgttggtgggactgtaaaccagttcaaccattgtggaagtcagtgtggcgattcctcagggatctagaactagaaataccatttgacccagccatcccattactgggtatatacccaaagggttataaatcatgctga

SEQ ID NO: 124179 - DNA, 2406 bp, Homo sapiens; identical to SEQ ID NO: 120658

SEQ ID NO: 124180 - DNA, 2481 bp, Homo sapiens; identical to SEQ ID NO: 118549

SEQ ID NO: 124181 - DNA, 1259 bp, Homo sapiens
aaataccaactaccatcagagaatactgtaaagacctctatgcaaataaagtagaaaatctagaagaaatggataaattcctcgacacatacaccctcccaagactaaaccaggaagcagttgaatctctgaatagaccaataacaggctctgaaattgaggcaataattaatagcctacaaccaaaaaaagttcaggaccagatgaattcaaagccgaattctaccagagtgttggaagttctggccagggcaatcaggcaggagaaagaaataaagtgtattcgattaggaaaagaggaagtcaaattgtctctgtttgcagatgacatgattgtatatttagaaaaccccattgtctcagcccaaaatctccttaagctgataagcaacttcagtaaagtctcaggatacaaaatcaatgtgcaaaaatcacaagcattcttatacaccaataccagacaaacagagagccaaatcatgagtgaactcccattcacaattgcttcaaagagaataaaatacctaggaatccaacttacaagggatgtggaagacctcttcaaggagaactacaaaccactgctcaatgaaataaaagaggacccaaacaaatggaagaacattccatgctcatggataggaagaatcagtatcctgaaaatggccatactgcccaaggtaattgatagattcaatgccatccccatcaagctaccaatgactttcttcacagaattggaaaaaactactttaaagttcatatggaaccaaaagagagcccacattgccaagacaatcctaagccaaaagaacaaagctggaggcatcatgctacctgacttcaaacaatactacaaggctacagtaaccaaaacagcatggtactggtaccaaaacagagatagagaccaatggaacagaacagagccctcagaaataataccacacatatacaaccatctggtctttgacaaacctgacaaaaacaagcaatggggaaaggattccctatttaataaatggtgctgggaaaactggctagccatgtgtagaaagctgaaactggattccttccttacaccttatacaaaaattaattcaagatggattaaagacttaaatgttagacctaaaaccataaaaaccctagaagaaaacctaggcaataccattcaggacataggcatgggcaaggacttcatgtctaaaacaccaaaagcaatggcaacaaagccaaaattgacaaatgggatctaa

SEQ ID NO: 124182 - DNA, 997 bp, Homo sapiens
actaaaccacgaagaacttgaatccctgaatagaccaataacaggttctgaaattcaggcaattattaatagcctaccaaccaaaaaaagtccagaatcagatggattcacagccaaattctaccagagccaatatcatactgaatgggcaaaaactggaagcattccctttgaaaaccggcacaaaacaggatgccctctctcaccactactattcaacatagtggtggatgttccggctagggcaatcaggcaggagaaagaaataaagggtattcaattaggaaaagaggaagccaaattgtccctgtttgcagatgacatgaatgtatatttaaaaatccccatcgtctcagtccaaaatctccttaagctgataagcaacttcagcaaagtctcaggatacaaaatcaatgtgcaaaaatcacaagcattcctatacactaataacagacaaacagagagccaaatcatgagtgaactcccattcacaattgcttcaaagagaataaaatacctaggaatccaacttacaagggatgtgaaggacctcttcaaggagaactacaaaccactgctcaacgaaataaaagaggacacaaacaaatggaagaacattccatgctcatggataggaagaatcaatatcatgaaaatggccatactgcccaaggtaatttatagattcaatgccatccccatcaagctaccaatgactttcttcacagaattggagaaaactgctttaaagttcatatggaaccaaaaaagagcctgcattgccaagacaatcctaagccaaaagaacaaagctggaggtatcacactacctgacttcaaactgtactacaaggctacagtagccaaaacagcatggtactggtaccaaaacagcatggtactggtaccaaaacagagatatagaccagtggaacagaatagagcccttggaaataataccatacacctacaaccatctgatcttcgaaaaacctga

SEQ ID NO: 124183 - DNA, 1126 bp, Homo sapiens
gagctggttttttgaaaagatcaacaaaattgatagaccactagcaagagtaataaagaagaaaagagagaagaatcaaatagacgcaataaaaaatgataaagaggatatcaccaccaatcccacagaaatacaaactatcatcagagaatactacaaacacctctacccaaataaactagaaaatctagaagaaatggatacattcctcgacacatacaccttcccaagactaaaccaggaagaagttgaatctctgaatacatcaataacaggctctgaaattgtggcaataatcagtatagcataccaaccaaaaaaagtccaggaccagatggatccacagccgaattctaccagagtgttggaagttctggccagggcaattaggcaggagaaggaaataaagggtattcaattaggaaaagaggaagtcaaattgtccctctttgcagatgacatgattgtatatctagaaaaccccattgtctcagcccaaaatctccttaagctgataagcaacttcagcaaagtctcaggatacaaaatcaatgtacaaaaatcacaagcattcttatacaccaacaacagacaaacagagagccaaatcatgagtgaactcccattcacaattgcttcaaagagaataaaatgcctaggaatccaacttacaagggatgtgaaggacctcttcaaggagaactacaaaccactgctcaaggaaataaaagaggatacaaacaaatggaagaacattccatgctcatgggtaggaagaatcaatatcgtgaaaatggccatactgcccaaggtaatttacagattcaatgccatccccatcaagctaccaatgactttcttcacagatttggaaaaaactactttaaatttcatatggaaccaaaaaagagcccgcatcaccaagtcaatcctaagccaaaagaacaaagccggaggcatcacactacctgacttcaaactatactacacggctacagtaaccaaaacagcatggtactggtaccaaaacagcatggtactggtaccaaaacagagatatagatcaatggaacagaacagagccctcagaaataacgccgcatgtctacaactatctgatctttga

SEQ ID NO: 124184 - DNA, 2061 bp, Homo sapiens; identical to SEQ ID NO: 119522

SEQ ID NO: 124185 - DNA, 891 bp, Homo sapiens
accaataacaggatctgaaattgtggcaataatcaatagcttaccaatcaaaaagagtccaggaccagatggattcacagccaaattctaccagaggtacaaggaggaactggtaccattccttctgaaactattccaatcaatagaaaaagagggaatcctccctaactcattttatgaggccagcatcatcctgataccaaagctgggcagagacacaaccaaaaaagagaattttagaccaatatccttgatgaacattgatgcaaaaatcctcagcaaaatactggcaaaccgaatccagcagcacatcaaaaagcttatccaccatgatcaagtgggcttcatccctgggatgcaaggctggttcaatatacgcaaatcaataaatgtaatctagcatatcaccaacaacagacaaacagagagccaaatcatgagtgaactcccattcacaattgcttcaaagagaataaaatacctaggaatccaacttacaagggacgtgaaggacctcttcaaggagaactacaaaccactgctcaaggaaataaaagaggatacaaacaaatggaagaacattccatgctcatgggtaggaagaatcaatatcgtgaaaatggccatactgcccaaggtaatttacagattcaatgccatccccatcaagctaccaatgactttcttcacagaattggaaaaaactactttaaagttcatacggaaccaaaaaagagcctgcatcgccaagtcaatcctaagccaaacaaagctggaggcatcacgctacctgacttcaaactatactacaaggctacagtaaccaaaacagcatgatactggtaccaaaacagagatatagatcaatggaacagaacagagccctcagaa

SEQ ID NO: 124186 - DNA, 1515 bp, Homo sapiens
atgctctttgaaaccaaggagaacaaagacacaacataccagaatctccgggacgcattcaaagcagtgtgtagagggaaatttatagcactaaatgcccacaagagaaagcaggaaagatccaaaattgacaccctaacatcacaattcaaagaactagaaaagcaagagccaatacattcaaaagctagcagaaggcaagaaataactaaaatcagagcagaactgaagatcaacaaaattgatagactgctagcaagactaataaagaaaaagagagagaagaatcaaatagacgcaataaaaaatgataaaggggatatcaccaccgatcccacagaaatacaaactaccatcagagaatactacaaacacctctatgcaaataaactagaaaatctagaagaaatggataaattcctcaacacatacactctcccaagactaaaccaggaagaagttgaatctctgaatagaccaataacaggatctgaaattgtggcaataatcaatagcttaccaaccaaaaagagtccaggaccagatggattcacagccgaattctaccagaggtacaaggaggagctggtaccattccttctgaaactattccaatcaatagaaaaagagggaatcctgcctaactcattttatgaggccggcatcattctgataccaaagctgggcagagacacaaccaaaaaagagaattttagaccaatatccttgatgaacattgatgcaaaaatcctcaataaaatactggcaaaccgaatccagcagcacatcaaaaagcttatccaccatgatcaactgataagcaccttcagcaaagtctcaggatacaaaatcaatgtgcagaaatcacaagcattcttatgcaccaacaacagacaaacagagagccaaatcatgagtgaactcccattcacaattgcttcaaagagaataaaatacctaggaatccaacttacaagggatgtgaaggaccccttcaaggagaactacaaaccactgctcaaggaaataaaagaggagacaaacaaatggaagaacattccatgctcatgggtaggaagaatcaatattgtgaaaatggccatactgcccaagaaatacttacgactgggaaatttacaaagaaaagaggttttattggctcatggttctgcaggctatacaggaagaaaagcagcttccgctcggctgctggggaagcctcagaaaacttttactcaaggcgaaggcaaagccagagcagtcacatcacatggcccaagcaggaaagagaaaaagtcgggaggctgcacaggaagtgtggtatctccttctcatgagggcctcaggaagcttacaatcattcaagaagccaaaggtggagccagtgtgttagatggtgagagtgggagcaagagagagaagaggagcagccagggttgtttcaacaaccagctctcctgtgaactgaggaagaacccacttgtcactaaggagatagtgctaaatgattcatga

SEQ ID NO: 124187 - DNA, 992 bp, Homo sapiens
atgaacattgatgcaaaaatcctcaataaaatactggcaaaacgaatccagcagcacatcaaaaagcttatccaccatgatccagtgggcttcatccctgggattcaaggctggttcaatatatgcaaatcaataaatgtaatccagcatataaacagaaccaaagacaaaaaccacatgattatctcaatagatgcagaaaaagcctttgacaaaattcaaaaacccttcatgctaaaaactctcaataaattaggtattgatgggacgtatttcaaaataataagagctatctatgacaaacccacagccaatatcatactgaatgggcaaaaactggaagcattccctttgaaaactggcacaagacagggatgccctctctcaccactcctattcaacatagtgttggaagttctggccagggcaatcaggcaggagaaggaaataaagggtattcaattaggaaaagaggaagtcaaattgtccctgtttgcagatgacatgattgtatatctagaaaaccccactgtctcagcccaaaatctccttaagctgataagcaacttcagcaaagtctcaggatacaaaatcaatgtacaaaaatcacaagcattcttttacaccaacaacagacaaacagagagccaaatcatgagtgaactcccattcacaattgcttcaaagagaataaaatacctaggaatccaacttacaagggatgtgaaggacctcttcaaggagaactacaaaccactgctcaaggaaataaaagaggatacaaacaaatggaagaacattccatgctcatgggtaggaagaatcaatattgtgaaaatggccatactgcccaaggtccttctatatgatccactctttgactggaccatgaatcctttgaaagctttgtatttacagcagaggccggaagatgaaactgagcttcaccctactctgaatgcagatgaccaagaatgcaaacgaaatctcag

SEQ ID NO: 124188 - DNA, 2019 bp, Homo sapiens
atgacacttctgagaaattcatcaggctgtgaagcgcgccgtgatgaatatcgaacagagtttaccacagctttgcagcgcgttgacttattcatgggtcaattcagcgaagtcctcttaacatctatatccaccttcattaaaggagacctcaccatagctaatcttgggacatcagagggtcgcttcatgcaggttgtggtttctcgatcaggaccatcaacccctcatgtgaattttctcctggactcccatccagtgtctccagaagtgattgtggagcatacattaaaccaaaatggctacacactggttatcactgggaagaagatcacgaagatcccattgaatggcttgggctgcagacatttccagtcctgcagtcaatgcctctctgccccaccctttgttcagtgtggctggtgccacgacaaatgtgtgcgatcggaggaatgcctgagcgggacatggactcaacagatctgtctgcctgcaatctacaagatgagactgaagattatttcccggggtgaggtgggcaaggcaagtggagggtcaacacccatgggtggctgtgagtcttccttcagtgttcccagaaaaaaaagcaaaggctcaacggatgactatactaacatctatacttctagagcagcaaatcccccagcacagtgctctagctctgctaagggacagattgcctcttcaagtgggcccctgacccctgtgcctcctgactgggagacacctcccagcaggggtcgacagacacctcacacaggagagctctggctggcatctgtgttggaatttctggccaggacaaacaggcaggagaaagaaataaagggtattcaattaggaaaagaggaagtcaaattgtccctgtttgcagatgacatgattgtatatttagaaaactccatcgtctcagcccaaagtctccttaagctgataagcaactttagcaaagtctcaggatacaaattcaatgtgcaaaaatcacaagcatttttatacaccaataacagacaaacagagagccaaatcatgagtgaactcccattcacaattgcttcaaagagaataaaatacctaggaatccaacttacaagggatgtgaaggacctcttcaaggagaactacaaaccactgctcaaggaaataaaagaggatacaaacaaatggaagaatattccatgctcatggataggaagaatcaatatcatgaaaatggccatactgcccaaggtaatttatagattcaatgccatccccatcaagctaccaatgactttcttcacagaattggaaaaaactactttaacgttcatatggacccaaaaaagagcctgcattgtcaagtcaatactaagccaaaagaacaaagctggaggcatcatgctacctgacttcaaactatactacaaggctacagtaaccaaaacagcatggtactggcaccaaaacagagatatagatcaatggaacagaacagagccctcagaaataataccacacatctacaactatctgatctttgacaaacctgacaaaaacaaggtatggggaaaggattctctatttaacaaatggtgctgggaaaactggctagccatatggagaaagctgaaactggatcccttccttacaccttatacaaaaatttattcaagatggattaaagatgtaaatgttagacctaaaactataaaaaccttagaagaaaacctaggcaataccattcaggacataggcgtgggcaaggacttcatgtctaaaacaccaaaagcaatggcaacaaaagccaaaattgacaaatgggatctaattaaactaaagagcttctgcacagcaaaagaaactaccatcagagtgaacaggcaacctacagaatgggagaaaatttttgcaatctactcatctgacaaagggctaatatccagaatctacaaagaactcaaaccaatttacaagaaaaatctaacaaccccatcaacaagtaggcaaaggatatga

SEQ ID NO: 124189 - DNA, 1206 bp, Homo sapiens; identical to SEQ ID NO: 117980

SEQ ID NO: 124190 - DNA, 1911 bp, Homo sapiens
gacacatacactctcccaagactaaaccaggaagaagttgaatctctgaatagaccaataacaggatctgaaattgtggcaataatcaatagcttaccaaccaaaaagagtccaggaccagatggattcacagccgaattctaccagaggtacaaggaggaactggtaccattccttctgaaactattccaatcaatagaaaaagagggaatcctccctaactcattttatgaggccagcatcatcctgataccaaagccgggcagagacacaaccaaaaaagagaattttagaccaatatccttgatgaacattgatgcaaaaatcctcaataaaatactggcaaaccgaatccagcagcacatcaaaaagcttatccaccatgatcaagtgggcttcatccctgggatgcaaggctggttcaatatacgcaaatcaataaatgtaatacagcatataaacagaaccaaagacaaaaaccacatgattatctcaacagatgcagaaaaggcctttgacaaaattcaccaacccttcatgctaaaaactctcaataaattaggtattgatgggacgtatttcaaaataataacagctatctatgacaaacccacagccaatatcatactgaatgggcaaaaactggaagcattccctttgaaaactggcacaagacagggatgccctctctcaccactcctattcaacatagtgttggaagttctggccagggcaattaggcaggaggaaataaaaggcattcatttaggaaaagaggaagtcaaattgtccctgtctgcagacgacatgatagtatatctagaaaaccccactgtctcagcccaaaatctccttaaactgataagcaacttcagcaaagtctcaggatacaaaatcaatgtacaaaaatcacaagcattcttatacaccaacaacagacaaacagagagccaaatcatgagtgaactcccatccacaattgcttcaaagagaataaaatacctaggaatccaacttacaagggatgtgaaggacctcttcaaggagaactacaaaccactgctcaaggaaataaaagaggatacaaacaaatggaagaacattccatgctcatgggtaggaagaatcaatatcgtgaaaatggccatgctgcccaaggtaatttacagattcattacccaagcccttttcagaccaaaagataaagatccctatggaggagtggaacacccctctggctcccaatatcaaagattagatacagacaagccctgtctagagcccaccagctctagatgccagaccacaaagggctcctcagaaagcatgattctcccccactcccctggtgtgcttagcagcagacacgtggctcaccagtgtaactctacccccaccccaatgcatctaagggcagtccttcctctgctgcctgaatacagccctcagaagctggcttctccacgtgctccaggcagaagtaatggttccctcaaatcattcagtttgtacttctctgtgaaaggctgtatggaagagggaaaatcacagggacttgagagtcagagaaacctgggttagtatctttgtggggacccagaacaggagaaggttctgccacaggtccaggttgctgtgcaagctgctctgccatttgggccacatgatccagcaaatccaatggtgtttgaagaggctcctataagtgaattgcagtgcaggcctttgagatttgggagcaaggccctgccatcattcacaggtaactactgtccttctgtgacagcagcccgaagtatggctgtatcctgcaaagccacagggcatgagctgcctaaggccatgggactctacctcttgcatcagtgtgacctggctgtgagacatggagtctaaggagatgattttgga

SEQ ID NO: 124191 - DNA, 2956 bp, Homo sapiens
atgcaccaagcggacctaatagacatctacagaactctccaccccaaatcaacagaatatacatttttttcagcaccacatcacacctattccaaaattgaccacatagttggaagtaaagctctcctcagcaaatgtaatagaacagaaattataacaaactgtctctcagaccacagtgcaatcaaactagaactcaggatcaagaatctcactcaaagccgctcaactacatggaaactgaacaacctgctcctgaatgactactgggtacataacgaaatgaaggcagaaataaagatgttctttgaaaccaacgagaacaaagacacaacataccagaatctctgggacgcattcaaagcagtgtgtagagggaaatttatagcactaaatgcccacaagagaaagcaggaaagatccaaaattgacaccctaacatcacaattaaaagaactagaaaagcaagagcaaacacattcaaaagctagcagaaggcaagaaataactaaaatcagagcagaactgaaggaaatagagacacaaaaaacccttcaaaaaatcaatgaatccaggagctggttttttgaaaggatcaacaaaattgatagaccgctagcaagactaataaagaaaaaaagagagaagaatcaaatagacacaataaaaaatgataaaggggatatcaccaccaatcccacagaaatacaaactaccatcagagaatactacaaacacctctacgcaaataaactagaaaatctagaagaaatggatacattcctcgacacatacactctcccaagactaaaccaggaagaagttgaatctctgaatagaccaataacaggagctgaaattgtggcaataatcaatagtttaccaaccaaaaagagtccaggaccagatggattcacagccgaattctaccagaggtacaaggaggaactggtaccattccttctgaaactattccaatcaatagaaaaagagggaatcctccctaactcattttatgaggccagcatcattctgacaccaaagccgggcagagacacaaccaaaaaagagaattttagaccaatatccttgatgaacattgatgcaaaaatcctcaataaaatactggcaaaccgaatccagcagcacatcaaaaagcttatcccccatgatcaaagccaaagacaaaagcacatgattatctcaatagatgcagaaaaagcctttgacaaaattcaacaacacttcatgctaaaaactctcaataaattaggtattgatgggacatatttcaaaataataagagctatctatgacaaacccacagccaatatcatactgaatgggcaaaaactggaagcattccctttgaaaactggcacaagacagggatgccctctctcaccgctcctattcaacatagtgttggaagttctggccagggcaatcaggcgggagaaggaaataaagggtattcaattaggaaaagaggaagtcaaattgtccctgtttgcagacgacatgattgtttatctagaaaaccccatcgtctcagcccaaaatctccttaagctgataagcaacttcagcaaagtctcaggatataaaatcaatgtacaaaaatcacaagcattcttatacaccaacaacagacaaacagagagccaaatcatgagtgaactcccagtcacaattgcttcaaagagaataaaatacctaggaatccaacttacaagggatgtgaaggacctcttcaaggagaactacaaaccactgctcaaggaaataaaagaggatacaaacaaatggaagaacattccatgctcatgggtaggaagaatcaatatcgtgaaaatggccatactgcccaaggtaatttacagattcaatgccatccccatcaagctaccaatgactttcttcacagaattggaaaaaactactttaaagttcatatggaaccaaaaaagagcccgcatcgccaagtcaatcctaagccaaaagaacaaaactggaggcatcacactacctgacttcaaactatactacaaggctacagtaaccaaaacagcatggtactggtaccaaaacagagatatagatcaatggaacagaacagagccctcagaaataacaccccatatctacaactatctgatctttgacaaacgtgagaaaaacaagcaatggggaaaggattccctatttaataaatggtgctgggaaaactggctagccatatgtagaaagctgaaactggatcccttccttacaccttatacaaaaatcaattcaagatggattaaagatttaaacgttagacctaaaaccataaaaaccctagaagaaaacctaggcattaccattcaggacataggcgtgggcaaggacttcatgtccaaaacaccaaaagcaatggcaacaaaagccaaaattgacaaatgggatctaattaaactgaagagcttctgcacagcaaaagaaactaccatcagagtgaacaggcaacctacaacgtgggagaaaattttcgcaacctactcatctgacaaagggctaatatccagaatctacaatgaactcaaacaaatttacaagaaaaaaacaaacaaccccatcaaaaagtgggcgaaggacatgaacagacagttttcaaaagaagacatttatgcagccaaaaaacacatgaaaaaatgctcatcatcactggccatcagagaaatgcaaatcaaaaccactatgagatatcatctcacaccagttagaatggcaatcattaaaaagtcaggaaacaacaggcggtggcagtggcacaaatccttaggatctcaggaccacccactacacctggtttcttcttatatctctgaagagcagagaactgaaccaggaactaataggcattactgcattacttgtaaagatttcaaggaagtatttttagcttggaggaaag

SEQ ID NO: 124192 - DNA, 1986 bp, Homo sapiens; identical to SEQ ID NO: 118546

SEQ ID NO: 124193 - DNA, 3156 bp, Homo sapiens
atgggagactttaacaccccactgtcaacattagacagatcaatgagacagaaagtcaacaaggatacccaggaattgaactcagctctgcaccaagcagacctaatagacatctacagaactctccaccccaaatcaacagaatatacatttttttcagcaccacaccacacctattccaaaactgaccacatagttggaagtaaagctctcctcagcaaatgtaaaagaacagaaattataacaaactgtctctcagaccacagtgcaatcaaactagaactcaggattaagaatctcactcaaaaccgctcaactacatggaaactgaacaaccagctcctgaatgattactgggcgcataacgaaatgaaggcagaaataaagatgttctttgaaaccaacgagaacaaagacacaacataccagaatctctgggacacattcaaagcagtgtgtagagggaaatttatagcactaaatgcccacaagagaaagcaggaaagatccaaaattgacaccctaacatcacaattaaaagaactagaaaagcaagagcaaacacattcaaaagctagcagaaggcaagaaataactaaaatcagagcagaactgaaggaaatagagacacaaaaaatccttcaaaaaattaatgaatccaggagctggttttttgaaaggatcaacaaaattgatagaccgctagcaagactaataaagaaaaaaagagagaagaatcaaatagacgcaataaaaaatgataaaggggatatcaccaccgatcccacagaaatacaaaataccatcagagaatactataaacacctctacacaaataaattagaaaatctagaagaaatggataaattcctggacacatacactctcccaagattaaaccaggaagaagttgaatctctgaatagaccaataacaggacctgaaattgtggcaataatcaatagcttaccaaccaaaaagagtccaggaccagatggattcacagccaaattctaccagaggtacaaggaggaactggtaccattccttctgaaattattccaatcaatagaaaaagagggaatcctccctaactctttttatgaggccagcatcattctgataccaaagccaggcagagacacaacaaaaaaagagaattttagaccaatatccttgatgaacattgatgcaaaaatcctcaataaaatactggcaaaacgaatccagcagcacatcaaaaagcttatccaccatgatcaagtgggcttcatccctgggatgcaaggctggttcaatatacacaaatcaataaatgtaatccagcatataaacagacccaaagacaaaaaccacatgattatctcaatagatgcagaaaaagcctttgacaaaattcaacaacccttcatgctaaaaactctcaataaattaggtattgatgggacgtatttcaaaataataagtgctatctatgacaaacccacagccaatatcatactgaatgggcaaaaagtggaagcattccctttgaaaactggcacaagacagggatgccctctctcaccactcctattcaacatagtgttggaagttctggccagggcaattaggcaggagaaggaaataaagggtattcaattaggaaaagaggaagttaaattgtccctgtttgcagacgacatgattgtatatctagaaaaccccatcgtctcagcccaaaatctccttaagctgataagcaacttcagcaaagtctcaggatacaaaatcaatgtacaaaaatcacaagcattcttatacaccaacaacagacaaacagagagccaaatcatgagtgaactcccattcacaattgcttcaaagagaataaaatacctaggaatccaacttacaagggatgtgaaggacctcttcaaggagaactacaaaccactgctcaaggaaataaaagaggatacaaacaaatggaagaacattccatgctcatgggtaggaagaatcaatatcgtgaaaatggccatactgcccaaggtaatttacagattcaatgccatccccatcaagctaccaatgactttcttcacagaattggaaaaaactactttaaagttcatatggaacgccctcatcaccaagtcaatcctaagccaaaagaacaaagctggaggcatcacactacctgacttcaaactatactacaaggctacagtaaccaaaacagcatggtactggtaccaaaacagagatatagatcaatggaacagaacagagccctcagaaataacgccgcatatctacaactatctgatctttgacaaacctgagaaaaacaagcaatggggaaaggattccctattgaataaatggtgctgggaaaactggctagccatatgtagaaagctgaaactggatcccttccttacaccttatacaaaaatcaattcaagatggattaaagacttaaacgttagacctaaaaccataaaaaccctagaagaaaacctaggcattaccattcaggacataggcatgggcaaggacttcatgtctaaaacaccaaaagcaatggcaacaaaagccaaaattgacaaatgggatctaattaaactaaagagcttctgcacagcaaaacaaactaccatcagagtgaacaggcaacctacaaaatgggagaaaattttcgcaacctactcatctgacaaagggctaatatccagaatctacaatgaactcaaacaaatttataagaaaaaaacaaacaaccccatcaaaaagtgggcgaaggacatgaacagacacttctcaaaagaagacatttatgcagccaaaaaacacatgaaaaaatgctcatcatcactggccatcagagaaatgcaaatcaaaaccacaatgagataccatctcacaccagttagaatggcaatcattaaaaagtcaggaaacaacagaacttgggaatataacatactttgttctcttgtgcctctcctgtgttccctcttgtggctgcacctgactgaccatcacctaaaagaggacagaacaaaacacttgacagctagtgataaccttgaaaaaacagaactcagcagatggaaggagagagccctactgtatgagcatcgtgtgctgagacctgctattgactcccag

SEQ ID NO: 124194 - DNA, 3325 bp, Homo sapiens
atgggagactttaacaccccactgtcaacattagacagatcaacgagacagaaagtcaacaaggatacccaggaattgaacttagctctgcaccaagcggacctaatagacatctacagaactctccaccccaaatcaacagaatatacatttttttcagcaccacaccacacctattccaaaattgaccgcatagttggaagtaaagctctcctcagcaaatgtaaaagaacagaaattataacaaactatctctcacaccacagtgcaatcaaactagaactcaggattaagaatctcactcaaaaccgctcaactacatggaaactgaacaacctgctcctgaatgactactgggtacatagcgaaatgaaggcagaaataaagatgttctttgaaaccaacgagaacaaagacacaacataccagaatctctgggacacattcgaagcagtgtgtagagggaaatttatagcactaaatggccacaagagaaagcaggaaagatccaaaattgacaccctaacatcacaattaaaagaactagaaaagcaagagcaaacacattcaaaagctagcagaaggcaagaaataactaaaatcagagcagaactgaaggaaatagagatacaaaaaacccttcaaaaaattaatgaatccaggagctggttttttgaaaggatcaacaaaattgatagaccactagcaagactaataaagaaaaaaagagagaagaatctaatagacgcaataaaaactgataaaggggatatcaccaccaatcccacagaaatacaaactaccatcagagaatactacaaacacctctacgcaaataaactagaaaatcgagaagaaatggataaattcctcgacacatacactctcccaagactaaaccaggaagaagttgaatctctgaatagaacaataacaggatctgaaattgtggcaagaatcaatagcttaccaaccaaaaagagtccaggaccagatggattcacagctgaattctaccagaggtacaaggaggaactggtaccattccttctgaaactattccaatcaatagaaaaagagggaatcctccctaactcattttatgaggccagcatcattctgataccaaagccaggcagagacacaaccaaaaaagagaattttagaccaatatcgttgatgaacattgatgcaaaaatcctcaataaaatactggcaaaaggaatccagcagcacatcaaaaagcttatccaccatgatcaagtgggcttcatccctgggatgcaaggctggttcaatatacacaaatcaataaatgtaatccagcatataaacagagccaaagacaaaaaccacatgattatctcaatagatgcagaaaaagcctttgacaaaattcaacaaccctttatgctaaaaactctcaataaattaggtattgatgggacgtatttcaaaataataagagctatctatgacaaacccacagccagtatcatactgaatgggcaaaaactagaagcattccgtttgaaaactggcacaagacagggatgccctctctcaccactcctattcaacatagtgtttgaaattctggcccgggcaattaggcaggagaaggaaataaagggtattcaattaggaaaagaggaagtcaaattgtccctgtttgcaggcgacatgattgtatatctagaaaaccccattgtctcagcccaaaatctccttaagctgataagcaacttcagcaaagtctcaggatacaaaatcaatgtgcaaaaatcacaagcattcttatacaccaataacagacaaacagagagccaaatcatgagtgaactcccattcacaattgcttcaaagagaataaaatacctaggaatccaacttacaagggatgtgaaggacctcttcaaggagaactacaaaccactgctcaaggaaataaaagaggatacaaacaaatggaagaacattccatgctcatgggtaggaagaatcaatatcgtgaaaatggccatactgcccaaggtaatttatagaatcaatgccatccccatcaagctaccaatgcctttcttcacagaattggaaaaatctactttaaagttcatatggaaccaaaaaagagcccgcatcgccaagtcaatcctaagccaaaagaacaaagctggaagcatcacactacctgacttcaaactatactacaaggctacagtaaccaaaacagcatggtactggtaccaaaacagagatatagatcaatggaacagaacagagccctcagaaataacaccgcatatctacaactatctgatctttgacaaacctgagaaaaacaagcaatggggaaaggattccctatttaataaatggtgctgggaaaactggctagccatatgtagaaagctgaaactggatcccttccttacaccttatacaaaaatcaattcaagatggattaaagacttaaacgttagacctaaaaccataaaaaccctagaagaaaacctagggattaccattcaggacataggcataggcgacgacttcatgtctaaaacaccaaaaacaatggcagcaaaagacaaaatcgacaaatgggatctaattaaactaaagagcttctgcacagcaaaagaaactaccatcagagtgaacaggcaacctacaaaatgggagaaaattttcgcaacctactcttctgacaaagggctaatatccagaatctacaatgaactcaaacaaatttttaagaaaaaaacaaacaaccccatcaaaaagtgggtgaaggacatgaacagacacttctcaaaaggagacatttatgctgccaaaaaacacatgaaaaaatgctcatcatcactggccatcagagaaatgcaaatcaaaaccacaatgagataccatctcacaccagttagaatggcaatcattaaaaagtcaggaaacaacaggtgctggaggggatgtggagaaataggaacacttttacactgttggtgggactgtaaactagttcaaccattgtggaagtcagtgtggcgattcctcagggatctagaactggaaataccatttgacccagccatcccattactgggtatatacccaaaggactataaatcatgctgctataaagacacatgcacactaacttggatggagctagaagccattattctaagtgaagtactcaggaatggaaaaaccaaaaaccgtatgttctcacttataagtgggaaccaagatacgggtatgcaaaggcatacagaattctatgatggactttggcgactcagaagagggagggttgaggggg

SEQ ID NO: 124195 - DNA, 1870 bp, Homo sapiens; identical to SEQ ID NO: 123235

SEQ ID NO: 124196 - DNA, 1449 bp, Homo sapiens
atggcgtccccaggacctgcacccacagccagtcccaaaatccactctgagctgttaacagcaaccagagaagctcagagacatcatcctgtgccccgtggtcaagacctagtgacctcagaatcattctcgctctccttctgcttctcagctgccatcttcatttttgaacttttgggttcaaactcagaaggagtcacagatcttagactgtggctatgccagccagcgcccaggtgcggggagtggacctacaaccccttggagcagtgctgtgatgacggtgtcatcctagacttgaaccagacccggctctgcggctccagctgcaccttctggccctgcttccagcactgctgcctggagtctttgggctctcagaaccagacagttgtgaggttcaaggtcccaggcatgaagccagattgcaagtcctcccctatcaccaggatctgtgcccaggctggagtgcaaataagcaacttcagcaaagtctcaggatacaaaatcaatgtacaaaaatcacaagcattcttatacaccaacaacagacaaacagagagccaaatcatgagtgaactcccattcacaattgcttcacagagaataaaatacctaggaatccaacttacaagggatgtgaaggacctcttcaaggagaactacaaaccactgctcaaggaaataaaagaggatacaaacaaatggaagaacattccatgctcatgggtaggaagaatcaatatcgtgaaaatggccatactgcccaaggtaatttacagattcaatgccatccccatcaagctaccaatgactttcttcacagaattggaaaaaactactttaaagttcatatggaaccaaaaaagagccctcatcgccaagtcaatcctaagccaaaagaacaaagctggaggcatcacactacctgacttcaaactatactataaggctacagtaaccaaaacagcatggtactggtaccaaaacagagatatagatcaatggaacagaacagagccctcagaaataacgccgcatatctacaactatctgatctttgacaaacctgagaaaaacaagcaatggggaaaggattccctatttaataaatggtgctgggaaaactggctagccatatgtagaaagctgaaactggatcccttccttacaccttatacaaaaatcaattcaagatggattaaagacttaaacgttagacctaaaaccataaaaaccctagaagaaaacctaggcattaccattcaggacataggcatgagcaaggacttcatgtctaaaacaccaaaagcaatggcaacaaaagacaaaattgacaaatgggatctaattaaactaaagagcttctgcacagcaaaagaaactaccatcagagttgaacaggcaacctacaaaatgggagaaaatttttgcaacctactcatctga

SEQ ID NO: 124197 - DNA, 2313 bp, Homo sapiens
atgtttcaggacccagtggcctttgatgatgttgctgtgaacttcacccaggaggagtgggctttgctggatatttcccagaggaaactctacaaggaagtgatgctggaaactttcaggaacctgacctctgtaggaaaaagttggaaagaccagaacattgaatatgagtaccaaaaccccaggagaaacttcaggagtctcatagaaaagaaagtcaatgaaattaaagatgacagtcattgtggagaaacttttacccaggttccagatgacaggctgaacttccaggagaagaaagcttctcctgaaataaaatcatgtgacagctttgtgtgtggagaagttggcctaggtaactcatcttttaatatgaacatcagaggtgacattggacacaaggcctatgagtatcaggaatatggaccgaagccatgtaagtgtcaacaacctaaaaaagccttcagatatcacccctcctttagaacaccacaaagggatcacactggagagaaaccctatgcttgtaaagaatgtggaaaaacttttatttcccattcaagcattcaaagacacgtggtaatgcacagtggggatggaccttataaatgtaaattttgtgggaaagccttccattgtctcagtttatatcttatccatgaaagaattcacactggagagaaaccatatgaatgtaaacaatgtggtaaatcctttagttattctgctacccttcgaatacacgaaagaactcacactggagaaaagccttatgaatgtcagcaatgtgggaaagcatttcatagtcccagatgctatcgtagacatgaaaggattcacacgggagagaaggcttatcaatgtaaggaatgtggaaaagcattcacgtgtccccagtatgttcgtatacatgaaaggacccactctaggaaaaaaccctatgaatgtacgcagtgtgggaaagcattatcctctcttacaagttttcaaacacacataagaatgcactctggagaaagaccttatgaatgtaagatatgtgggaaaggcttttgttctgccaattcatttcaaagacatgaaaaaactcacagtggagagaaaccctataaatgcaagcaatgtggtaaagccttcattcattccagttcccttcgttatcatgaaaggattcacactggagagaaaccctatgagtgtaagcaatgtgggaaggccttcagatcttcctcacaccttcaattgcatggtaggactcacactggagagaagccctatgaatgtcaggaatgtgggaaagccttcagatctatgaagaaccttcaaagtcatgaaaggacacaaacacacgtaagaatacactctggagaaagaccttataaatgtaagctatgtgggaaaggcttttattgtcccaaatcattgcaaagacatgaaaaaactcacactggagagaaactctatgaatgcaagcaatgtggtgaagccttcagtagttccagttcctttcgataccatgaaaggactcacactggagagaaaccctataaatgcaagcaatgtgggaaagccttcagagctgcctcagtccttcgaatgcatggtaggactcaccctgaagataaaccctatgagttgttggaagttctggccagggcaatcaggaaggacaaagaactaaagggtattcaagtaggaaaagaggaagtcaaattgtccctgtttgcagatgacatgattgtatatttagaaaaccctatcatctcagcccaaaatctccttaagctgataagcaacttcagcaaagtctcaggatacaaaatcaatgtgcaaaaatcacaagcattcctatacaccaacaacagacaaacagagagccaaatcatgagtgaactcccattcacaattgcttcaaagagaataaaatacctaggaatccaacttacaagggatgtgaaggacctcttcaaagagaactacaaaccactgctcaacgaaatcaaagaggacacaaacaaatggaagaacattccatgctcgtggataggaagaatcaatatcatgaaaatggccatactgcccaaggtaatttgtagattccatgccatccccatcaagctaccgatgactttcttcacagaattggaaaaaactactttaaagttcatatggaaccaaagaagagcccacattgccaagacaatcctaagccaaaagaacaaagctcaaggcattaggctacctgacttcaaactatactacaaggctacagtaaccaaaacagcatggtactggtaccaaacagagatatag

SEQ ID NO: 124198 - DNA, 1296 bp, Homo sapiens; identical to SEQ ID NO: 119528

SEQ ID NO: 124199 - DNA, 1041 bp, Homo sapiens; identical to SEQ ID NO: 119529

SEQ ID NO: 124200 - DNA, 1716 bp, Homo sapiens
atgaaggcagaaataaagatgttctttgaaaccaacgagaacaaagacacaacataccagaatctctgggacacattcaaagcagtgtgtagagggaaatttatagcactaaatgcccacaacagaaagcaggaaagatccaaaattgacaccctaacatcacaattaaaagaactagaaaagcaagagcaaacatattcaaaagctagcagaaggcaagaaataactaaaatcagagcagaactgaaggaaatagagacacaaaaaacccttcaaaaaattaatgaatccaggagctggttttttgaaaggatcaacaaaattgatagaccactagcaagactaataaagaaaaaaagacaaaagaatcaaatggacacaataaaaaatgataaaggggatatcaccaccgatcccacagaaatacaaactaccgtcagagaatactacaaacacctctatacaaataaactagaaaatctagaagaaatggataaattcctcgacacatacactctcccaagactaaaccaggaagaagttgaatctctgaatagaccaataacaggagctgaaattgtggcaataatcaatagcttaccaaccaaaaagagtccaggaccagatggattcacagccgaattctaccagaggtacaaggaggaactgcctggcagagacacaaccaaagaagagaattttagaccaatatccttgatgaacattgatgcaaaaatcctcaataaaatactggcaaaccaaatccagcagcacatcaaaaagattatccaccatgatcaagtgggcttcatccctgggatgcaaggctggttcaatatacgcaaatcaataaatgtaatccagcatataaacagagccaaagacaaaaaccacatgattatgtcaatagatgcagaaaaggcctttgacaaaattcaacaacccttcatgctaaaaactctcaataaattagtgttggaagttctggccagggcaattaggcgggagaaggaaataaagggtattcaattaggaaaagaggaagtcaaattgtccctgtttgcagaccacatgattgtatatctagaaaaccccattgtctcagcccaaaatctccttaagctgataagcaacttcagcaaagtctcaggatacaaaatcaatgtacaaaaatcacaagcattcttatacaccaacaacagacaaacagagagccaaatcatgagtgaactcccattcacaattgcttcaaagagaataaaatacctaggaatccaacttacaagggatgtgaaggacctcttcagggagaactacaaaccactgctcaaggaaataaaagaggatacaaacaaatggaagaacattccatgctcatgggtaggaagaatcaatatcgtgaaagtggccatactgcccaaggtaatttacagtttcaatgccatccccatcaagataccaatgcctttcttcacagaattggaaaaaactactttaaagttcatatggaaccaaaaaagagcccgcatcgccaagtcaatcctaagccaaaagaacaaagctggagccatcacactacctgacttcaaactatactacaagcctacagtaaccaaaacagcatggtactcataccaaaacagagataatagatcaatggaacagaacagagccctcagaaataacgccgcatatctacaactatctgatatttga

SEQ ID NO: 124201 - DNA, 2274 bp, Homo sapiens
atggtgttgtccggctttgttgttccatttctagagcacaagcatactagatttcgcatccttcttaagggccctaggattttcagaatggtgcccactctggccgcacttgaggagcccttcagcccactgctgcactgtgggagccactctctgggctggccaaagccagagccaactccctctgcttgcgagggagtggggaaggacaggtacctgagggaaccggggctgtgccccggccgcactcgcggcacacgcgagttcggggtgggcatcctctccacagaccccacacttggagcggcctgccggcgccactggccccaggcagcctcagccgcctccctgaaaagtaggactcagggcctgcagcctgccatgcccgagcctctccgcctcccccctgtgggctcctgggcagccggagcctccccagtgggagctgtcccctgctctgtggtgcccagtcccatcgaccgcccaggggctgagcagtgcaggcctgcccgcaaagccagcaaggctcctgagtcgggaggagacttggagaacttttatgtctggctggaggattgtatatgcaccaatcagcactctgtgtctagctctgggttcatgtatgcaccaatcagcactctgtgtctagctaatctggtggggacttggagaacttttgtgtctaactcagggattgtaaacgcattaatcagcaccccgtcaaaacggaccaatcagctttctgtaaaatggaccaatcagcaggatgtggtgttggaagttctggccagggcaattaggcaggagaaggaaataaagggtattcaattaggaaaagaggaagtcaaattgtccctgtttgcagacgacatgattgtatatctagaaaaccccattgtctcagcccaaaatctccttaagctgataagcaacttcagcaaagtctcaggatacaaaatcaatgcacaaaaatcacaagcattcttatacaccaacaacagacaaacagagagccaaatcatgagtgaactcccattcacaattgcttcaaagagaataaaatacctaggaatccaacttacaagggatgtgaaggacctcttcaaggagaactacaaaccactgctcaaggaaataacagaggatacaaacaaatggaagaacattccatgctcatgggtaggaagaatcaatatcgtgaaaatggccatactgcccaaggtaatttacagattcaatgctatccccatcaagctaccaatgactttcttcacagaattggaaaaaactactttaaagttcatatggaaccaaaaaagagcccgcatggccaagtcaatcctaagccaaaagaacaaagctggaggcatcacactacctgacttcaaactatactacaaggctacagtaaccaaaacagcatggtactggtaccaaaacagagatgtagatcaatggaacagaacagagccctcagaaataacgccgcatatctacaactatctgatctttgacaaacctgacaaaaacaagcaatggggaaaggattccctatttaataaatggggctgggaaaactggctagccatatgtagaaagctgaaactggatcccttccttacaccttatacaagaattaattcaagatggattaaagatttaaacgttagacctaaaaccataaaaaccctagaagaaaacctagacattaccattcaggacataggcatgggcaaggacttcatgtctaaaacaccaaaagcaatggcaacaaaagccaaaattgacaaatgggatctaattaaactaaagagcttctgcatagcaaaagaaactaccatcagagtgaacaggcaacctacaaaatgggagaaaatttttgcaacctactcacctgacaaagggctaatatccagaatctacaatgaactcaaacaaatttacaagaaaaaaacaaacaaccccatcaaaaagtgggcgaaagacatgaacagacacttctcaaaagaagacatttatgcagccaaaaaacacatgaaaagatgctcatcatcactggccatcagagaaatacaaatcaaaaccacaatgagataccatctcacaccagttagaatggcaatcattaaaaagtcaggaaacaacagttttctgatggcagaagcctggcccatctggttaagctctccgttcctggaaggaggacatagcagggacttcatacgtggggatgaatcaatgtcaaatgaggaaaaatacaaagaccttaattag

SEQ ID NO: 124202 - DNA, 3657 bp, Homo sapiens; identical to SEQ ID NO: 120146

SEQ ID NO: 124203 - DNA, 1710 bp, Homo sapiens
aatctctgggacacatttaaagcagtgtgtagagggaaatttatagcactaaatgcccacaagagaaagcaggaaatatctaaaattgacaccctaacatcacaattaaaagaactagagaagcaagaacaaacacattcaaaagctagcagaaggcaagaaataactaagatcagagcagaactgaaggagatagagacacaaaaaacccttcaaaaaatcaatgaatccaggagctggttttttgaaaacatcaaaattgatagacagctagcaagactaataaagaagaaaagagagaagaatcaaatagacacaataacaaacaataaaggggatatcaccaccgatcccatagaaatacaaactaccattagagaatactataaatacctctacgcaaataaactagaaaatctagaagaaatggataaattcctggacacatacaccctcccaagactaaaccaggaagaagttgaatccctgaatacaccaataacaggttctgaaattaaggcaataatcaatagcctaccaaccaaaagaagtccaggaccagacagatccacagctgaatctaccacaggtacaaagaggagctggtactattccttctgaaactattccaatccacagaaaaagagggctggcagagacacaacaaaaaaagagaattttagaccaatatccctgatgaacatcgatgcaaaaatcctcaataaaatactggcaaatcgaatccagcagcacatcaaaaagcttatctaccacgaccaagttggcttcatacctgggatgcaaggctggttcaacatatgcaaatcaataaatgtaatcttccaatacaccaataacagacaaacagagagccaaatcatgagtgaactcccattcacgattgcttcaaagagaataaaatacctaggaatccaacttacaagggatgtgaaggacctcttcaaggagaactacaaaccagtgctcaacgaaataagaggacacaaacaaatggaagaacattccatgctcatggataggaagaatcaatattgtgaaaatggccatactgcccaaggtaatttatagattcaatgccatccccatcaagctaccaatgactttcttcacagaattggaaaagaggaagtcaaattgtccctgtttgcagatgacatgattgtatatctagaaaaccccatcatctcagcccaaaatctccttaagctgataagcaacttcagcaaagtctcagcatacaaaatcaatgtgcaaaaatcacaagcattccgatacaccaataacagacaaacagagagccaaatcatgagtgaactcccattcacaattgcttcaaagagaataaaatacctaggaatccaactaacaagggatgtgaaggacctcttcaaggagaactacagaccactgctcaatgaaataaaagaggatacaaacaaatggaagaacattccatgctcatgggtaggaagaatcaatatcgtgataatggccatactgtccaaggtaatttacagattcaatgccaaccccatcaagctaccaatgactttcttcacagaattggaaaaaactactttaaaggtcatatggaaccaaaaaagagcccgcattgccaagtcaatctaagccaaaagaacaaagctggaggcatcatgctacctgacttcaaactatactacaaggcta

SEQ ID NO: 124204 - DNA, 1248 bp, Homo sapiens; identical to SEQ ID NO: 119552

SEQ ID NO: 124205 - DNA, 1887 bp, Homo sapiens
atgggagactttaacaacccactgtcaacattagacagatcaaggagacagaaagtcaacaagggtacccaggaattgaactcagctctgcaccaagcagacctaatagacatctacagaactctccaccccaaatcaacagaatatacatttttttcagcaccacaccacacctattccaaaattgaccacatacttggaagtaaagctctcctcagcaaatgtaaaagaacagaaattataacaaactatctctccgactacagtgcaatcaaactagagctcaggattaagaatctcactcaaaactgctcaactacatggaaactgaacaacctgctcctgaatgactactgggtacataacaaagtgaaggcagaaataaagatgttctttgaagccaaccagaacaaagacacaacatgccagaatctctgggacacattcaaagcagtatgtagagggaaaattatagtattaaatgcccacaagagaaagcaggaaagatccaaaattgacaccctaacatcacaattaaaagaactagaaaagcaagagcaaacacattcaaaagctagcagaaggcaagaaataactaaaatcagagcagaactgaaagaaatagagacacacaaaacccttcaaaaaattaatgaatccaggagctggttttttgaaaggatcaacaaaactgatagaacgctagcaagactaataaagaaaaaaagagagaagaatcaaatagacacaataaaaaatgataaaggggacatcaccactgatcccacagaaatacaaagtaccatcagagaatactacaaacacctctatgcaaataaactagaaaatctagaagaaatggataaattcctcgacacatacactctcccaagactaaaccaggaagaagttgaatctctgaatagaccaataacaggatctgaaattgtggcaataatcaatagcttaccaacaaaaaagagtccaggaccagatggattcacagctgaattctaccagaagtacaaggaggaactgcatataaacagaaccaaagacaaaaaccacatgattatctcaatagatgcagaaaaggcctttgacaaaattcaacaatgcttcatgctaaaaactctcaataaattagtgttggaagttctggccagggcaatcaggcaggagaaggaaataaagggtattcaagtaggaaaagaggatgtcaaattctccctgtttgcagatgacatggttgtatatctagaaaaccccattgtctcagcccaaaatctccttaagctgattagcaacttcagcaaagtctcaggatacaaaatcaatgtacaaaaatcacaagcattcttatacaccaacaacagacaaacagagagtcaaatcatgagtgaactcccattcacaattgcttcaaagagaataaaatacctaggaatccaacttacaagggatgtgaaggacctcttcaaggagaactacaaaccactgctcaaggaaataaaagaggatacaaacaaatggaagaacattccatgctcatgggtaggaagaatcaatatcgtgaaaatggccatactgcctaaggtaatttacagattcaatgccatccccatcaagctagcaatgactttcttcacaggattggaaaaaactcctttaaagttcatatggaaccaaaaaagagcccacatcaccaagtcaatcctgagccaaaagaacaaagctggaggcatcacactacctgacttcaaactatactacaaggctacagtaaccaaaacagcatggtcctggtaccaaaacagatatagatcaatggaacagaacagagccctcagaaataacaccgcatatctacaactatctgatctttga

SEQ ID NO: 124206 - DNA, 1143 bp, Homo sapiens; identical to SEQ ID NO: 119553

SEQ ID NO: 124207 - DNA, 1545 bp, Homo sapiens
atggggaaaaaacagaacagaaaaactggaaactctaaaaagcagagcgcctctcctcctccaaaggaacgcagttcctcaccagcaaaggaacaaagctggatggagaatgactttgaagagctcagagaagaaggcttcagactatcaaattactctgagctacgggaggacattcaaaccaaaggcaaagaagttgaaaactttgaaaaaaatttagcagtatgtataactagaataaccaatacagagaactgcctaaaggagctaatggagctgaaaaccaaggctcgagaactacgtgaagaatgcagaagcctcaggagccgatgcgatcaactggaagaaaggtggttggaagttctggccagggcaattaggcaggagaaggaaataaagggtattcaattaggaaaagaggaagtcaaattgtccctgtttgcagacgacatgattgtatatctagaaaaccccattgtctcagcccaaaatctccttaagctgataagcaacttcagcaaagtctcaggatacaaaatcaatgtacaaaaatcacaagcattcttatacaccaacaacagacaaacagagagccaaatcatgagtgaactcccattcacaattgcttcaaagagaataaaatacctaggaatccaacttacaagggatgtgaaggatctcttcaaggagaactacaaaccactgctcaaggaaataaaagaggatacaaacaaatggaagaacattccatgctcatgggtaggaagaatcaatatcgtgaaaatggccatactgcccaaggtaatttacagattcaatgccatccccatcaagctaccaatgactttcgtcacagaattggaaaaaactactttaaagttcatatggaaccaaaaaagagcccgcattgccaagtcaatcctaagccaaaagaacaaagctggaggcatcacactacctgacttcaaagtatactacaaggcttcagtaaccaaaacagcatgtgctctgcggaaacctaacattgattcaggtacagggagaaggcgcatgagactcgaaagcgtagctaaatttcattcgccaaaaagcccgatgatgagcgactcaccacgggccacggcttctgactctctttccggtactgatgtgatggctgctatggggatggcgcaatcacaagccggattcggtatggctgcattctgcggtaagcacgaactcagccagaacgacaaacaaaaggctatcaactatctgatgcaatttgcacacaaggtatcggggaaataccgtggtgtggcaaagcttgaaggaaatactaaggcaaaggtactgcaagtgctcgcaacattcgcttatgcggattattgccgtagtgccgcgacgccgggggcaagatgcagagattgccatggtacaggccgtgcggttgatattgccaaaacagagctgtggggggagaagttgtcgagaaagagtgcggaagatgcaaaggcgtcggctattcaaggatgccagcaagcgcagcatatcgcgctgtga

SEQ ID NO: 124208 - DNA, 3303 bp, Homo sapiens
ctcgaaagtaagggattaacactgaatagtaatgcctggatgaacgacactgtcataattgatagtacagtgggaaaggacacgttctttctcatcacatggaacagtctgcctcccagtatttctctctgggatcccagtggaacaataatggaaaatttcacagtggatgcaacttccaaaatggcctatctcagtattccaggaactgcaaaggtgggcacttgggcatacaatcttcaagccaaagcgaacccagaaacattaactattacagtaacttctcgagcagcaaattcttctgtgcctccaatcacagtgaatgctaaaatgaataaggacgtaaacagtttccccagcccaatgattgtttacgcagaaattctacaaggatatgtacctgttcttggagccaatgtgactgctttcattgaatcacagaatggacatacagaagttttggaacttttggataatggtgcaggcgctgattctttcaagaatgatggagtctactccaggtattttacagcatatacagaaaatggcagatatagcttaaaagttcgggctcatggaggagcaaacactgccaggctaaaattacggcctccactgaatagagccgcgtacataccaggctgggtagtgaacggggaaattgaagcaaacccgccaagacctgaaattgatgaggatactcagaccaccttggaggatttcagccgaacagcatccggaggtgcatttgtggtatcacaagtcccaagccttcccttgcctgaccaatacccaccaagtcaaatcacagaccttgatgccacagttcatgaggataagattattcttacatggacagcaccaggagataattttgatgttggaaaagttcaacgttatatcataagaataagtgcaagtattcttgatctaagagacagttttgatgatgctcttcaagtaaatactactgatctgtcaccaaaggaggccaactccaaggaaagctttgcatttaaaccagaaaatatctcagaagaaaatgcaacccacatatttattgccattaaaagtatagataaaagcaatttgacatcaaaagtatccaacattgcacaagtaactttgtttatccctcaagcaaatcctgatgacattgatcctacacctactcctactcctactcctactcctgataaaagtcataattctggagttaatatttctacgctgattatgctagatataaagggtattcaattaggaaaagaggaagtcaaattgtccctgtttgcagatgacatgattgtatatctagaaaaccccattgtctcagcccaaaatctccttaagctgataagcaacttcagcaaagtctcaggatacaaaatcaatgtacaaaaatcacaagcattcttatacaccaacaacagacaaacagagagccaaatcatgagtgaactcccattcacaattgcttcaaagagaataaaatacctaggaatccaacttacaagggacgtgaaggacctcttcaaggagaactacaaaccactgctcaaggaaataaaagaggatacaaacaaatggaagaacatttcatgctcatggataggaagaatcaatatcgtgaaaatggccatactgcccaagagagaaatcacagggagatgtacagcaatggggccatttaagagttctgtgttcatcttgattcttcaccttctagaaggggccctgagtaattcactcattcagctgaacaacaatggctatgaaggcattgtcgttgcaatcgaccccaatgtgccagaagatgaaacactcattcaacaaataaagggggagtacacgtcacaagatgaggaagggagagtcagagagaaactctctcttcccccgtcaaatatacatacacacacaccacacgcacaagctcgtgtgcacacacacacgcccatgcacacacgcagacatacacgcacacacgcacgtcagaaggacatggtgacccaggcatctctgtatctgcttgaagctacaggaaagcgattttatttcaaaaatgttgccattttgattcctgaaacatggaagacaaaggctgactatgtgagaccaaaacttgagacctacaaaaatgctgatgttctggttgctgagtctactcctccaggtaatgatgaaccctacactgagcagatgggcaactgtggagagaagggtgaaaggatccacctcactcctgatttcattgcaggaaaaaagttagctgaatatggaccacaaggtagggcatttgtccatgagtgggctcatctacgatggggagtatttgacgagtacaataatgatgagaaattctacttatccaatggaagaatacaagcaactgccagttttgaggggggtccagaacagaaggctctgcaacaaatccaggctgctgtgcaagctgctctgccacttgggccatatgacccagcaaatccaatggtgcttgaggtgtcagtggcagatagggatactgtttggagcctttggcaggtccccataggtgaatcacagctaggattttggagcaaggccctgccatcttctgcagataactactctccttttgagagacagctcttggcctgttactgggctttggtggaaactgaatatttgactatgggtcatgaagtcaccatgctccctgaactgcctatcatgacctgggtgctttctgatccatctagttataaaaaatggccagatgtgcaattatatactgattcatgggctgtagccaatggtttggctggatggtcagggacttggaagaagcatgattggaaaattggtgacaaagaaatttggggaagaggcatgtggatggagctctctgagtggtcaaaaactgtgaaggtatttgtatcccatgtgagtgctcaccaacgggtgacctctgcagaggaggattttaataatcaagtggacccggtgacccattctgtggacaccactcagcctctttccccagccacctctgtcatcgcccaatggatccatgaacaaagtggccatggtggcagggatggaggttactcatgggctcagcaacatggacttccattcaccaaggctgacctggctatggccactgctgagtgcccaatttgtcagcagaagagacccacactgagccctccatatggcaccattccttggggtgatcagccagctacctggtggcagattgattatattggacctcttttatcatggaaagagcagaggtttttcctccctggatag

SEQ ID NO: 124209 - DNA, 1827 bp, Homo sapiens; identical to SEQ ID NO: 119535

SEQ ID NO: 124210 - DNA, 1026 bp, Homo sapiens
atgagttccaggtgggcgcgggcttggcgggccctgccgtcggagcggctgtccagcgccgccaccctgggctgtgaggggcttagcacctgggccagcagctgcagaggggcagggctcaggacctgcagccggtcatgccggagcctatccccaacccccaccggggctcggcttgttctcaccgaaaaaccgcctgctccccgcagggcgtttttgagggtcgaccgtatttgtgtcaatggcagtgtgtttggaggggcccaaaatctccttaagctgataagcaacttcagcaaagtctcaggatacaaaatcaatgtacaaaaatcacaagcattcttatacaccaacaacagacaagcagagagccaaatcatgagtgaactcccattcacaattgcttcaaagagaataaaatacctaggaatccaacttacaagggatgtgaaggacctcttcaaggagaactacaaaccactgctcaaggaaataaaagaggacacaaacaaatggaagaacattccatgctcatgggtaggaagaatcaatatcgtgaaaatggccatactgcccaaggtaatttacagattcaatgccatccccatcaagctaccaatgactttcttcacagaattggaaaaaactactttaaagttcatatggaaccaaaaaagagcccgcatcaccaagtcaatcctaagccaaaagaacaaagctggaggcatcacactacctgacttcaaactatactacaaggaaacagtaaccaaaacagcatgggattttgccgatttcggaaccaccatcaaacaggattttcgcctgctggggcaaaccagcgtggaccgcttgctgcaactctctcagggccaggcggtgaagggcaatcagctgttgcccgtctcactggtgaaaagaaaaaccaccctggcgcccaatacgcaaaccgcctctccccgcgcgttggccgattcattaatgcagctggcacgacaggtttcccgactggaaagcgggcagtga

SEQ ID NO: 124211 - DNA, 2241 bp, Homo sapiens; identical to SEQ ID NO: 116379

SEQ ID NO: 124212 - DNA, 2661 bp, Homo sapiens
atggagctgaaaaccaaggctcgagaactacgtgaagaatgcagaagcctcaggagccgatgcgatcaactggaagaaagggtatcagcgatggaagatgaaatgaatgaaatgaagcgagaagggaagtttagagaaaaaagaataaaaagaaatgagcaaagcctccaagaaatatgggactatgtgaaaagaccaaatctacatctgattggtgtacctgaaactgatggggagaatggaaccaagttggaaaacactctgcaggatattatccaggagaacttccccaatctagcaaggcaggccaatgttcagattcaggaaatacagagaacgccacaaagatactcctcgagaagagcaactccaagacacataattgtcagattcaccaaagttgaaatgaaggaaaaaatgttaagggcagccagagagaaagaaatacaaactaccatcagagaatattacaaacaccttcacgcaaataaactagaaaatctagaagaaatggataaattcctcgacacatacactctcccaagactaaaccaggaaaaagtagaatctttgaatagaccaataacaggagctgaaattgtggcaataatcaatatttaccaaccaaaaagagtccaggaccagatggattcacagccgaattttaccagagagggaatcctccctaactcattttatgaggccagcatcattctgataccaaagctgggcagagacacagccaaaaaagagaattttagaccaatatccttgatgaacattgatgcaaaaatcctcaataaaatactggcaaaacgaatccagcagcacatcaaaaagcttatccaccatgatcaagtgggcttcatccctgggatgcaaggttggttcaatatacgcaaatcaataaatgtaatccagcatgtaaacagaaccaaagacaaaaaccacatgattatctcaatagatgaagaaaaggcctttgacaaaattcaacagcccttcatgctaaaaactctcaataaattaggtattgatgggatgtatttcataataataagagctatctatgacaaacccacagcccatatcatactgaatgggaaaaaactggaagcattccctttgaaaactggcatgagacagggatgccctctctcaccactcctattcaatatagtgttcaaagttctggccagagcaattaggcaggagaaggaaataaagggtattcaattaggaaaagaggaattcaaattgtccctgtttgcagacgacatgattgtatatctagaaaaccccattgtctcagcccaaaatctccttaagctgataagcaacttcagcaaagtctcaggatacaaaatcaatgtacaaaaatcacaaacattcttatacaccaacaacagacaaacagagagccaaatcatgagtgaactcccattcacaattgcttcaaagagaataaaatacctaggaatccaacttacaagggatgtgaaggacctcttcaaggagaactacaaaccactgctcaaggaaataaaagaggatacaaacaaatggaagaacattccatgctcatgggtaggaagaatcaatatcgtgaaaatggccatactgcccaaggtaatttacagattcaatgccatccccatcaaggtaccaatgactttcttcacagaattggaaaaaactactttaaagttcatatggaaccaaaaaagagcctgcatcgccaagtcaatcctgagccaaaagaacaaagctggaggcatcacactacctgacttcaaactatactacaaggctacagtaaccaaaacagcatggtactggtaccaaaacagagatatagatcaatggaacagaacagagccctcagaaataacgccacatatctacaactatctgatctttgacaaacctgagaaaaacaagcaatggggaaaggattccctatttaataaatggtgctgggaaaactggctagccatatgtagaaagctgaaactggatcccttccttacaccttatacaaaaatcaattcaagatggattaaagatttaaatgttagacctaaaaccataaaaaccctagaagaaaacctaggcattaccattcaggacataggcgtgggcaaggacttcatgtccaaaacaccaaaagcaatggcaaccaaagccaaaattgacaaatgggatctaattaaactaaagagcttctgcacagcaaaagaaactaccatcagagtgaacaggcaacctacaacatgggagaaaattttcgcaacctactcatctgacaaagggctaatatccagaatctacaatgaactcaaacaaatttacaagaaaaaagcaagaagccccgtccctaggggagaggggagagcgccacataaagagagcaccccatgggataaaagaatctcaacagcagcgctggagtcccagatcttccctctgacacagtctacccacatgagaaggaacgagaaaaacatttctggtaatgtgacaaaacgagattctttaacacccccaaaagatcacactagttcaccagcaatggatccaaaccaagacaaaatctctgaatcgtcagaaaaagaattcagaatgtcaactattaagctaatcaagaaggcaccagaaaaa

SEQ ID NO: 124213 - DNA, 1107 bp, Homo sapiens
atggataaattccttgacacatacactctcccaaaactaaaccaggaagaagttgaatctctgaatagaccaataacaggatctgaaattgtggcaataatcaatagcttaccaaccaaaaagagtccaggaccagatggattcacagccgaattctaccagaggtacaaggaggaactgctgataagcaacttcagcaaactctcaggatacaaaatcaatgtacaaaaatcacaagcattcttatacaccaataacagacaaacagagagccaaatcatgagtgaactcccattcacaattgcctcaaagagaataaaatacctaggaatccaacttacaagggatgtgaaggacctcttcaaggagaactacaaaccactgctcaaggaaataaaagaggatacaaacaaatggaagaacattccatgctcatgggtaggaagaatcaatatcgtgaaaatggccatactgcccaaggacaaaacaagtaaatatattgatgttgatgagaatgagggttctcactgtggaaaaaggaaatacaaatatggaatggagaaagcgttggaaattctggccagggcaatcaggcaggagaaagaaataaagggtattcaattaggaaaagaggaagtcaaattgtccctgtttgcagatgacatgattgtacatttagaaaaccccatcatctcagcccaaaatctccttaagctgataagcaacttcagcaaagtctcaggacacaaaatcaatgtacaaaaatcacaaacattcctatacaccaataacagacaaacagagagccaaatcatgagtggactcccattcaaaattgctacaaagagaataaaatacctaggaatccaacttacaagggatgtgagggatctcttcaagaactacaaaccactgctcaacgaattaaaagagggcacaaacaaatggaagaagaacatcctgtcctcatggataggaagaatcaatatcgtgaaaatggccatactgcccaaggtaatttatagattcaatgccatcctcatcaacctaccaatgactttcttcacggaattggaaaaaactactttaaaattcatatggaactaa

SEQ ID NO: 124214 - DNA, 1668 bp, Homo sapiens
atggagtcttttcagtgtgccctaaaggaggtgggccttgatgagccactgagacttgctggcttcaggggagactcagcacattaccagctctggtggctacagggcaaaagtaaagaggcaaaagcagaggcaaaagtaaaggcgactttgtcttgcaccttaggtaccaaaaccgccacagtgttggaagttctggccagggcaatcaggcaggagaaggaaataaagggtattcaattaggaaaagaggaagtcaaattgtccctgtttgcagacgacatgattgtttatctagaaaaccccatcgtctcagcccaaaatctccttaagctgataagcaacttcagcaaagtctcaggatacaaaatcaatgtacaaaaatcacaagcattcttatacaccaacaacagacaaacagagagccaaatcatgagtgaactcccattcacaattgcttcaaagagaataaaatacctaggaatccaacttacaagggatgtgaaggacctcttcaaggagaactacaaaccactgctcaaggaaataaaagaggatacaaacaaatggaagaacattccatgctcatgggtaggaagaatcaatatcgtgaaaatggccatactgcccaagggaatttacagattcaatgccatccccatcaagctaccaatgattttcttcacagaattggaaaaaactactttaaagttcatatggaaccaaaaaagagcccgcatcgccaagtcaatcctaagccaaaagaacaaatctggaggcatcacactacctgacttcaaactatactacaaggctacagtaaccaaaacagcatggtactggtcccaaaacagagatatagatcaatggaacagaacagagccctcagaaataacgccgcgtatctacaactatctgatctttgacaaacctgagaaaaacaagcaatggggaaaggattccctatttaataaatggtgctgggaaaactggctagccatatgtagaaagctgaaactggatcccttccttacaccttatacaaaaatcaattcaagatggattaaagatttaaacgttagacctaaaaccataaaaaccctagaagaaaacctaggcattaccattcaggacataggcgtgggcaaggacttcatgtccaaaacaccaaaagcaatggcaacaaaagccaaaattgacaaatgggatctaattaaactaaagagcttctgcacagcaaaagaaactaccatcagagtgaacaggcaacctacaacatgggagaaaattttcgcaacctactcatctgacaaagggctaatatccagaatctacaatgaactcaaacaaatttacaagaaaaaaacaaacaaccccatcaaaaagtgggcgaaggacatgaacagacacttctcaaaagaagacatttatgcagccaaaaatcacacgaaaaaatgctcatcatcactggccatcagagaaatgccaatcaaaaccacaatgagataccatctcacaccagttataatcagcccctacctggctttgcccctcaacaggccctggcagcttaacacaaaagacagaaacttttgggacctctctggccccacccattgcctgaaacaccagaaaacctccccgggtaacataaggcaagcacagatc

SEQ ID NO: 124215 - DNA, 1945 bp, Homo sapiens
atgaaggtcatcttcgcctctattactttagacctcaaccaagggtcaatccatagtgaaatacaaactaccatcagagaatattacaaacaccttcacgcaaataaactagaaaatctagaagaaatggataaattcctcgacacatacactctcccaagactaaaccaggaaaaagtagaatctttgaatagaccaataacaggagctgaaattgtggcaataatcaatatttaccaaccaaaaagagtccaggaccagatggattcacagccgaattttaccagagtgttcaaagttctggccagagcaattaggcaggagaaggagggggagggtattcaattaggaaaagtggaattcaaattgtccctgtttgcagacgacatgattgtatatctagaaaaccccattgtctcagcccaaaatctccttaagctgataagcaacttcagcaaagtctcaggatacaaaatcaatgtacaaaaatcacaaacattcttatacaccaacaacagacaaacagagagccaaatcatgagtgaactcccattcacaattgcttcaaagagaataaaatacctaggaatccaacttacaagggacgtgaaggacctcttcaaggagaactacaaaccactgctcaaggaaataaaagaggatacaaacaaatggaagaacattccatgctcatgggtaggaagaatcaatatcgtgaaaatggccatactgcccaaggtaatttatagattcaatgccatccccatcaagctaccaatgacttccttcacagaattggaaaaaactactttaaagttcatagggaaccaaaaaagagcccgcatcgccaagtcaatcctaagccaaaagaacaaagctggaggcatcacactacctgacttcaaactatactacaaggctacagtaaccaaaacagcatggtactggtaccaaaacagagatatagatcaatggaacagaacagagccctcagaaataacgccacatatctacaactatctgatctttgacaaacctgagaaaaacaagcaatggggaaaggattccctatttaataaatgggattctctctgcgttctcatcaaccacgtgagcccagcaagctcttccacggtggctgcagccttggtggggatgcctgggtttatgctcaaggtctcagggaaccccccctggggccgccacaccgtggtcatcaagcacccactgcgagaagtgcccgggaatgtctgcccgtgtccgtggtcacagggcacacaactgactctgcagcaggagggcacacgactgactctgcagcaggagggcacacgactgactctgcagcaggagggcacacgactgactctgcagcaggagggcacacgactgactctgcagcaggagggcacacgactgactctgcagcaggagggcacacgactgactctgcagcaggagggcacacgactgactctgcagcaggagggcacacgactgactctgcagcaggagggcacacgactgactctgcagcaggagggcacacgactgactctgcagcaggagggcacacgactgactctgcagcaggagggcacacgactgactctgcagcaggagggcacacgactgactctgcagcaggagggcacacgactgactctgcagcaggagggcacacgactgactctgcagcaggagggcacacgactgactctgcagcaggagggcacacgactgactctgcagcaggagggcacacgactgactctgcagcaggagggcacacgactgactctgcagcaggagggcacacgactgactctgcagcaggagggctgtgtggatcccctgacctaccatttgcttcattcagcagcacgtgtcacccctcatcatgcaaacaaaccatccgtgcttgcaaagagttccccgggtgtgg

SEQ ID NO: 124216 - DNA, 3303 bp, Homo sapiens
atgggagactttaacaccccactgtcaacattagacagatcaacgagacagaaagtcaacaaggatacccaggaattgaactcagctctgcaccaaggggacctaatagacatctacagaactctccaccccaaatcaacagaatatacatttttttcagcaccacaccacacctattccaaaattgaccacatagttggaagtaaagctctcctcagcaaatggaaaagaacagaaattataacaaactatctctcagaccacagcgcaatcaaactagaactcaggattaagaatctcactcaaagccgctcaactacatggaaactgaacaacctgctcctgaatgactactgggtacataacgaaatgaaggcagaaataaagatgttctttgaaaccaacgagaacaaagacacaacataccagaatctctgggatgcattcaaagcagtgtgtagagggaaatttatagcactaaatgcccacaagagaaagcaggaaagatccaaaattgacaccctaacatcacagttaaaagaactagaaaagcaagagcaaacacattccaaagctagcagaaggcaagaaataactaaaatcagagcagaactgaaggaaatagagacacaaaaaacccttcaaaaaatcaatgaatccaggagctggttttttgaaaggatcaacaaaattgatagaccactagcaagactaataaagaaaaaaagagagaagaatcaaatagacacaataaaaaatgataaaggggatatcaccaccgatcccacagaaatacaaactaccatcagagaatactacaaacacctctattcaaataaactagaaaatctagaagaaatggataaattcctcgacacatacactctcccaagactaaaccaggaagaagttgaatctctgaatagaccaataacaggagctgaaattgtggcaataatcaatagtttaccaaccaaaaagattccaggaccagatggattcacagccgaattctaccagaggtacaaggaggaactggtaccattccttctgaaactattccaatcaatagaaaaagagggaatcctccctaactcattttatgaggccagcatcattctgataccaaagccgggcagagacacaaccaaaaaagagaattttagaccaatatccttgatgaacattgatgcaaaaatcctcaataaaatactggcaaaacgaatccagcagcacatcaaaaagcttatccaccatgatgaagtgggcttcatccctgggatgcaaggctggttcaatatacacaaatcaataaatgtaatccagcatataaacagagccaaagacaaaaaccacatgattatctcaatagatgcagaaaaagcctttgacaaaattcaacaacccttcatgctaaaaactctcaataaattaggtattgatgggatgtatttcaaaataataagagctatctatgacaaacccacagccaatatcatgctgaatgggcaaaagctggaagtattccctttgaaaagcagcacaagacaaggatgccctctctcaccactcctattcaacatggtactgaatgttctggccagggcaatcaggcaagagaaagcaataaagggtattcaaataggaagagaggaagtcaaattgtccctgtttgcagatgacgtgattgtttatctagaaaaccccatcgtctcagcccaaaatctccttaagctaataagcaacttcagcaaagtctcaggatacaaaatcaatgtacaaaaatcacaagcattcctatacaccaacaacagacaaacagagagccaaatcatgagtgaactcccattcacaattgcttcaaagagaataaaatacctaggaatccaacttacaagggatgtgaaggacctcttcaaggagaactacaaaccactgctcaaggaaataaaagaggatacaaacaaatggaagaacattccatgctcatgggtaggaagaatcaatatcgtgaaaatggccatactgcccaaggtaatttatagattcaatgccatccccatcaacctaccaatgactttcttcacagaattggaaaaaactactttaaagttcatatggaaccaaaaaagagcccgcatcgccaagtcaatcctaagccaaaagaacaaagctggaggcatcacactacctgacttcaagctatactacaaggctacagtaaccaaaacagcatggtactggtaccaaaacagagatatagatcaatggaacagaacagagccctcagaaataatgctgcatacctacaactatctgatctttgacaaacctgagaaaaacaagcaatggggaaaggattccctatttaataaatggtgctgggaaaactggctagccatatgtagaaagctgaaactggatcccttccttacaccttatacaaaaatcaattcaagatggattaaagatttaaacgttagacctaaaaccataaaaaccctagaagaaaacctaggcattaccattcaggacataggcgtgggcaaggacttcatgtccaaaactccaaaagcaatggcaaccaaagccaaaattgacaaatgggatctaattaaactaaagagcttctgcacagcgggggaaactaccatcagagtgaacaggcaacctacaacatgggagaaaattttcgcaacctactcatctgacaaagggctaatatccagaatctacaatgaactcaaacaaatttacaagaaaaaaacaaacaaccccatcaaaaagtgggcgagggacatgaacagacacttctcaaaagaagacatttatgcagccaaaaaacacatgaaaaaatgctcatcatcactggccatcagagaaatgcaaatcaaaaccactatgagataccatctcacaccagttagaatggcaatcattgaaaagtcaggaaacaacaggtgctggagaggatgtggagaaataggaacacttttacactgttggtgggactgtaaactagttcaaccattgtggaagtcagtgtggcgattcctcagggatctagaactagaaataccatttgacccagccatcccattactgggtatatacccaaaggactataaatcatgctgctataaagacacatgcacacattcacagaccattcttcagaaagtttggaccaacgatgtcaagtttgccattctatctcctgaatgtgtggcaaacatcactagtcagttattgagttctttcctgctgagtgttccagtcagctactgccagttaattcttgag

SEQ ID NO: 124217 - DNA, 1382 bp, Homo sapiens
atggagctgaaaaccaaggctcgagaactacgtgaagaatgcagaagcctcaggagccgatgcgatcaactggaagaaagggtatcagcaatggaagatgaaatgaatgaaatgaagcgagaagggaagtttagagaaaaaagaataaaaagaaatgagcaaagcctccaagaaatatgggactatgtgaaaagaccaaatctacgtctgattggtgtacctgaaagtgatggggagaatggaaccaagttggaaaacactctgcaggatattatccaggagaacttccccaatctagcaaggcaggccaaccatataaacagagccaaagacaaaacccacatgattatctcaatagatgcagaaaaagcctttgacaaaattcaacaactcttcatgctaaaaactctcaataaattaggtattgatgggacgtatttcaaaataataagagctatctatgacaaacccacagccaatatcatactgaatgggcaaaaactggaagcattccctttgaaaactggcacaagacagggatgccctctctcaccgctcctattcaacatagtgttggaagttctggccagggcaatcaggcaggagaaggaaataaagggtattcaattagcaaaagaggaagtcaaattgtccctgtttgcagacgacatgattgtttatctagaaaaccccatcgtctcagcccaaaatctccttaagctgataagcaacttcggcaaagtctcaggatacaaaatcaatgtacaaaaatcacaagcattcttatacaccaacaccagacaaacagagagccaaatcatgagtgaactcccattcacaattgcttcaaagagaataaaatacctaggaatccaacttacaagggatgtgaaggacctcttcaaggagaactacaaaccactgctcaaggaaataaaagaggacacaaacaaatggaagaacattccatgctcatgggtaggaagaatcaatatcgtgaaaatggccatactgcccaaggtaatttacagattcaatgccatccccatcaagctaccaatgactttcttcacagaattggaaaaaactactttaaagttcatacagaaccaaaaaggagcctgtattgccaagtcaatcctaagccaaaagaccaaagctggaggcatcacactacctgacttcaaactatactgtaaaggctacagtaaccaaaacagcatggttcacagaaaggcagcaaagtgttgtgtgaaccctggtgctgtggacctcagagactttggccccaccttgctctctggccacctctcctggctgtctcactccctgcacgctctcaccctccgcttggcagctctgatgctcttcgatttatccag

SEQ ID NO: 124218 - DNA, 656 bp, Homo sapiens
atgcctcctgtagacgcatcgcgcgaccttcgggaactaaatcccctttccagctataaagcgaagccaaacgaatacctgctgcttgtgcaagttttgtttttgaaccgaaatacaaaagagggcttgatacgacttctagctcggtacccggatgacctccaacaaacagagagccaaatcatgagtgaactcccattcacaattgcttcaaagagaataaaatacccaggaatccaacttacaaaggatgtggaggacctcttcaaagagaactacaaaccactgctcagcaaaataagaggatgcaaacaaatggaagaacattccatgctcatggataggaagaatcaatatcgtgaaaatggccgtactgcccaagaagaaaatctgggtttagtcataaaagtaacacaagacgtagctgaagaccaggtatcgaatctagcgttggcagactgggccaaatggaaggattctaaggtttccttcttagcggtgagtttaactgaatcattaatgcacttttaaagaggcaggaaagacagtgccctgtatagttagaacaagatgctgggagcgagcctctcaagaatcagaggccatcattggagaggcctggattctggcgatttaacgaattcctgatgacatag

SEQ ID NO: 124219 - DNA, 2218 bp, Homo sapiens
atggaagatgaaatgaatgaaatgaagcgagaagggaagtttagagaaaaaagaataaaaagaaatgagcaaagcctccaagaaatatgggactatgtgaaaagaccaaatctacatctgattggtgtacctgaaagtgatgtggagaatggaaccaagttggaaaacactctgcaggatattatccaggagaacttccccaatctagcaaggcaggccaacgttcagattcaggaaatacagagaacgccacaaagatactcctcgagaagagcaactccaagacacataattgtcagattcaccaaagttgaaatgaaggaaaaaatgttaagggcagccagagagaaagggcactgtaactctggcaaaagtcacagatccctttgggaacaaaacaagggaatatttaccacatgtatttgtgatgatgccgaggacttacagtctccttcaactgctggaccctggtttggggttctttataccaaaggtggaccctaccctcaggaagacatattcagtgaagaagttcatacaggccctaagttgaggaagaaaattcaagagtaccagttaacaagcaaatggtcaaaaagtgatgttcaggtttctgtggagaggagaatggctggaggaaatccaaaccagtgccatattggggaagttctcctggatggattcacagctgaattctaccggaggtacaaggaggaactggtaccattccttctgaaactattccaatcaatagaaaaagagggaatcctccctaactcattttatgaggccagcatcattctgatacaaaagccaggcagagacacaacaaaaaaagagaattttagaccaatatccttgatgaacattgatgcaaaaatcctcaataaaatactggcaaaacgaatccagcagcacatcgaaaagcttatccaccatgatcaagtgggcttcatccctgtgatgcaaggctggttcaatatatgcaaatcaataaatgtaatccagcatataaacagagccaaagacaaaaaccacatgattatctcaatagatgcagaaaaagcctttgataaaattcaacaacccttcatgctaaaaactctcaataaattaggtattgatgggatgtatttcaaaataataagagctatctatgacaaacctacagccaatatcatactgaatgggcaaaaactggcagcattccctttgaaaactggcacaagacagggatgccctctctcaccactcctattcaacatagtgttggaagtcctggccagggcaatcaggcaggagaaggaaataaagggtattcaattaggaaaagaggaagtcaaattgtccctgtttgcagatgacatgatcgtatatctagaaaaccccattgtctcagcccaaaatctccttaagctgataagcaacttcagcaaagtctcaggatacaaaaaaaaaatcaatgtacaaaaatcacaagcattcttatacaccaataacagacaaacagagagccaaatcatgagtaaactcccattcacaattgcttcaaagagaataaaatacctaggaatccaacttacaagggacgtgaaggacctcttcaaggagaactacaaaccactgctcaaggaaataaaagaggatacaaacaaatggaagaacattccatgctcatgggtaggaagaatcaatatcgtgaaaatggccatactgcccaaggtaatttatagattcaatgccatccccatcaagctaccagtgactttcttcacagaattggaaaaaactactttaaagttcatatggaaccaaaaaagagcccgcatagccaagtcaatcctaagccaaaagaacaaagctggaggcatcacactacctgacttcaaactatactacaaggctacagtaaccaaaacagcatgttcccagtcagctcccatggaattaggcttcaggccaatccctgtggactcagggactaggaccatccctgaaccaggcctgaccccatggacccaggcttcaggatggacaccaaagacatgtgcttcaggcttcttcctacagatccagttgacaagtccactctggtggactccagtactaggcttgcaccacaaacccaggattcaggtctacacagaaggcccaagccccaggccagcgcctttagactcagatgccagctctacccacctgctgactcaggcatcag

SEQ ID NO: 124220 - DNA, 2562 bp, Homo sapiens; identical to SEQ ID NO: 116377

SEQ ID NO: 124221 - DNA, 3169 bp, Homo sapiens
atgtcaagtgaatgggagtggttgaggtgctcagaagttaaaggtcagagagacgtgaggccagggtgtttggggtgggactttcgtgtgtatattgttgaggacacccaggatgaggacagaacttggagtgtcaaggaagcctgtgagctggtccttagagttcaggaaatgatcatcacaagggtggtagatgctgcaccacaccacacctattccaaaattgaccacatagttggaagtaaagctctcctcagcaaatgtaaaagaacagaaattataacaaactgtctctcagaccacagtgcaatcaaactagaactcaggattaagaatctcactcaaagccgctcaactacatggaaactgaacaacctgctcctgaatgactactgggtacataacgaaatgaaggcagaaataaagatgttctttgaaaccaacgagaacaaagacaccacataccagaatctctgggacgcattcaaagcagtgtgtagagggaaatttatagcactaaatgcctacaagagaaagcaggaaagatccaaaattgacaccctaacatcacaattaaaagaactagaaaagcaagagcaaacacattcaaaagctagcagaaggcaagaaataactaaaatcagagcagaactgaaggaaatagagacacaaaaaacccttcaaaaaatcaatgaatccaggagctggttttttgaaaggatcaacaaaattgatagaccgctagcaagactaataaagaaaaaaagagagaagaatcaaatagacgcaataaaaaatgataaaggggatatcaccaccgatcccacagaaatacaaactaccatcagagaatactacaaacaactctacgcaaataaactagaaaatctagaagaaatggatacattcctcgacacatacactctcccaagactaaaccaggaagaagttgaatctctgaatagaccaataacaggctctgaaattgtggcaataatcaatagtttaccaaccaaaaagagtccaggaccagatggattcacagccgaattctaccagaggtacaaggaggaactggtaccattccttctgaaactattccaatcaatagaaaaagagggaatcctccctaactcattttatgaggccagcatcattctgataccaaagccaggcagagacacaaccaaaaaagagaattttagaccaatatccttgatgaacattgatgcaaaaatcctcaataaaatactggcaaaccgaatccaacagcacatcaaaaagcttatccaccatgatcaagtgggcttcatccctgggatgcaaggctggttcaatatacgcaaatcaataaatgtaatccagcatataaacagagccaaagacaaaaaccacatgattatctcaatagatgcagaaaaggcctttgacaaaattcaacaacccttcatgctaaaaactctcaataaattaggtattgatgggacgtatgtcaaaataataagagctatctatgacaaacccacagccaatatcatactgaatgggcaaaaactggaagcattccctttgaaaactggcacaagacagggatgccctctctcaccgctcctattcaacatagtgttggaagttctggccagggcaatcaggcaggagaaggaaataaagggtattcaattaggaaaagaggaagtcaaattgtccctgtttgcagacgacatgattgtttatctagaaaaccccatcgtctcagcccaaaatctccttaagctgataagcaacttcagcaaagtctcaggatacaaaatcaatgtacaaaaatcacaagcattcttatacaccaacaacagacaaacagagagccaaatcatgggtgaactcccattcacaattgcttcaaagagaataaaatacctaggaatccaacttacaagggatgtgaaggacctcttcaaggagaactacaaaccactgctcaaggaaataaaagaggatacaaacaaatggaagaacattccatgctcatgggtaggaagaatcaatatcgtgaaaatggccatactgcccaaggtaatttatagattcaatgccatccccatcaagctaccaatgactttcttcacagaattggaaaaaactactttaaagttcatatggaaccaaaaaagagcccgcattgccaagtcaatcctaagccaaaagaacaaagctggaggcatcacactacctgacttcaaactatactacaaggctacagtaaccaaaacagcatggtactggtaccaaaacagagatatagatcaatggaacagaacagagccctcagaaataacgccgcatatctacaactatctgatctttgacaaacctgagaaaaacaagcaatggggaaaggattccctatctaataaatggtgctgggaaaactggctagccatatgtagaaagctgaaactggatcccttccttacaccttatacaaaaatcaattcaagatggattaaagacttaaacgttagacctaaaaccataaaaaccctagaagaaaacctaggcaataccattcaggacataggcatgggcaaggacttcatgtctaaaacaccaaaagcaatggcaacaaaagacaaaattgacaaatgggatctaattaaactaaagtgcttctgcacagcaaaagagactaccatcagagtgaacaggcaacctacaaaatgggagaaaattttcgcaacctactcatctgacaaagggctaatatccagaatctacgatgaactcaaacaaatttacaagaagaaaacaaacaaccccatcaaaaagtgggcaaaggacatgaacagacacttctcaaaagaagacatttatgcagccaaaaaacacatgaaaaaatgctcatcatcactggccatcagagaaatgcaaatcaaaaccacaatgagatactatctcataccagttagaatggcaatcattaaaaagtcaggaaacaacagacgcacagcaactttaagtttgctgccagctatacgtcatgaaagggaagcttttcatcaaagggaagaagaaaaggaagggggaagaatcctacttttacaaaacagagtaattctttgctcctgctccctttgcccacatctctcacctgcgtccaaaccaaaacaca

SEQ ID NO: 124222 - DNA, 2107 bp, Homo sapiens
atgaaggcagaaataaaaatgttctttgaaaccaacgagaacaaagacacaacataccagaatctctgggacgcattcaaagcagtgtgtagagggaaatttatagcactaaatgcccacaagagaaagcaggaaagatccaaaattgacaacctaacatcacaattaaaagaactagaaaagcaagagcaaacacattcaaaagctagcagaaggcaagaaataactaaaatcagagcagaactgaaggaaatagagacacaaaaaacccttcaaaaaatcaatgaatccaggagctggttttttgaaaggatcaacaaaattgatagaccgctagcaagactaataaagaaaaaaagagagaagaatcaaatagacacaataaaaaatgataaatgggatatcaccaccgatcccacagaaatacaaactaccatcagagaatactacaaacacctctacgcaaataaactagaaaatctagaagaaatggataaattcctcgacacatacactctcccaagactaaaccaggaagaagttgaatctctgaatagaccaataacaggatctgaaattgtggcaataatcaatagcttaccaaccaaaaagagtccaggaccagatggattcacagccgaattctaccagaggtacaaggaggaactggtaccattccttctgaaactattccaatcaataggaaaagagggaatcctccctaactcattttatgaggccagcatcattctgataccaaagccaggcagagacacaaccaaaaaagcaaattttagaccaatatccttgatgaacattgatgcaaaaatcctcaataaaatactggcaaaacgaatccagcagcacatcaaaaagcttatccaccatgatcaacatataaacaaagccaaagacaaaaaccacatgattatctcaatagatgcagaaaaagcctttgacaaaattcaacaacccttcatgctaaaaactctcaataaattaggtattgatgggacgtatttcaaaataataagagctatctatgacaaacccacagccaatatcatactgaatgggcaaaaactggaagcattccctttgaaaactggcacaagacagggatgccctctctcaccactcctattcaacatagtgttggaagttctggccagggcaattaggcaggagaaggaaataaagggtattcaattaggaaaagaggaagtcaaattgtccctgtttgcagatgacatgattgtatatctagaaaaccccattgtctcagcccaaaatctccttaagctgataagcaacttcagcaaagtctcaggatacaaaatcaatgtacaaaaatcacaagcattcttatacaccaacaacagacaaacagagagccaaatcatgagtgaactcccattcacaattgcttcaaagagaataaaatacctaggaatccaacttacaagggatgtgaaggacctcttcaagggagaactacaaaccactgctcaaggaaataaaagaggatacaaacaaatggaagaacattccatgctcatgggtaggaagaatcaatatcgtgaaaatggccatactgcccaagggattttgccgatttcggaaccaccatcaaacaggattttcgcctgctggggcaaaccagcgtggaccgcttgctgcaactctctcagggccaggcggtgaagggcaatcagctgttgcccgtctcactggtgaaaagaaaaaccaccctggcgcccaatacgcaaaccgcctctccccgcgcgttggccgattcattaatgcagctggcacgacaggtttcccgactggaaagcgggcagtgagcgcaacgcaattaatggattttgccgatttcggaaccaccatcaaacaggattttcgcctgctggggcaaaccagcgtggaccgcttgctgcaactctctcagggccaggcggtgaagggcaatcagctgttgcccgtctcactggtgaaaagaaaaaccaccctggcgcccaatacgcaaaccgcctctccccgcgcgttggccgattcattaatgcagctggcacgacaggtttcccgactggaaagcgggcagtga

SEQ ID NO: 124223 - DNA, 1692 bp, Homo sapiens
atggtgaggaaatacagggaagtctggtggcacctgagaggacaagggcatagctcaacaaaaggcagcagaaacttctgcagacttaaacatccctgtctgacagctttgaagagagtagtggttctgccagcatggagtctgagatctgagaatggacagactgcctcctcaagtgggtccctgacccccgagaagcctaactgggaggcaccgcccagtaggggccaactgacaactcatacagctgggtgcccctctgagatgaagctttcagagaaacgatcaggcagcaacatttgctgttctgcagtatctgcagttctacagcctctcctggtgatacccaggcaaacagggtctggagtggacctccagcaaactccaacagacctgcagctgagggtcctgactgttagaaggaaaactaacaaacagaaaggacatccacaccaaaacctcatctgtacatcaccatcatcaaacaccaaagagatacaaactaccatcagagaatactataaacaactctatgcaaataaactagaaaatctagaagaaatggataaattcctggacacatacaccctcccaagacttaaccaggaagaagttgaatccgtgaatagaccaataacaggctctgaaattgaggcaataattaaaagcctaccaaccaaaaaaagtccagcaccagacggattcacagccgaattctaccagaggtacaaggaggagctgctgataagcaacttcagcaaagtctcaggatacaaaatcaatgtgcaaaaatcacaagcattcctatacaccaataacagacaaacagagagccaaatcatgagtgaactcccattcacaattgcttcaaagagaataaaatacctaggaatccaacttacaagggatgtgaaggacctcttcaaggagaactacaaatcactgctcaacgaaataaaagaggatgcaaacaaatggaagaacattccatgctcatggataggaagaatcaatatcgtgaaaatggccatactgcccaagaattggaaaaaactacttttatggttcatttggaaccataaaagagcctgtattgccaagacaatcctaagccaaaagaacaaagctggaggcatcacactacctgacttcaaactatactacaaggctacagtaaccaaaacagcatggtactggtaccaaaacatagatatagaccaatggaacagaacagagccctcaaaaataataccacgcatctacaacaatctgatctttgacaaacctgacaaaaacaagaaatggggaaagtactccctatttaataaatggtgcttggaaaactggctagccatatgtagaaagctgaaactggatcccttccttacatcttatacaaaaattaattcaagatggattaaagacttaaatgtcagacctaaaaccataaaaaccctagagggaaacctaggcaataccattcaggacataggcatgggcaaggacttcatgtctaaaacaccaaaagcaatggcaacaaaagccaaaattgacaaatgggatctaaataatctaaagagcttctgcacagcgaaagaaactaccatcagagtgaacatgcaacctacagaatgggagaaaatttttgcaatctacccatctgacaaagggctaatatccacaatctactaa

SEQ ID NO: 124224 - DNA, 2049 bp, Homo sapiens
atggggagaaaccagagcagaaaagctgaaaattctaaaaaccagagtgcctcttctcctccaaaggattgcagctcttcgccagcaatggaacaaagctggacagagaatgactttgatgagttgacagaagtaggcttcagaaggtcagtaataacaaacttctctgagctaaaggagcatgttgaaaccaatctcaaggaagctaaacacctagaaaaaaggttagacaaatggttaactagaataaagagtgtagagaagatattaaatgacctgatggagctgaaaaccatggcacaagaacttcatgacacatgcagaagcttcaatagccaatttaatcaagtggaagaaagggtatcagtgattgaagatcaaattaatgaaatgaatattgatggaacatacctcaaaatcataagagctatttatgataaagcctccaagaaatatcatactgaatcagcaaaaactggaagcattccctttgaaaactggcacaagacagggatgccctctctcaccactcctattcaacatagtgttggaagttctggccagggcaattaggcaggagaaggaaataaagggtattcaattaggaaaagaggaagtcaaattgtccctgtttgcagacgacatgattgtatatctagaaaaccccattgtctcagcccaaaatctccttaagctgataagcaacttcagcaaagtctcaggatacaaaatcaatgtacaaaaatcacaagcattcttatataccaacaacagacaaacagagagccaaatcatgagtgaactcccattcacaattgcttcaaagagaataaaatacctaggaatccaacttacaagggatgtgaaggacctcttcaaggagaactacaaaccactgctcaaggaaataaaagaggatacaaacaaatggaagaatattccatgctcatgggtaggaagaatcaatatcgtgaaaatggccatactgcccaaggtaatttacagattcaatgccatccccatcaaactaccaatgactttcttcacagaattggaaaaaactactttaaagttcatatggaaccaaaaaagagcccgcattgccaagtcaatcctaagccaaaagaacaaatctggaggaatcacactacctgacttcaaactatactacaaggctacagtaaccaaaacagcatgctctccacactccattgtcctgcctgccaccatgatggaacagaacagagccctcagaaataataccacacatcatggccgtggctcagatccagcaggtcaagctgctgctgctgcaggggcaacatgccagtagcagattgcagcccacaagcagcacgaagtgtggtggatggactgcgtcctctgcatctccaaggagcatggggctgtcttcctggaagggcaaccttgccagtgccatccattacttcccatgcaagcccttaactttgccttcaaggataagtacaagcagttcttcctgggggtgcagacaagcgcatgcagttctggaggtgcttcgctggccacccggccttgggtggcctggctggcaccacctcactctgcttcatgtaccccctgtgaggatcaccaaatccaatggacccagggcctgtaccagggcttcagcatctcatgcaagacatcatcaatacaaccaagaaccctcactgagtccacttcactccccgctgcctccaccagagcaggtgctggtatccacagctgagagaactgaagacagatcgtatcacaggactctttgcagacactccccatatttcaagaatgaagctgcagaccttaggggtgagggttacagctcttaaagatttgggtcacggacccaaatagtgagccgtagcaaggtttattgtgagggatcccaggaacagcagcaccgattttcctccctctgcggaccaccaggctcccctggcccctcaacattttaacagatctttgtatattcagtttaaaaaaaaaatggggccaggcgcagtggctcacgcctgtaatcgtagc

SEQ ID NO: 124225 - DNA, 2277 bp, Homo sapiens; identical to SEQ ID NO: 119544

SEQ ID NO: 124226 - DNA, 3831 bp, Homo sapiens
atgggagactttaacaccccactgtcaacattagacagagcaacgagacagaaagtcaacaaggatacccaggaattgaactcagctctgcaccaagcagacttaatagacatctacagaactctccaccccaaatcaacagaatatacatttttttcagcaccacaccacacctattccaaaattgaccacatacttggaagtaaagctctcctcagcaaatgtaaaagaacagaaattataacaaactatctctcagaccacagtgcaatcaaactagaactcaggattaagaatctcactcaaaaccgctcaattacatggaaactgagcaacctgctcctgaatgactactgggtacataacgaaatgaaggcagacataaagatgttctttgaaaccaatgagaacaaagacacaacataccagaacctctgggacacattcaaagcagtgtgtagagggaaatttttagcactaaatgcccacaagaaaaagcaggaaagatccaaaattgacaccctaacatcacaattaaaagaactagaaaagcaagagcaaacacattcaaaagctagcagaaggcaagaaataactaaaatcggagcagaactgaaggaaatagagacacaaaaaacccttcaaaaaattaacgaatccaggagctggttttttgaaaggatcaacaaaattgataaaccgctagcaagactaataaagaaaaaaagagagaagaatcaaatagacgcaataaaaaatgataaaggggatatcaccaccgatcccacagaaatacaaactaccatcagagaatacaacaaacacctctatgcaaataaactagaaaatctagaagaaatggataaattcctcgacacatactctctcccaagactaaaccaggaagaagttgaatctctgaatagaccaataacaggagctgaaattgtggcaataatcaatagcttaccaactaaaaagagtccaggaccagatggattcacagccaaattctaccagaggtacaaggaggaatgtaaaatactggcaaaccaaatccagcagcacatcaaaaagcttacccaccaggatcaagtggacttcatccctgggatgcaaggctggttcaatatacgcaaatcaataaatgtaatccagcatataaacagaagcaaagacaaaaaccacatgattatctcaatagatgcagaaaaggcctttgacaaaattcaacaacccttcatgctaaaaactctcaataaattacgtattgatgggacgtatctcaaaataataagagctatctatgacaaacccacagccaatatcatactgaatgggcaaaaactggaagcattccctttgaaaactggcacaagacagggatgctctctctcaccactcctattcaacatagtgttggaagttctggccagggcaattaggcaggagaaggaaataaagggtattcaattaggaaaagaggaagtcaaattgtccctgtttgcagacaacattattgtatatctagaaaaccccattgtctcagcccaaaatctccttaagctgataagcaacttcagcaaagtctcaggatacaaaatcaatgtacaaaaatcacaagcattcttatacaccaacaacagacaaacagagagccaaatcatgagtgaactcccattcacaattgcttcaaagagaataaaatacctaggaatccaacttacaagggatgtgaaggacctcttcaaggagaactacaaaccactgctcaaggaaataaaagaggatacaaacaaatggaagaacatcccatgctcatgggtaggaagaatcaatatcgtgaaaatggccatactgcccaagataatttacagattcaatgccatccccatcaaactaccaatgactttcttcacagaattggaaaaaactactttaaagttcatatggaaccaaaaaagagcccgcattgccaaggcaatcctaagccaaaagaacaaagctggaggcatcacgctacttgacttcaaactatactacaaggctacagtaaccaaaacagcatggtactggtaccaaaacagagatatagatcaatggaacagaacagagccctcagaaataacgctgcatatctacaactttctgatctttgacaaacctgagaaaaacgagcaatggggaaaggattccctatttaataaatggtgctgggaaaactggctagccatatgtagaaagctgaaactggatcccttccttacaccttatacaaaaatcaattcaagatggattaaagacttaaacgttagacctaaaaccataaaaaccctagaagaaaacctaggcattaccattcaggacataggcatgggcaaggacttcatgtctaaaacaccaaaagcaatggcaacaaaagccaaaattgacaaatgggatctaattaaactaaagaacttctgcacagcaaaagaaactaccatcagagtgaacaggcaacctacaaaatgggagaaaattttcacaacctactcatctgacaaagggctaatatccagaatctacaatgaactccaacaaatttacaagaaaaaaacaaacaaccccatcaaaaagtgggcaaaggacatgaacagacacttctcaaaagaagacatttatggagccaaaaaacacatgaaaaaatgctcaccatcactggccatcagagaaatgcaaatcaaaaccacaatgagataccatgtcacaccagttagaatggcaaccattaaaaagtcaggaaacaacaggaccaaactgaatgattccccaagactagaaaagcaacttctggggaaaccatctgaggcagctgttgggtatcccagcccttctagttccccttatctggggccacttccaaccacaccaccagctcttctacctccaccatctccaaaatttcccactccccgaccttcactcttacccctacaggaaatgcacaatggaggtgatgtcactagggaaccaggaggagaaccaggagaaagaaaggaagaaaagggaaggacagaggctctaatagctgctttgaagcctggcaaagtccaggatccccaaggtgcatccactagttgctatcagtgtggcaagtcagggcactttaagaaggagtgtccaggcacaagtgctcaactaactgaactgacagctcttacacttgagttaagcaagggaaaggtaagaaacgccccttcaaagttagatctaagcccttttgagatgctgtatggatggccttttctcaccaatgatttcttattagaccaagagacctctgaattgggcaagcatgtaaactctctggctcgttttcaacaggaattaactcaagtagcagaagcccaaccccaagaagtaggaccacctttatttaacccaggatatttggtattgcccaagcagggagggccttacaccattctcctttcaatgccctcagcagtaaaagttacaggtattgattcctggatacatcatgctcaagttaaagcctggaaaactgagagagcaatccccggcagcccagcggaatgtcttggataccaatgtgaggaaataagagacctgaagctgaaaatcaaaagagataagaaaatgagcaagggctactcatcctactcagttccagtcatccattcagtcatccagtcatccagtctttgtacaactgagcaggtgctggtatccatggctgcaagacctgaagatggatcacatcatgggactccttgcagacaccctcaagtactagcccagagcctggtagcttcactgggtagctag

SEQ ID NO: 124227 - DNA, 3131 bp, Homo sapiens
gggtcaacagacacctcatacaggagagctccagctggcatctggagggtgtccctctgggacgaagcttccagaggaaggagcaagcagcaatctttgctgttctgcagcctccactggtgataccctggcaaacaggatctggagtggacctcctgcaaactccaccagacctgcagaagagggtcctgactgttagaaggaaaactaacaatcagaaagcaatagcatcaacatcaacaaaaaggacgcccacgcaaaaaccccatccgaaggtcaccaacatcaaagatcaaagaactaatgacaaaaaccagatgattatctcaatagatgcagaaaagcccttcaataaaattcaacttcccttcatgctaaaaactctcaataaattaggtattgatgggacatatttcaaaataataagagctatctatgacaaacccacagccaatatcatactgaatgggcaaaaactggaagcattccctttgaaaactggcacaagacagggatgccctctctcaccgctcctattcaacatagtgttggaagttctggccagggcaatcaggcaggagaaggaaataaaaggtattcaattaggaaaagaggaagtcaaattgtccctgtttgcagacgacatgactgtttatctagaaaaccccatcgtctcagcccaaaatctccttaagctgataagcaacttcagcaaagtctcaggatacaaaatcaatgtaaaaaaatcacaagcattcttatacaccagcaacagacaaacagagagccaaatcatgagtgaactcccattcacaattgcttcaaagagaataaaatacctaggaatccaacttacaagggatgtgaaggacctcttcaaggagaactacaaaccactactcaaggaaataaaagaggatacaaacaaatggaagaacattccatgctcatgggtaggaagaatcaatatcgtgaaaatggccatactgcccaaggtaatttacagattcaatgccatccccatcaagctaccaatgactttcttcacagaattggaaaaaactactttaaagttcatatggaaccaaaaaagagcctgcatcgccaagtcaaccctaagccaaaagaacaaagctggaggcatcacactacctgacttcaaactatactacaaggctacagtaaccaaaacagcatggtactggtaccaaaacagagatatagatcaatggaacagaacagagccctcagaaataacgccgcatacctacaactatctgatctttgacaaacctgagaaaaacaagcagtggggaaaggattccctatttaataaatggtgctgggaaaactggctagccatatgtagaaagctgaaactggatcccttccttacaccttatacaaaaatcaattcaagatggattaaagatttaaacgttagacctaaaaccataaaaaccctagaagaaaacctaggcattaccattcaggacataggcatgggcaaggacttcatgtccaaaacaccaaaagcaatggcaacaaaagacaaaattgacaaatgggatctaattaaactcaagagcttctgcacagcaaaagaaactactatcagagcgaacaggcaacctacaacatgggagaaaattttcgcaacctactcatctgacaaagggctaatatccagaatctacaatgaactcaaacaaatttacaagaaaaaaacaaacaaccccatcaaaaagtgggcgaaggacatgaacagacacttctcaaaagaagacatttatgcagccaaaaaacacatgaaaaaatgctcatcatcactggccatcagagaaatgcaaatcaaaaccactatgagatatcatctcacaccagttagaatggcaatcattaaaaagtcaggaaacaacaggtgctggagaggatgtggagaaataggaacacttttacactgttggtgggactgtaaactagttcaaccattgtggaagtcagtgtggcgattcctcagggatctagaactagaaataccatttgacccagccatcccattactgggtatatacccaaatgactataaatcatgctgctataaagacacatgcacacgaaaaatacgaacaaatgggagaaattgtgccagcaaaaaaggaaacatcaacaaagaagctagaagcctatttaaccactggcccctgcaaaggccaaggcgagtgtatagcctgcacgttctctgtggagacaccgcgttcaggcacggtttgagacctgcccaccatcatccatcattggactgcctgtcctcaacccaccatggagaacaagcttttctaagggaaggacatctgcaggataaaatgggaaaagaggaagagcatcactcttgtctggtgagtccagcgtggttcatcattgcatctggacttcagccagcagcaagtgggaacagatgtccaacagagggacgaagagtcaaaattctctgcattataagaggaattcaggagaagcaccttccaggagggaaggctctagcaacaccagaggaagctgcagctgggaaggaggcagccagggaacagttcttgtctgggcaacaaagtgagatcctgtctcaaaaaaaggaagaggaggagaagaagaagaagaagaagaagaagaagaagaagaaggaggaggaggaggaggaggaggaggaggaggaggaggaggaagagagaagaggaggaggaaaagaaagagtaaggaaagaaggaaggaaggaaagaatgaatgaaggcaggcaggcaggcagggagggaggggagaggaagagagaagaaagaaggagaagaaaagaagaagaagaaggaagaggaggaggaggaaggggagaggaggaggaaaaagaagaagacatgcttagagaactaaggaaggagctgcccttgggacctctccagctaggaaaggatggagggatgggatgtgctttaggggagctgtgctcgggacttctccacctgggcgaggacggaagggtgggatgcgctttagggggccactccatagaacaccatgcagatggtgcccccccgcacgacccccagcatcagagttgtgcactgatggcctgcagatga

SEQ ID NO: 124228 - DNA, 963 bp, Homo sapiens
atggacagtatgtctggagggggacagtataggaagattaatgggaatccaacatcagtgaagtgccctttgctgctgctgccagccattctgactccagagccggtgaataggtggagacaaagctgcaaagcatttgcacggcattctccgcttgctttcagagtgacaatttcaacaagcaccttttttgacggcttgctggtgacaggactatacacatctacaagtgttcaggcatcacagagcattggaggttccagtgctttcggatttgtgttggaagttctggccagggcaattaggcaggagaaggaaataaagggtattcaattaggaaaagaggaaatcaaattgtccctgtttgcaggcgacatgattgtatatctagaaaaccccattgtctcagcccaaaatctccttaagctgataagcaacttcagcaaagtctcaggatacaaaatcaatgtacaaaaatcacaagcattcttatacaccaacaacagacaaacagagagccaaatcatgagtgaactcccattcacaattgcttcaaagagaataaaatacctaggaatccaacttacaagggatgtgaaggacctcttcaaggagaactacaaaccactgctcaaggaaataaaagaggatacaaacaaatggaagaacattccatgctcatgggtaggaagaatcaatatcgtgaaaatggccatactgcccaaggtctctgagtctctcagaagagagggtagctcctctctgcagctggtcatcccacagtctgtctgtcctctgctctggctgagccccaggcttattatggacctcacaggggaggaagtgcatgccaatcagtccctgggcagccataggcaggcctggaagaggaaccacatgtccccacttaggtcctcaggactggcagctcagcccccagcctttaggccctacctggcctga

SEQ ID NO: 124229 - DNA, 2470 bp, Homo sapiens
atgagaacaaagacacaacataccagaatctctgggacgcattcaaagccagtgtgtagagggaaatttatagcactaaatgcccacaagagaaagcaggaaaaatccaaaattgacaccctaacatcacaattaaaagaactagaaaagcaagagcaaacacattcaaaagctagcagaaggcaagaaataactaaaatcagagcagaactgaaggaaatagacacacaaaaaacccttcaaaaaataaatgaatccaggagctggttttttgaaaggatcaacaaaattgatagaccactagcaagactaataaagaaaaaaagagagaagaatcaaacagacacaataaaaaattgtaaaggggatatcaccactgatcccacagaaatacaaactaccatcagagaatactacaaacacctctacgcaaataaactagaaaatctagaagaaatggataaattcctcaacacatacactctcccaagactaaaccaggaagaagttgaatctctgaatagaccaataacaggagctgaaattgtggcaataatcagtagtttaccaaccaaagagtccaggaccggatggattcacagccgaattctaccagaggtacaaggaggaactgaaaaagagggaatcctccctaactcattttatgaggccagcatcattctgataccaaagccgggcagagacgcaaccaaaaaagagaattttagaccaatatccttgatgaacattgatgcaaaaatcctcaataaaatactggcaaaacgaatccagcagcacatcaaaaagcttatccaccatgatcaagtgggcttcatccctgggatgcaaggcttggttcaatatacgcaaatcaataaaggtaatccagcatataaacagagccaaagacaaaaaccacatgattatctcaatagatgcagaaaaagcctttgacaaaattcaacaacccttcatgctaaaaactctcaataaattaggtattgatgggacgtatttcaaaataataagagctatctatgacaaacccacagccaatatcatactgaatgggcaaaaactggaagcattccctttgaaaactggcacaagacagggatgccctctctcaccgctcctattcaacatagtgttggaagttctggccagggcaatcaggcaggagaaggaaataaaaggtattcaattaggaaaagaggaagtcaaattgtccctgtttgcagacgacatgattgtttatctagaaaaccccattgtctcagcccaaaatctccttaagctgatacgcaacttcagcaaagtctcaggatacaaaatcaatgtacaaaaatcacaagcattcttatacaccaacaacagacaaacagagagccaaatcatgagtgaactcccattcacaattgcttcaaagagaataaaatacctaggaatccaacttacaagggatgtgaaggacctcttaaaggagaactacaaaccaactgctcaaggaaataaaagaggacacaaacaaatggaagaacattccatgctcatgggtaggaagaatcaatatcgtgaaaatggccatactgcccaagaattggaaaaaaactactttaaagttcatatggaaccaaaaaagagcccacatcaccaagtcaatcctaagccaaaagaacaaagctggaggcatcacactacctgacttcaaactatactacaaggctacagtaaccaaaacagcatggtactggtaccaaaacagagatatagatcaatggaacagaacagagccctcagaaataatgctgcatacctacaactatctgatctttgacaaacctgagaaaaacaagcaatggggaaaggattccctatttaataaatggtgctgggaaaactggctagccatatgtagaaagctgaaactggatcccttccttacaccttatacaaaaatcaattcaaaatggattaaagacttaaacgttagacctaaaaccataaaaaccctagaagaaaacctaggcattaccattcaggacataggcatgggcaaggacttcatgtccaaaacaccaaaagcaatggcaacaaaagccaaaattgacaaatgggatctaattaaactaaagagcttctgcacggcaaaagaagctaccatcagagtgaacaggcaacctacaaaatgggagaaaattttcgcaacctactcatctgacaaagggctaatatccagaatctacaatgaactcaaacaaatttacaagaaaaaaacaaacaaccccatcaaaaagtgggtgaaggacatgaacagacactttgcaaaagaagacatttatgcagccaaaaaacacatgaaaaaatgctcaccatcactggccatcagagaaatgcaaatcaaaaccactatgagatatcatctcacaccagttagaatggcgatcattaaaaagtcaggaaacaacag

SEQ ID NO: 124230 - DNA, 3495 bp, Homo sapiens
atgaaagaagaagatggcttgctaggagcagctagtgtgtgggctctcatggagaagaacggaaggggtgaggaaatacagcaacctcaactaaaatatccaggtacaggcattggaactaatcaaggaaacaagttcacccaaggagaaggaagaaaagcaaggcaggatgatggcccaccgggagcagcgtggagccagggcaacctcccctacctagggaagtggggctgcaagtcagattctgttgccagtagacttgcagcaacattccgccaagggagacactcatgcaagattacaagcaaggagaaagaagctaccccatttttggcagtgatggcgtctccagcagagtcactcgtggtggccatggagctgcaagtgaaagtgatagatgccactattatgggacaccccagagtggctgagaccatgtggcagcacttaagtaccagggacactgggtcagttactgaaatgacagaagaaagggtgcagatatggagaacagagaagggttacaatgaaaggagagaagaaatcctggagtggtgggaatttgtaggaagggaaagtgttggagaaaggaatcgctctctgcatcatgctgtcactgctggatatggggaaggggtggcattggtgattcagtactgcttttcctacctcttcgatacctctttcagtgatgcaaagttaaaaccagatactatgagtgctcacctgtgttttgattctcatgaacgtacttctttggagaatatcttcttccaattagaaaaaaacaaacagattcttaaggttaagtcacgtagcttcttgcctggtgcccacatgagagcttctacggactcattgttggaagttctggccagggcaatttggccggagaaggaaataaagggtattcaattaggaaaaaaggaagtcatattgtccctgtttgcagatgacatgattgtatatctagaaaaccccattgtctcagcccaaaatctccttaagctgataagcaacttcagcaaagtctcaggatacaaaatcaatgtacaaaaatcacaagcattcttatacaccaataacagacaaacagagagccaaatcatgagtgaactcccattcacaattgtttcaaagagaataaaatacctaggaatccaacttacaagggacgtgaaggacctcttcaaggagaactacaaaccactgctcaaggaaataaaagaggatacaaacaaatggaagaacattccatgctcatgggtaggaagaatcaatatcgtgaaaatggccatactgcccaaggtaatgtatagattcaatgccatccccatcaagctaccaatgcctttcttcacagaattggaaaaaactactttaaagttcatatggaaccaaaaaagagcccgcatcgccaagtcaatcctaagccaaaagaacaaagctggaggcatcacgctacctgacttcaaactatactgcaaggctacagtaaccaaaacagcatggtactggtaccaaaacagagatatagatcaatgcaacagaacagagccctcagaaatgaggccgcatatctacaactatctgatctttgacaaacctgacaaaaacaagcaatggggaaaggattccctatttaataaatggtgctgggaaaactggctagccatatgtagaaagctgaaactggatcccttccttacaccttatacaaaaattaattcaagatggattaaagacttaaacgttagacctaaaaccataaaaaccctaggagaaaacctaggcattaccattcaggacataggcatgggcaaggacttcctgtctaaaacaccaaaagcaatggcaacagaagccaaaattgacaaatgggatctaattaaactaaagagcttctgcacaccaaaagaaactaccatcagagtgaacaggcaacctacacaatgggagaaaatttttgcaacctactcatctgacaaagggctaatatccagaatctacaatgcactcagacaaatttacaagaaaaaaacaaacaaccccatcaaaaaggacatggatgaaaccggaaaccaccattctcagcatactatcgcaaggacaaaaaaccaaacaccgcatgttctcactcatagtgaggaaactgtggctcaggaagatgatgtgcctttgacaaggtcatggttgctgaaagcactcaagccccaagaggttcagagcagagccaagtcccctgatggccagtacaaagaggaggagaaagagaaggacagcagagggtgctctctgctggatttccccagcatgccagcttcccactgtgcagataaagcaaaatctgataggagcggggaggaagtgggctcaggctccaggagtacaagttggtatgcaagcaagtcattccaaacgccgcctccacacaaaccctctgagctgcaaattattaacctgcttaactctattgcagaaacaagcgctgctggggtgttggaagttctggccagggcaattaggcaggagaaggaaataaagggtattcaattaggaaaagaggaattcaaattgtccctgtttgcagatgacatgattgtatatctagaaaaccccattgtctcagcccaaaatctccttaagctgataagcaacttcagcaaagtctcaggatacaaaatcaatgtacaaaaatcacaagcattcttatacaccaataacagacaaacagagagccaaatcatgagtgaactcccattcacaattgcttcaaagagaataaaatacctaggaatccaacttacaagggatctgaaggacctcttcaaggagaactacaaaccactgctcaatgaaataaaagaggatacaaacaaatggaagaacattccatgctcatgggtaggaagaatcaatatcgtgaaaatggccatactgcccaagagggacgtgactgcaaattgtccaggttcttggcgttttgaacaaagaattggacaaaacacgcagcaaagaaagaatgaagcaacaaaagaacgaaagcagctctctcggctttcggctcggaggaggccaaggtgcaactttcttcggtcgtctcgaatccgggttcatccgacaccagccgcctccaccatgccgccgaagttccaccccaatgagatcaaagtcgtatacttcacgtgcactggagttgaagtcggtgccacttctgctctggcccccaagattggccccgcgggtctgtctccaaaagaggttggtgatgacattgccaaggtaacgggtgactggaagggcctgaggattacagtgaaactgaccattcagaacagacaggcccagattgaagtggtaccttctgcctccgccctgatcatcaaaaggaactaccaagagacagaaagaaacagaaaaacattaaacacagggggaatatcactttttatgagatcgtcaacattgctcgacagatgcagcactgatccttag

SEQ ID NO: 124231 - DNA, 3907 bp, Homo sapiens
atggctgcctggaacctgctacttaaatcatatgcatattggggaggtctaaggaaggaagatttccactgtttagaccggaagaccctgaggacagtatcctttctggctgccctgctgtcatatgagtccatagggggcaaaggaaaactaacaaccagaaaggacatctacaccgaaaacccatctgtacatcaccatcatcaaagaccaaaagtagataaaaccacaaagatggggaaaaaacagaacagaaaaactggaaactctaaaatgcagagcgcctctcctcctccaaaggaacgcagttcctcaccagcaacagaacaaagctggatggagaatgattttgaagagctgagagaagaaggcttcagacgatcaaattactctgagctacgggaggacattcaaaccaaaggcaaagaagttgaaaactttgaaaaaaatttagaagaatgtataactagaataaccaatacagagaagtgcttaaaggagctgatggagctgaaaaccaaggctcgagaactacgtgaagaatgcagaagcctcaggagccgatgcgatcaactggaagaaagggtatcagcaatggaagatgaaatgaatgaaatgaagcgagaagggaagtttagagacaaaagaataaaaagaaatgagcaaagcctccaagaaatatgggactatgtgaaaagaccaaatctacgtctgattggtgtacctgaaagtgatgtggagaatggaaccaagttggaaaacactctgcaggatattatccaggagaacttccccagtctagcaaggcaggccaacgttcagattcaggaaatacagagaacgccacaaagatactcctcgagaagagcaactccaagacacataattgtcagattcaccaaagttgaaatgaaggaaaaaatgttaagggcagccagagagaaaggtcgggttaccctcaaaggaaagcccatcagactaacagcggatctctcggcagaaaccctacaagccagaagagagtgggggccaatattcaacattcttaaagaaaagaattttcaacccagaatttcatatccagccaaactaagcttcataagtgaaggagaaataaaatactttatagacaagcaaatgctgagagattttgtcaccaccaggcctgccctaaaagagctcctgaaggaagcgctaaacatggaaaggaacaaccggagaaagcaggaaagatccaaaattgacaccctaacatcacaattaaaagaactagaaaagcaagagcaaacacattcaaaagctagcagaaggcaagaaataactaaaatcagagcagaactgaaggaaatagagacacaaaaaacccttcaaaaaatcaatgaatccaggagctggttttttgaaaggatcaacaaaattgatagaccgctagcaagactaataaagaaaaaaagagagaagaatcaaatagacacaataaaaaatgataaaggggatatcaccactgatcccacagaaatacaaactaccatcagagaatactacaaacacctctacgcaaataaactagaaaatctagaagaaatggatacattcctcgacacatacactctcccaagactaaaccaggaagaagttgaatctctgaatagaccaataacaggctctgaaattgtggcaataatcaatagtttaccaaccaaaaagagtccaggaccagatggattcacagccgaattctaccagaggtacaaggaggaactggtaccattccttctgaaactattccaatcaatagaaaaagagggaatcctccctaactcattttatgaggccagcatcattctgataccaaagccgggcagagacacaaccaaaaaagagaattttagaccaatatccttgatgaacattgatgcaaaaatcctcaataaaatactggcaaaccgaatccagcagcacatcaaaaagcttatccaccatgatcaagtgggcttcatccctgggatgcaaggctggttcaatatacgcaaatcaataaatgtaatccagcatataaacagagccaaagacaaaaaccacatgattatctcaatagatgcagaaaaagcctttgacaaaattcaacaacccttcatgctaaaaactctcaataaattaggtattgatgggaagtatttcaaaataataagagctatctatgacaaacccacagccaatatcatactgaatgggcaaaaactggaagcattccctttgaaaactggcacaagacagggatgccctctctcaccgctcctattcaacatagtgttggaagttctggccagggcaatcaagcaggagaaggaaataaagggtattcagttaggaaaagaggaagtcaaattgtccgtgtttgcagacgacatgattgtttatctagaaaaccccatcgtctcagcccaaaatctccttaagctgataagcaacttcagcaaagtctcaggatacaaaatcaatgtacaaaaatcacaagcattcttatacaccaacaaccgacaaacagagagccaaatcatgagtgaactcccattcacaattgcttcaaagagaataaaatacctaggaatccaacttacaagggatgtgaaggacctcttcaaggagaactacaaaccactgctcaaggaaataaaagaggacacaaacaaatggaagaacattccatgctcatgggtaggaagaatcaatatcgtgaaaatggccatactgcccaaggtaatttacagattcaatgccatccccatcaagctaccaatgactttcttcacagaattggaaaaaactactttaaagttcatatggaaccaaaaaagagcccgcatcgccaagtcaatcctaagccaaaagaacaaagctggaggcatcacactacctgacttcaaactatactacaaggctacagtaaccaaaacagcatcggtactggtaccaaaacagagatatagatcaatggaacagaacagagccctcagaaataatgccgcatatctacactattctgatcctttggacaaacctgagaaaaacaagcatgggggaaaggcatccctaatttataaaatggctgctggggaaaactggctagcccatatgtaggaagctgaaactggatcccttccttacaccttatacaaaaatcaattcaagatggattaaagatttaaacgttagacctaaaaccataaaaaccctagaagaaaacctaggcattaccattcaggacataggcgtgggcaaggacttcatgtccaaaacaccaaaagcaatggcaacaaaagccaaaattgacaaatgggatctaattaaactaaagagcttctgcacagcaaaacaaactaccatcagagtgaacaggcaacctataacatgggagaaaattttcgcaacctactcatctgacaaagggctaatatccagaatctacaatgaactcaaacaaatttacaagaaaaaaacaaacaaccccatcaaaaagtgggcgaaggacatgaacagacacttctcaaaagaagacatttatgcagccaaaaaacacatgaagaaatgctcatcatcactggccatcagagaaatgcaaatcaaaaccactatgagatatcatctcacaccagttagaatggcaatcattaaaaagtcaggaaacaacagggacaacacaaaggaagcactgctgtgtaacaacttggtggctgaagtcttggaggccaaacaggctcagaagcttcaaggcaaagcagccgtcctcagcctctcaaaaatctatgcgatcacagagacaaatgctgagacacccaacaggaagatgaaaattaaactgaagagacccatgaccaaattgcacccaagcatccaaatgttggtg

SEQ ID NO: 124232 - DNA, 2763 bp, Homo sapiens
aaaagcaagagcaaacacattcaaaagctagcagaaggcaagaaataactaaaatcagagcagaactgaaggaaatagagacacaaaaaacccttcaaaaaattaatgaatccaggagctggttttttgaaaggatcaacaaaattgatagaccgctagcaagactaataaagaagaaaagagagaagaatcaaatagacgcaataaaaaatgataaaggggatatcactaccagtcccacagaaatacaaacaaccatcagagaatactacaaacacctctacgcaaataaactagaagatctagaagaactggataaattcctcgaaacatacaccctcccaagactaaaccaggaagaaggtgactctctgaatagaccaataacaggatctgaaattgtggcaataatcaatagcttgccaaccaaaaagagtccaggaccagatggattcacagccgaattctaccagaggtacaaggaggaactggtaccattccttctgaaacgattccaatcaatagaaaaagagggaatcctccctaactcattttatgaggccaacatcatcctgataccaaagtcggccagagacacaaccaaaaaagataattttaggccaatatccttgatgaaccttgatgcaaaaatcctcaataaaatactggcaaaacgaatccagcagcacatcaaaaagcttatccaccatgatcaagtgggcttcatccctgggatgcaaggctgtgttggaagttctggccagggcaattaggcaggagaaggaaataaagggtattcaattaggaaaagaggaagtcaaattgtccctgtttgcagatgacatgattgtatatctagaaaaccccattgtctcagcccaaaatctccttaagctgataagcaacttcagcaaagtctcaggatacaaaatcaatgtacagaaatcacaagcattcttatacaccaataacagacaaacagagagccaaatcatgagtgaactcccattcacaattgcttcaaagagaataaaatacctaggaatccaacttacaagggatgtgaaggacctcttcaaggagaactacaaaccactgctcaatgaaataaaagaggatacaaacaaatggaagaacattccatgctcatgggtaggaagaatcaatatcgtgaaaatggccatactgcccaaggtaatttatagattcaatgccatccccatcaagctaccaatgactttcttcacagaattggaaaaaactactttaaagttcatatggaaccaaaaaagatcctgcatcgccaagtcaatcctaagccaaaagaacaaagctggaggcatcacactacctgacttcaaactatactacaaggctacagtaaccaaaacagcatggtactggtaccaaaacggagatatagatcaatggaacagaacagagccctcagaaataacgccgcacatctacaactatctgatctttgacaaacctgagaaaaacaagcaatggggaaaggattccctatttaataaatggtgctgtgaaaactggctagccatatatagaaagctgaaactggatcccttctttacaccttatacaaaaatcaattcaagatggactaaagacttaaatgttagacctaaaaccataaaaaccctagaagaaaacctaggcattaccattcaggacataggcatgggcaaggacttcatgtctaaaacaccaaaagcaacggcagcaaaagcccaaattgacaaatgggatctaattaaactaaagagcttctgcacagcaaaagaaactaccatcagagtgaataggcaacctacaaaatgggaggaaattttcgcaacctactcatctgacaaagggctgatatccagaatctacaatgaactcaaacaaatttacaagaaaaaaacaaacaaccccatcaaaaagtgggcaaaggacatgaacagacacttctcaaaacaagacatttatgcagccaaaaaacacatgaaaaaatgctcatcatcactggccatcagagaaatgcaaatcaaaaccacaatgagataccatctcacaccagttagaatggcaatcattaaaaagtcaggaaacaacagccagacagtgaagccacagaacaaagctcattttgccaaaatggaccgccaatgtgtccacggcttgtctccccgtttagaacacagcccccgggggcgctcttccccacggtgcgcagaatgctgcctctactcttgcctgcatgctcagacttcaaacggggctgtgaaaataaatctaatgacagagagccaggaattagggaagagaaggaagctgatcagtaaagaggaagagcacacaccgaagctcctagtgctggtgatgaatccagaccccacgcagaaaccgctgagtgtgcaatgtgcctctgtttcctgctgcataagaagggatgatgatagtactgacttcatggatttgttgggagaatttaaggagatgaaacctgcgaggcacctaggacagcacctgacacttaggtttactccagtaatatgggcgcaccttacaactatggccttcgccattccaggggcctgcatcaggagccacactccagcacccacccccacagtacagacagcattgtctattcgagtgatagctgctcataacgacatctccacctcgctatttgtccaggaaggtgctttcagggaggcaaaagatctctcccatggccacgttaacacagtttag

SEQ ID NO: 124233 - DNA, 4546 bp, Homo sapiens
  misc_feature (1)...(4546): n = a,t,c or g
tgcaatcaaactagaactcaggattaagaatctcactcaaaaccgctcaactacatggaaactgaacaacctgctcctgaatgactactgggtacatagcgaaatgaaggcagaaataaagatgttctttgaaaccaacgagaacaaagacacaacataccagaatctctgggacacattcgaagcaaaaagcaagagcaaacaacattcaaaagctagcagaaggcaagaaataactaaaatcagagcagaactgaaggaaatagagatacaaaaaacccttcaaaaaattaatgaatccaggagctggttttttgaaaggatcaacaaaattgatagaccactagcaagactaataaagaaaaaaagagagaagaatctaatagacgcaataaaaactgataaaggggatatcaccaccaatcccacagaaatacaaactaccatcagagaatactacaaacacctctacgcaaataaactagaaaatcgagaagaaatggataaattcctcgacacatacactctcccaagactaaacgaggaagaagtcgaatctctgaatacaccaataacaggctcagaaattgtagcaataatcaatagcttaccaaccaaaaagagtccaggaccagatggattcacagccgaattgtaccagaggtacaaggaggaactggtaccattccttctgaaactattccaatcaatagaaaaagagggaatcctccctaactcattttatgaggccagcatcattctgataccaaagccaggcagagacacaaccaaaaaagagaattttagaccaatatcgttgatgaacattgatgcaaaaatcctcaataaaatactggcaaaaggaatccagcagcacatcaaaaagcttatccaccatgatcaagtgggcttcatccctgggatgcaaggccggttcaatatacgcaaatcaataaatgtaatccagcatataaacagaaccaaagacaaaaaccacatgattatctcaatagatgcagaaaaagcctttgacaaaattcaacaaccctttatgctaaaaactctcaataaattaggtattgatgggacgtatttcaaaataataagagctatctatgacaaacccacagccagtatcatactgaatgggcaaaaactagaagcattccgtttgaaaactggcacaagacagggatgccctctctcaccactcctattcaacatagtgtttgaaattctggcccgggcaattaggcaggagaaggaaataaagggtattcaattaggaaaagaggaagtcaaattgtccctgtttgcaggcgacatgattgtatatctagaaaaccccattgtctcagcccaaaatctccttaagctgataagcaacttcagcaaagtctcaggatacaaaatcaatgtgcaaaaatcacaagcattcttatacaccaataacagacaaacagagagccaaatcatgagtgaactcccattcacaattgcttcaaagagaataaaatacctaggaatccaacttacaagggatgtgaaggacctcttcaaggagaactacaaaccactgctcaaggaaataaaagaggatacaaacaaatggaagaacattccatgctcatgggtaggaagaatcaatatcgtgaaaatggccatactgcccaagctgataggcaactgcagcaaaatctcaggatacaaaatcaatgtgcaaaaatcacaagcattcttatacaccaataacagacaaacagagagccaaatcatgagtgaactcgcattcacaattgcttcaaagaaaatcaaatacctaggaatccaacttacaagggatgtgaaggacctcttcaaggagaactacaaaccactgctcaatgaaataaaagaggatacaaacaaatggaagaacattccatgctcatgggtaggaagaatcaatatcgtgaaaatggccatactgcccaaggttgttgtagctcctattgtttgtgatatatttatctattcgccttcatactggagttatgattgtgtgtccagagttggttccttccggtgggttcgtggtctcgctgacttcaagaatgaagccgcggaccctcacggagtgaagctgcagaccttcacggtgagtgttacagctcttaaggtagcgcgtctggagttgttcgttcctcccggtgggctcgtggtctcgctggcttcaggagtgaagctgcagatcttcacagtgagtgttacagctcataaaagcagtgtggacccaaagactgagcagaagcaagatttattgcaaagagcgaaggaacaaagcttccacagtgcggaaggggaccccactagatacaaaggttctccacgtccccaccagactcaggagcccagctggcttcacctagtggatcccgcaccagagctgcaggtggagctgcctgccagtcctggtgccgtgcgcctgcactcctcagcccttgggtggtcgatgggactgggcgccgtggagcagggggtggcggtcgtcgggaacctccggccgcacaggagcccatggagcgggtgggaggctcaggcttggcgggctgcaggtccccagccctgccccgcgggaaggcagctaaggcccgagacgttaaagcaaaatattatactgtccttaatccagtgtataggcgcctcgctggtgcccacaggaactgctgaattagagccaagcccttcattacagctcaggggcacaactgatgccgcacaagccattaaaaatgagtttgcgagagtacaaaaaagaaacctttgtagacgagggccaatttgtttcgaaggcgatgcactgagctggttttttgaaaagatcaacaaaattgatagacgtctagcaagacgaataaagaagaaaagagagaagaatcaaatagaagcaataaaaaatgataaaggggatatcaccaccgatcccacagaaatacaaactaccatcagagaatactataaacacctctatgcaaataaactagaaaatctggaagaaatggataaattcctcgacccatacactctcccaagaataagccaggaagaagttgaatctctgaatagaccaataacaggctctgaaattgaggcaataattaatagcttaccaaccaaaaaaagtccagcaccagacggattcacagccgaattctaccagaggtacaaggagaagctgatagtgttggaagttctggccagggcaatcaggcaggagaaagaaataaagggtattcaattaggaaaagaggaactcaaattgtccctgtttgcagatgacatgattgtatatctagaaaaccccatcgtctcagcccaaaatctcctcaagctgataagcaacttcagcaaagtctcaggatacaaaatcaatgtgcaaaaatcacaagcattcttatacagtaataacagacaaacagagagccaaatcatgagtgaactcccattcacaattgcttcaaagagaataaaatacctaggaatccaacttacaagggatgtgaaggacctcttcaaggagaactacaaaccactgctcaatgaagttaaagaggatacaaacaaatggaagaacattccatgctcatggataggaagaatcaatattgtgaaaatggccatactgcccaagaccgcaaagaatggtccggttctcccacctttacattcggaggaaaaaattccgtttaattctccattgattattccgttaaacaattacggcaaccaaagcctgacaaaagcgcaggtaaatgtgtcaaaatctgatgacacactcaaaatcaacggagtggaagatcacaaatctatttttgacggagacggaaaaacatatcagaccgttcagcagtttatcgatgaaggcaattatacatccggcgacaaccatacgntgagagaccctcactacgttgaagacaaaggccataaataccttgtattcgaagccaacacgggaacagaaaacggataccaaggcgaagaatctttatttaacaaagcgtactacggcggcggcacgaacttcttctgtaaagaaagccagaagcttcagcagagcgctaaaaaacgcgatgctgagttagcgaacggcgccctcggtatcatagagttaaataatgattacacattgaaaaaagtaatgaagccgctgatcacttcaaacacggtaactgatgaaatagagcgcgcgaatgttttcaaaatgaacggcaaatggtacttgttcactgattcacgcggttcaaaaatgacgatcgatgggattttgccgatttcggaccccaccatcaaacaggattttcgcctgctggggcaaaccagcgtggaccgcttgctgcaactctctcagggccaggcggtgaagggcaatcagctgttgcccgtctcactggtgaaaagaaaaaccaccctggcgcccaatacgcaaaccgcctctccccgcgcgttggccgattcattaatgcagctggcacgacaggtttcccgactggaaagcgggcagtga

SEQ ID NO: 124234 - DNA, 2762 bp, Homo sapiens
atggagaatgactttgacgagttgagagaagaaggcttcagacaatcaaattactctgagctacgggaggacattcaaaccaaaggcaaagaagttgaaaactttgaaaaaaatttagaagaatgtataactagaataaccaatacagagaagtgcttaaaggagctgatggagctgaaaaccaaggctcaagaactacgtgaagaatggagaagcctcaggagccgatgcgatcaactggaagaaagggtatcagcgatggaagatgaaatgaatgaaatgaagggagaagggaagtttagagaaaaaagaataaaaagaaatgagcaaagcctccaagaaatatgggattatgtgaaaagaccaaatctatgtctgattggtgtacctgaaagggatgggcagaatggaaccaagttggaaaacacgttgcaggatgttatccaggagaacttccccaatctagcaaggcaggccaacgttcagattcaggaaatacagagaacgccacaaagatactcctcgagaagagcaactccaagacacataattgtcagattcaccaaagttgaaatgaaggaaaaaatgttaagggcagccagagagaaagaaatacaaactaccatcagtgaatactacaaacacctctacacaaataaactagaaaatctagaagaaatggataaattccttgacacatacactctcccaacactaaaccaggaagaagttgaatctctgaatagaccaataacaggagctgaaattgtggcaataatcaatagcttaccaacgaaaaagagtccaggaccagatggattcacagccgaattctaccagaggtacaaggaggaactggtaccattccttctgaaactattccaatcaatagaaaaagagggaatcctccctaactcattttatgaggccagcatcattctgataccaaagtcaggcagagacacaacaaaaaaagagaattttagaccaatatccttgatgaacattgatgcaaaaatcctcaataaaatactggcaaaccgaatccagcagcacatcaaaaagcttatccaccatgatcaagtgggcttcattcctgggatgcaaggctggttcaatatacgcaaatcaataaatataatccagcatataaacagagccaaagacaaaaaccacatgattatctcaatagatgcagaaaaagcctttgacaaaattcaacaacccttcatgctaaaaactctcaataaattaggccaaaatctcctcaagctgataaacaacttcagcaaattctcaggatacaaaatcaatgtgcaaaaatcacaagcattctcatacaccaataacagacaaacagagagccaaatcatgagtgaactcccattcacaattgcttcaaagagaataaaatacctaggaatccaacttacaagggatgtgaaggacctcttcaaggagaactacaaaccactgctcaatgaaataaaagaggatacaaacaaatggaaaaacatcccatgctcatgggttggaagaatcaatatcgtgaaaatggccatactgcccaaggcaatttacagattcaatgccatccccatcaagctaccaatgactttcttcacagaattggaaaaaactactttaaagttcatatggaaccaaaaaagagcccgcatcgccaagtcaatcctaagccaaaagaacaaagctggaggcatcacactacctgacttcaaactatactacaaggctacagtaaccaaaacagcatggtactggtaccaaaacatgtgctatagatcaatggaacagaacagagccctcagttattatgtcgcatatctacaaccatctgatctttgacaaacctgagaaaaacaagcaatggggaaaggattccctatttaataaatggtgctgggaaaactggctagccatatgtagaaagctgaaactggatcccttccttacaccttatacaaaaatcaattcaagatggattaaagacttaaatgttggacctaacaccataaaaaccctagaagaaaacctaggcattaccattcaggacataggcacgggcaaggacttcatgtctaaaacaccaaaagcaatggcaacaaaagccaaaattgacaaacgggatctaattaaactaaacagcttctgcacagcaaaagaaactaccatcagagtgaacaggcaacctacaaaatgggagaaaattttcacaacctactcatctgacaaagggctaatatccagaatctacaatgaactcaaacaaatctacaagaaaaaaacaaacaaccccatcaaaaagtgggcgaaggacatgaacagacacttctcaaaagaacacatttatgcagccaaaaaacacatgaaaaaatgctcaccatcactggccatcagagaaatgcaaatcaaaaccacaatgagataccatctcacaccagttagaatggcaatcattaaaaagtcaggaaacaacaggtcctcaaacctggctgtccaaaaaggacgccgcaaagtcctgcagagcccccaaaagacacaagcgcggacagaaaagcatcccccgagagacagcgaagccacacaccctctccgggccagctaccagggcgggcaacttcacccctcgaagcaaacgaaagcccctgttctccaagcaaaggaaaaggggatggcaaacagaaataaacaggaaccgctctcagccttcatcttccgcgccctcccccagcaaactccag

SEQ ID NO: 124235 - DNA, 5757 bp, Homo sapiens
atggggaaaaaacagaacagaaaaactggaaactctaaaacgcagagtgcctctcctcctccaaaggaacgcagttcctcaccagcaacggaaaaaagctggatggagaatgactttgacgagctgagagaagaaggtttcagacgatcaaattactctgagctacgggaggacattcaaaccaaaggcaaagaagttgaaaactttgaaaaaaatttagaagaatgtataactagaataaccaatacagagaagtgcttaaaggagctgatggagctgaaaaccaaggctcgagaactacgtgaagaatgcagaagcctcaggagccgatgtgatcaactggaagaaagggtatcagcaatggaagatgaaatgaatgaaatgaagcgagaagggaagtttagagaaaaaagaataaaaagaaatgagcaaagcctccaagaaatatgggactatgtgaaaagaccaaatctacgtctgactggtgtacctgaaagtgacggggagaatggaaccaagttggaaaacactctgcaggatattatccaggagaacttccccaatctagcaaggcaggtcaatgttcagattcaggaaatacagagaacgccacaaagatactcctcgagaagagcaactccaagacacataattgtcagattcaccaaagttgaagtgaaggaaaaaatgttaagggcagccagagagaaaggtcgggttaccctcaaagggaagcccatcagactaacagcggatctctcggcagaaaccctacaagccagaagagagtgggggccaatattcaacattcttaaagaaaagaattttcaacccagaatttcatatccagccaaactaagcttcataagtgaaggagaaataaaacactttacagacaagcaaatgctgagagattttgtcaccaccaggcctgccctaaaagagctcctgaaggaagtgctaaacatggaaaggaacaaccagtaccagccgctgcaaaatcatgccaaaatacagatcaacgagacagaaagtcaacaaggatacccaggaattgaactcagctctgcaccaagcggacctaatagacatctacagaactctccacaccaaatcaacagaatatactttttttcagcaccacaccacacctattccaaaattgaccacatagttggaagtaaagctctcctcagcaaatgtaaaagaacagaaattataacaaactatctctcagaccacagtgcaatcaaactagaactcaggattaagaatctcaatcaaagccgctcaactacatggaaactgaacaacctgctcctgaatgactactgggtacataacgaaatgaaggcagaaataaagatgttctttgaaaccaacgagaacaaagacacaacataccagaatctctgggacgcattcaaagcagtgtgtagagggaaatttatagcactaaatgcccacaagagaaagcaggaaagatccaaaattgacaccctaacatcacaattaaaagaactagaaaagcaagagcaaacacattcaaaagctagcagaaggcaagaaataactaaaatcagagcagaactgaaggaaatagagacacaaaaaacccttcaaaaaatcaatgaatccaggagctggttttttgaaaggatcaacaaaattgatagaccgctagcaagactaataaagaaaaaaagagaggagaatcaaatagacacaataaaaaatgataaaggggatatcaccaccgatcccacagaaatacaaactaccatcagagaatactacaaacacctctatgcaaataaactagaaaatctagaagaaatggataaattccttgacacatacactctcccaagactaaaccaggaagaagttgaatctctgaatagaccaataacaggagctgaaattgtggcaataatcaatagtttaccaaccaaaaagagtccaggaccagatggattcacagctgaattctaccagaggtacaaggaggaactggtaccattccttctgaaactattccaatcaatagaaaaagagggaatcctccctaactcattttatgaggccagcatcattctgataccaaagccgggcagagacacaaccaaaaaagagaattttagaccaatatccttgatgaacattgatgcaaaaatcctcaataaaatactggcaaaccgaatccagcagcacatcaaaaagcttatccaccatgatcaagtgggcttcatccctgggatgcaaggctggttcaatatacgcaaatcaataaatgtaatccagcatataaacagagccaaagacaaaaaccacatgattatctcaatagatgcagaaaaagcctttgacaaaattcaacaacccttcatgctaaaaactctcaataaattaggtattgatgggacgtatttcaaaataataagagctatctatgacaaacccacagccaatatcatactgaatgggaaaaaactggaagcattccctttgaaaactggcacaagacagggatgccctctctcactgctcctattcaacatagtgttggaagttctggccagggcaatcaggcaggagaaggaaataaagggtattcagttaggaaaagaggaagtcaaattgtccctgtttgcagacgacatgattgtttatctagaaaaccccatcgtctcagcccaaaatctccttaagctgataagcaacttcagcaaagtctcaggatacaaaatcaatgtacaaaaatcacaagcattcttatacaccaacaacagacaaacagagagccaaatcatgagtgaactcccattcacaattgcttcaaagagaataaaatacctaggaatccaacttacaagggatgtgaaggacctcttcaaggagaactacaaaccactgctcaaggaaataaaagaggatacaaacaaatggaagaacattccatgctcatgggtaggaagaatcaatatcgtgaaaatggccatactgcccaaggtaatttacagattcaatgccatccccatcaagctaccaatgactttcttcacagaattggaaaaaactactttaaagttcatatggaaccaaaaaagagcccgcatcgccaagtcaatcctaagccaaaagaacaaagctggaggcatcacactacctgacttcaaactatactacaaggctacagtaaccaaaacagcatggtactggtaccaaaacagagatatagatcaatggaacagaatagagccctcagaaataacgccgcatacctacaactatctgatctttgacaaacctgagaaaaacaagcaatggggaaaggattccctatttaataaatggtgctgggaaaactggctagccatatgtagaaaactgaaactggatcccttccttacaccttatacaaaaatcaattcaagatggattaaagatttaaacgttagacctaaaaccataaaaaccctagaagaaaacctaggcattaccattcaggacataggcgtgggcaaggacttcatgtccaaaacaccaaaagcaatggcaacaaaagccaaaattggcaaatggtacctaattaaactaaagagcttctgcacagcaaaagaaactaccatcagagtgaacaggcaacctacaacatgggagaaaattttcgcaacgtactcatctgacaaagggctaatatccagaatctacaatgaactcaaacaaatttacaagaaaaaaacaaacaaccccatcaaaaagtgggcgaaggacatgaacagacacttctcaaaagaagacatttatgcagccaaaaaatacgtgaaaaaatgctcatcatcactggccatcagagaaatgcaaatcaaaaccactatgagataccatctcacaccagttagaatggcaatcattaaaaagtcaggaaacaacagcaaaaagaacaaagctggaggaatcatgccagctgacttcaaactatactacaaggctatgggaacaaaaacagcatgggacatggatgaaactgaaaaccatcatgctcagcaaactaacacaagaacagaaaaacaaacaccacatgttctcactcataagtgggagttgaacaatgagaacacatggacacagggaggggaacatcacacaccagggcctgtcaggggtaccttgggacaactgacatttgcaagacttaacctgagccccatcagttacaagagtttggaggcctcagctgtcacttctgtttccatggaaactcaaatcagattgccaaaaatgaggttttggtatcaggatgatgctggcctcataaaatgtgttggggaggagttgctctttttctattgtttggaaccatttcagaaggaatggtaccagctcctctctgtacctctggtagaatttggctgtgaatccgtctggtcctgggctttttttggctgggacatggatgaagctggaaaccatcattctcagcaaactaacacaccaacagaaaaccgaacagcacatcttctcactcataagtgggaattgaacaatgaaaacacatggacacatggagggaaacatcacacaccagggcctgttgggggatgttcacttatccaagtggaaatcagatggtttatcgaaatggtatgtaagagagaagtttacagatacgaccattcatggtggtggcagttgcagcaacagcagcaggatccccagggcagactgcaggcctctgggggctgggctctcagaagggtgccaggccacagccaaaatgctcaggcagaagcaaggtggctgtactgtgagcctagggaaggcaggtcccccttagcgggaacagtgaaagcaagggtgctcaatgtgcttgctcctttaccctgcagcagcagcagccgtgatacacatttttgggcttcctcaggcatgagccaaatatcagacactctatccctcaaactccaagagaccctcacgttcctcaacatccttctcttccaaagaaagggagaggggaagaacagcatgtcaacaacactctccaaagaattcctgactctcagcttctttgacttcaacctgtttcaaaactcaatgttggaagttctggccagggcaattaggcaggagaaggaaataaagggtattcaattaggaaaagaggaagtcaaattgtccctgtttgcagatgacatgattgtatatctagaaaacccccttgtctcagcccaaaatctccttaagctgataagcaacttcagcaaagtctcagaatacaaaatcaatgtacaaaaatcacaagcattcttacacaccaataacagacaaacagagagccaaatcatgagtgaactccccttcacaattgcttcaaagagaataaaatacctaggaatccaacttacaagggatgtgaaggacctcttcaaggagaactacaaaccactgctcaatgaaataaaagaggatacaaacaaatggaagaacattccatgctcatgggtaggaagaatcaatatcgtgaaaatggccatactgcccaaggtaatttatagattcaatgccatcctcatcaagctaccaatgactttcttcacagaattggaaaaaactactttaaagttcatatggaaccaaaaaagagcccacgtcgccaagtcaatcctaagccaaaagaacaaagctggaggcatcacactacctgacttcaaatacaaggctacagtaaccaaaacagcatggtatatataa

SEQ ID NO: 124236 - DNA, 2733 bp, Homo sapiens
atgggagactttaacaccccactgtcaacattagacagatcaacaagacagaaagtcaacaaggatacccaggaattgaactcagctccacaccaggcagacctaatagacatctacagaactctgcaccccaaatcaacagaatatacatttttttcagcaccacaccacacctattccaaaactgaccacatacttggaagtaaagctctcctcagcgaatgtaaaagaacagaaattataacaaactatctctcagatgacagtgcaatcaaactagaactcaggattaagaatctcactcaaaaccgctcaactacatggaaactgaacaacctgctcctggatgactactgggtacataacgaaatgaaggcagaaataaagatgttctttgaaaccaatgagaacaaagacacaacataccagaatctctgggacgcattcaaagcagtgtgtagagggaaatttgtagcactaaatgcccacaagagaaagcagggaagatccaaaattgacaccctaacatcacaattaaaagaactagaaaagcaagagcaaacacattcaaaagctagcagaaggcaagaaataactaaaatcagagcagaactgaaggaaatagagacacaaaaaaccgttcaaaaaattaatgaatccaggagctggttttttgaaaggatcaacaaaattgatagacagctagcaagactaataaagaaaaaaagggagaagaatctaatagacgcaataaaaaatgataaaggggatatcaccaccgatcccacagaaatacaaactaccatcagagaatactacaaacacctctatgcaaataaactagaaaatctagaagaaatggataaattcctggacacatacactctcccaagactaaaccaggaagaagttgaatctctgaatagaccaataacaggatctgaaattgtggcaataatcaatagcttaccaaccaaaaaaaagtccaggaccagatggattcacagccgaattgtaccagaggtacaaggaaggagctgtgttggaagttctggccagggcaatcaggcaggagaaggaaataaagggtattcaattaggaaaagaggaagtcaaattgtccctctttgcaggtgacatgattgtatatctagaaaaccccattgtctcagcccaaaatctccttaagctgataagcaacttcagcaaagtctcaggatacaaaatcaatgtgcaaaaatcacaagcattcttatacaccaataacagacaaacagagagccaaatcatgagtgaactcccattcacaattgcttcaaagagaataaaatacctaggaatccaacttacaagggatgtgaaggacctcttcaaggagaactacaaaccactgctcaatgaaataaaagaggatacaaacaaatggaagaacattccatgctcatgggtaggaagaatcaatatcgtgaaaatggccatactgcccaaggtaatttacggattcaatgccatccccatcaagctaccaatgactttcttcacagaattggaaaaaaactacttaaaagttcatatggaaccaaaaaaagagcccacatcgccaagtcaatcctaagccaaaagaacaaagctggaggcatcacgctacctgacttcaaactatactacaaggcgacagtaaccaaaacagcatggtactggtaccaaagcagagatatagaccaatggaacagaacagagccctcagaaataacgccacatatctacaactatctgatctttgacaaacctgacaaaaacaagcaatggggaaaggattccctatttaataaatggtgctgggaaaactggctagccatatgtagaaagctgaaactggatcccttctttaccccttatacaaaaattaattcaagatggattaaagacttaaatgttagacctaaaaccataaaaaccctagaagaaaacctaggcaatatcattcaggacataggcatgggcaaggatttcatgtctaaaacaccaaaagcaatggcaacaaaagccaaaattgacaaatgggatctaattaaactaaagagcttctgcacagcaaaagaaactaccgtcagagtgaacaggcaacctacagaatgggagaaaatttttgcaacctactcatctgacaaagggctaatatccagaatctacaatgaactcaaacaaatttacaagaaaaaaacaaacaaccccatcaaaaagtgggcaaaggatatgaacaaacacttctcaaaagaagacatttatgcagccaacagacacatgaataaatgctcttcatcactggccatcagagaaatgcaaatcaaaaccacaatgagataccatctcacaccagttagaatggcaatcattaaaaagtcaggaaacaacaggtgctggagaggacgtggagaaataggaacacttttacactgttggtgggactgtaaactagttcaatcattgtggaagtcagtgtggcaattcctcagggatctagaactggaaataccatttgacccagccatcccattactgggaaaactgtctcataaattagggaagtgctcaattacaagcctgacagagattgattttggttctgctgttggtcactaccagcaagtgaaggccgcagaaaccacaactccagctaatgctggaatcgcttcagaggtgctcactgaacaagtgttcattaagaagtga

SEQ ID NO: 124237 - DNA, 6973 bp, Homo sapiens
atggagaatgactttgacgagctgagagaagaaggcttcagacgatcaaattactctgagctatgggaggacattcaaaccaaaggcaaagaagttgaaaactttgaaaaaaatttagaagaatgtataactagaataaccaatacagagaagtgcttaaaggagctgatggagctgaaaaccaaggctcgagaactacatgaagaatgcagaagcctcaggagccgatgtgatcaactggaagaaagggtatcagcaatggaagatgaaatgaatgaaatgaagggagaagggaagtttagagaaaaaagaataaaaagaaacgagcaaagcctccaagaaatatgggactatgtgaaaagaccaaatctacatctgattggtgtacctgaaagtgatggggagaatggaaccaagttggaaaacactctgcaggatattatccaggagaacttccccaatctagcaaggcaggccaacgttcagattcaggaaatacagagaatgccacaaagatactcctcgagaagagcaactccaagacacataattgtcagattcaccaaagttgaaatgaaggaaaaaatattaaaggcagccagagagaaagacagatcaacgagacagaaagtcaacaaggatacccaggaattgaactcagctctgcaccaagtggacctaatagacctaatagacctaatctacagaactctccaccccaaatcaacagcaatatacatttttttcagcaccacaccacacctattccaaaattgaccacatacttggaagtaaagctctcctcagcaaatgtgaaagaacagagattataacaaactatctctcagaccacagtgcaatcaaactagaactcaggattaagaatctcactcaaaaccgctcaactacatggaaactgaacaacctgctcctgaatgactactgggtacataacgaaatgaaggcagaaataaagatgttctttgaaaccaatgagaacaaagacacaacataccagaatctctgggatgcattcaaagcagtgtgtagagggaaatttatagcactaaatgcccacaagagaaagcaggaaagatccaaaattgacaccctaacatcacaattaaaagaactagaaaagcaagagcaaacacattcaaaagctagcagaaggcaagaaataactaaaatcagagcagaactgaaggaaatagagacacaaaaaacctttcaaaaaattaatgaatccaggagctggttttttgaaaggatcaacaaaattgatagaccgctagcaagactaataaagaaaaaaagagagaagaatcaaatagacacaataaaaaatgataaaggggatatcaccaccaatcccacagaaatacaaactaccatcagagaatattacaaacacctctacgcaaataaactagaaaatctagaagaaatggataaattcctcgacacaaacaccctcccaagactaaaccaggaagaagttgaatctctgaatagaccaataacaggatctgaaattgtggcaataatcaatagtttactaaccaaaaagagtccaggaccagatggattcacagccgaattctaccagaggtacaaggaggaactgctgggcagagacacaaccaaaaaagagaattttagaacaatatccttggtgaacattgatgcaaaaatcctcaataaaatactggcaaaacgaatccagcagcacgtcaaaaagcttatccactatgatcaagtgggcttcatccctgggatgcaaagctggttcaatatacgcaaatcaataaatgtaatccagcatataaagagagccaaagacagaaaccacatgattatctcaatagatgcagaaaaagcctttgacaaaattcaacaacccttcatgctaaaaactctcaataaattaggtattgatgggacgtatttcaaaataataagagttatctatgacaaacccacagccaatatcatactaaatgggcaacaactggaagcattccctttgaaaactggcacaagacagggatgccctccctcaccactcctgttcaacatagtgttggaagttctggccagggcaattaggcaagagaaggaaataaagggtattcaattaggaaaagaggaagtcaaattgtccctgtttgcagaccacatgattgtatatctagaaaaccccattgtctcagcccaaaatctccttaagctgataagcaacttcagcaaagtctcaggatacaaaatcaatgtacaaaaatcacaagcattcttatacaccaacaacagacaaacagagagccaaatcatgagtgaactcccattcacaattgcttcaaagagaataaaatacctaggaatccaacttacaagggatgtgaaggacctcttcaaggagaactacaaaccactgctcaaggaaataaaagaggatacaaacaaatggaagaacattccatgctcatgggtaggaagaatcaatatcgtgaaaatggccatactgcccaaggtaatttatagattcaatgccatccccatcaagttaccaatgcctttcttcacagaattggaaaaaactactttaaggttcatatggaaccaaaaaagagcctgcatcgccaaggcaatcctaagccaaaagaacaaagctggaggcatcacactacctgacttcaaactatactacaaggctacagtaaccaaaacagcatggtactggtaccaaaacagagatatagatcaatgcaacagaacagagccctcagaaataacgctgcatatctgcaactatctgatctttgacaaacctgagaaaaacaagcaatggggaaaggattccctatttaataaatggtgctgggaaaactggctagccatatgtagaaagctgaaactggatcccttccttacaccttatacaaaaatcaattcaagatggattaaagacttaaacgttagacctaaaaccataaaaaccctagaagaaaacctaggcattaccattcaggacataggcatgggcaaggacttcatgtctaaaacaccaaaagcaatggcaacaaaagacaaaattgacaaatgggatctaattaaactaaagagcttctgcacagcaaaagaaactaccatcagagtgaacaggcaacctacggaatgggagaaaacttttgcaacctactcatctgacaaagggctaatatccagaatctacaatgaactcaaactaatttacaagaaaaaaacaaacaaccccatcaaaaagtgggcgaaggacatgaacagacacttctcaaaagaagacatttatgcagccaaaaaacacatgaaaaaatgctcatcatcactggccatcagagaaatgcaaatcaaaaccacagtgagataccatctcacaccagttagaatggcgatcattaaaaagtcaggaaacaacaggtgttggagaggatgtggagaaataggaacacttttacactgttggtgggactgtaaactagttcaaccattgtggaagtcagtgtggcgattcctcagggatctagaactagaaataccatttgacccagccatcccattactgggtatatacccaaacgactataaatcatgctgctataaagacacatgcacattgagtctaccagaaatccgcaactgcccaacgaaaagtgtcccagtccccttctctgttgatgaaactcagtatcatgttgaagatactagtcctgtaagctggcaagtaaaagttctaggcaagcatatacatcagggaagcagctatgaagatgtttggctgcctcagcgcatgcaaggaaaactaacaaacagaaaggacatccacaccaaaaacccatctgtacatcaccatcatcaaagaccaaaagtagataaaaccacaaagatggggaaaaaacagaacagaaaaactggaaactctaaaaagcagagcgcctctcctcctccaaaggaacgcagttcctcaccagcaatgcaacaaagctggacggagaatgactttgacgagctgagagaagaaggcttcagacgatcaaattactctgagctacgggaggacattcaaaccaaaggcaaagaagttgaaaactttgaaaaaaatttagaagaatgtataactagaataaccaatacagagaagtgcttaaaggagctgatggagctgaaaaccaaggctcgagaactacgtgaagaatgcagaagcctcaggagccgatgcgatcaactggaagaaagggtatcagtgatggaagatgaaatgaatgaaatgaagcgagaaggaaagtttagagataaaagaataaaaagaaacgagcaaagcctccaagaaacatgggactatgtgaaaagaccaaatctacgtctgattggtgtacctgaaagtgatggggagaatggaaccaacttggaaaacactctgcaggatattatccaggagaatttccccaatctagcaaggcaggccaacgttcagattcaggaaatacagagaacaccacaaagatactcctcgagaagagcaactccaagacacataattgtcagattcaccaaagttgaaatgaaggaaaaaatgttaagggcagccagagagaaagaaatacaaactaccatcagagaatactacaaatacctctacacaaataaactagaaaatctagaagaaatggataaattcctcgacacatacactctcctaagactaaaccagaaagaagttgaaactctgaatagaccaataacaggagctgaaattgtggcaataatcaatagcttaccaaccaaagagagtccaggaccagatggattcacagccaaattctaccagaggtacaaggaggaactggtaccattccttctgaaactattccaatcaatagaaaaagagggaatcctccctaactcattttatgaggccagcatcatcctgataccaaagccgggcagagacacaaccaaaaaagagaattttagaccaatatccttgatgaacattgatgcaaaaatcctcaataaaatactggcagaccgaatccagcagcacatcaaaaagcttatccaccatgatcaagtgggcttcatccctgggatgcaaggctggttcaatatatgcaaatcaataaatgtaatccagcatataaacagagccaaagacaaaaaccacatgattatctcaatagatgcagaaaaggcctttgacaaaattcaacaacccttcatgctaaaaactctcaataaattaggtattgatgggacatatttcaaaataataagagctatctatgacaaacccacagccaatatcatactgaatgggcaaaaactggaagcattccctttgaaaactggcacaagacagggatgctctctctcaccactcctattcaacatagtgttggaagttctggccagggcaattaggcaggagaaggaaataaagggtattcaattaggaaaagaggaagtcaaattgtccctgtttgcagatgacatgattgtttatctagaaaaccccattgtctcagcccaaaatctccttaagctgataagcaacttcagcaaagtctcaggatacaaaatcaatgtgcaaaaatcacaagcattcctatacaccaacaacagacaaacagagagccaaatcatgagtgaactcccattcacaattgcttcaaagagaataaaatacctaggaatccaacttacaagggatgtgaaggacctcttcaaggagaactacaaaccactgctcaaggaaataaaagaggatacaaacaaatggaagaacattccgtgctcatggataggaagaatcaatatcgtgaaaatggccatactgcccaaggtaatttatagattcaatgccatctccatcaagctaccaatgactttcttcacagaattggaaaaaactactttaaagttcatatggaaccaaaaaagagcctgcattgccaagtcaatcctaagccaaaagaacaaagctggaggcatcatgctacctgacttcaaactatactacaaggctacagtaaccaaaacagcacagtactggaaccaaaacagagatagagaccaatggaacagaacagagccctcagaaataatgccgcatatctacgaccacctgatctttgacaaacctgacaaaaacaagaaatggggaaacaattccctatttaataaatggtgctgggaaaactggctagccatatggagaaagctgaaactggatcccttccttacaccttatacaaaaattaattcaagatggattaaagacttacatgttagacctaaaatcataaaaaccctagaagaaaacctaggcaataccattcaggacatagtcatgggcaaggacttcatgtctaaaacaccaaaagcaatggcaacaaaagccaaaattgacaaatgggatctaattaaactaaagagcttctgcacagcaaaagaaactaccatcagagtgaacaggcaacctacaaaatgggagaaaatttttggtatctactcatctgacaaaggtctaatatcaagaatctacaatgaactccaacaaatttacaagaaaaaaacaaacaaccccatcaaaaagtgggtgaaggacatgaacagatacttctcaaaagaagacatttatgcagccaaaagacacatgaaaaaatgctcatcatcactggccatcagagaaatgcaaatcaaaaccacaatgagatactatctcacaccactcagaatggcgatcattaaaaagttcggaaacaacagacaggagacagtaagagaaatggcctgtctcctcagcggcacaatggactttagacatcgcgcctgttttgtactctccaagccggacttctctactcgctggcctggcgctgatgcccagaggccccctgtgcttgtggttgtggccttagacagttccctgcccttt

SEQ ID NO: 124238 - DNA, 3320 bp, Homo sapiens
ctttcccaagtttcaagatagctattcctaaaaatgatcatgggcatgaacaacatttttggggatatagagttccaaataatgccatggaagatacagcttatcaactggtccaccagtaccctacaagaatgcaggcccggagatgcaggatcgcgctgtcacagtggtcctcttcgcatcctctcccggcaaagagagatgctccggttaccagcggcgcgcatccccgcaggcgcctctcctctcgccgatacccacccaggcagtcccgacaggcgcgcctgcctacctggtggccggctgtcagcgaagcggcggtgcctcagccccttctcagctgctacagcgctcccagcgccatgttcccggtctccccgggcgcacgctggggaactactactggctggaagttctttgaaaccaacgagaacaaagacacaacataccagaatctctgggacgcattcaaagcagtgtgtagagggaaatttataccactaaatgcccacaagagaaagcaggaaagatccaaaattgacaccctaacatcacaattaaaagaactagaaaagcaagagcaaacacattcaaaagctagcagaaggcaagaaataactaaaatcagagcagaactgaaggaaatagagacacaaaaaacccttcaaaaaatcaatgaatccaggagctggttttttgaaaggatcaacaaaattgatagaccgctagcaagactaataaagaaaaaaagagagaagaatcaaatagacacaataaaaaatgataaaggggatatcaccaccaatcccacagaaatacaaactaccatcagagaatactacaaacacctctacgcaaaaaaactagaaaatctagaagaaatggatacattcctcgacacatacactctcccaagactaaaccaggaagaagttgaatctctgaatagaccaataacaggagctgaaattgtggcaatattcaatagtttaccaaccaaaaagagtccaggaccagatggattcacagccgaattctaccagaggtacaaggaggaactggtaccattccttctgaaaatattccaatcaatagaaaaagagggaatcctccctaactcattttatgaggccagcatcattctgataccaaagccaggcagagacacaaccaaaaaagagaattttagaccaatatccttgatgaacattgatgcaaaaatcctcaataaaatactggcaaaccgaatccagcagcacatcaaaaagcttatccaccatgatcaggtgggcttcatccctggaatgcaaggctggttcaatatacgcaaatcaataaatgtaatccagcatataaacagagccaaagacaaaaaccacatgattatctcaatagatgcagaaaaagcctttgacaaaattcaacaacccttcatgctaaaaactctcaataaattaggtattgatgggacgtatttcaaaataataagagctatctatgacaaacccacagccaatatcatactgaatgggcaaaaactggaagcattccctttgaaaactggcacaagacagggatgccctctctcaccgctcctattcaacatagtgttggaagttctggccagggcaatcaggcaggagaaggaaataaagggtattcaattaggaaaagaggaagtcaaattgtccctgtttgcagacgacatgattgtttatctagaaaaccccatcatctcagcccaaaatctccttaagctgataagcaacttcagcaaagtctcaggatacaaaatcaatgtacaaaaatcacaagcattcctatacaccaacaacagacaaacagagagccaaatcatgagtgaactcccattcacaattgcttcaaagagaataaaatacctaggaatccaacttacaagggatgtgaaggacctcttcaaggagaactacaaaccactgctcaaggaaataaaagaggatacaaacaaatggaagaacattccatgctcatgggtaggaagaatcaatatcgtgaaaatggccatactgcccaaggtaatttacagattcaatgccatccccatcaagctaccaatgactttcttcacagaattggaaaaaactactttaaagttcatatggaaccaaaaaagagcccgcatcgccaagtcaatcctaagccaaaagaacaaagctggaggcatcacactacctgacttcaaactatactacaaggctacagtaaccaaaacagcatggtactggtaccaaaacagagatatagatcaatggaacagaacagagccctcagaaataacgccacatacctacaactatctgatctttgacaaacctgagaaaaacaagcaatggggaaaggattccctatttaataaatggtgctgggaaaactggctagccatatgtagaaagctgaaactggatcccttccttacaccttatacaaaaatcaattcaagatggattaaagatttaaacgttagacctaaaaccataaaaaccctagaagaaaacctaggcagtaccattcaggacataggcgtgggcaaggacttcatgtccaaaacaccaaaagcaatggcaacaaaagccaaaattgacaaatgggatctaattaaactaaagagcttctgcacagcaaaagaaactaccatcagagtgaacaggcaacctacaacatgggagaaaattttcgcaacctactcatctgacaaaaggctaatatccagaatctacaatgaactcaaacaaatttacaagaaaaaaacaaacaaccccatcaaaaagtgggcgaaggacatgaacagacacttctcaaaagaagacatttatgcagccaaaaaacacatgaaaaaatgctcatcatcactggccatcagagaaatgcaaatcaaaaccactatgagatatcatctcacaccagttagaatggcaatcattaaaaagtcaggaaacaacagaatcagaaggcatttccagccaagatcagccatgttcttctgctgctgccctgggggcgagggctcagggctgcagtgggagctgctgctggcagcatggactgtgctcccctacccctgccctgcagccacagttgggagattcctcaagcaggcacagactgctgaccattccttcctgggccatgtttggagggtgcccagcagcaggagctggactgataaagaaatcctgagcttggtcgtcaacagacagaaccaggaagttgtgcagctcatagggggcctctgtgggacacacaccatctcgcccacacagcacccagccacgggttga

SEQ ID NO: 124239 - DNA, 4259 bp, Homo sapiens
atgggagactttaacaccccactgtcaacattagacagatcaatgagacagaaagtcaacaaggatacccaggaattgaactcagctctgcaccaagcagacctaatagacatctacagaactctccaccccaaatcaacagaatatacatttttttcagcaccacaccacacctattctaaaattgaccacatacttggaagtaaagctctcctcagcaaatgtaaaagaacagagattataacaaactatctctcagaccacagtgcaatcaaactagaactcaggattaagaatctcactcaaaaccactcaactacatggaaactgaacaacctgctcctgagtgactactgggtacataacgaaatgaaggcagaaataaagatgttctttgaaaccaacgagaacaaagacacaacataccagaatctctgggacgcattcaaagcagtgtgtagagggaaatttatagcactaaatgcccacaagagaaagcaggaaagatccaaaattgacaccctaacatcacaattaaaagaactagaaaagcaagagcaaacacattcaaaagctagcagaaggcaagaaataactaaaatcagagcagaactgaaggaaatagagacacaaaaaacccttcaaaaaattaatgaatccaggagctggttttttgaaaggatcaacaaaattgatagaccgctagccagactaataaagaaaaaaagagagaagaatcaaatagacacaataaaaaatgataaaggggatatcaccaccgatcccacagaaatacaaactaccatcagagaatactacaaacacctctacgcaaataaactagaaaatctagaagaaatggataaattcctcgacacatacactctcccaagactaaaccaggaagaagttgaatctctgaatagaccaataacaggagctgaaaatgtggcaataatcaatagtttaccaaccaaaaagagtccaggaccagatggattcacagccgaattctaccagaggtacaaggaggaactgctgataagcaacttcagcaaagtctcaggatacaaaatcaatgtacgaaaatcacaagcattcttatacaccgacaacagacaaacagagagccaaatcatgagtgaactcccattcacaattgcttcaaagagaataaaatacctaggaatccaacttacaagggatgtgaaggacctcttcaaggagaactacaaaccactgctcaaggaaataaaagaggatacaaacaaatggaagaacattccatggtcatgggtaggaagaatcaatatcgtgaaaatggccatactgcccaaggtaatttacagattcaatgccatccccatcaagctaccaatgactttcttcacagaattggaaaaaactactttaaagttcatatggaaccaaaaaagagcccgcatcgccaaggcaatcctaagccaaaagaacaaagctggaggcatcacactacctgacttcaaactatactacaaggctacagtaaccaaaacagcatggtactggtaccaaaacagagatataggtcaatggaacagaacagagccctcagaaataacaccgcatgtctacaactatctgatctttgacaaacctgagaaaaccaagcaatggggaaaggattccctatttaataaatggtgctgggaaaactggctagccatatgtagaaagctgaaactggatcccttccttacaccttatacaaaaatcaattcaagatggattaaagacttaaacgttagacctaaaaccataaaaaccctagaagaaaacctaggcattaccattcaggacataggcatgggcaaggacttcatgtctaaaacaccaaaagcaatggcaacaaaagacaaaattgacaaatgggatctaattaaactaaagagcttctgcacagcaaaagaaactaccatcagagtgaacaggcaacctacggaatgggagaaaacttttgcaacctactcatctgacaaagggctaatatccagaatctacaatgaactcaaactaatttacaagaaaaaaacaaacaaccccatcaaaaagtgggcgaaggacatgaacagacacttctcaaaagaagacatttatgcagccaaaaaacacatgaaaaaatgctcatcatcactggccatcagagaaatgcaaatcaaaaccacagtgagataccatctcacaccagttagaatggcgatcattaaaaagtcaggaaacaacagatgggacacaacagtcatgggctgtctcagctgcccaaagcctgaggcagaccacatgagagctgtggcttcttcttggattcagagagaagtaatggaaggcctgtctgatgttgcttcttttgcaactaaacttaaaaacactctcatccagtaccatagcattgaagaagataagtggcgagttgctaagaaaacgcatgtaaacagaaccaacgacaaaaaccatgtgattatctcaatagatgcagaaaaggcctctggcaaaattcaacaacccttcatgctaaaaactctcaataaactaggtattgataggacgtatctcaaaataataagagctatatatgacaaacccacagacaatatcatactgaatgggcaaaaactggaagcattccctttgaaacctggcacaagacagggatgccctctctcaccactcctattcaacatagtgttggaagttctggccagggtaatcaggcaggagaaggaaataaagggtgttcaattaggaaaagaggaagtcaaattgtccctgtttgcagatgacatgattgtatatctagaaaaccccatcgtctcaccccaaaatctccttaaactgataggcaacttcagcaaggtctcaggatacaaaatcaatgtgcaaaaatcacaagcattcttatacaccaataagagacaaacagagagccaaatcatgagtgaactcccattcacaattgcttcaaagagaataaaatacctaggaatccaacttacaagggatgtgaaggacctcttcaaggagaactacaaaccactgctcaaggaaataaaagaggatacaaacaaatggaagaacattccatgctcatgggtaggaagaatcaatatcatgaaaatggccatactgcccaaggtaatttatagattcaatgccatccccatcaagctaccaatgactttcttcacagaaatggaaaaaaactactttaaagttcatatggaaccaaaaaaagagcccgcatcgccaaggcaatcctaagccaaaagaacgaagctggaggcatcacactacctgacttcaaactatactacaaggctacagtaaccaaaacagtatggtactggtaccaaaacagagatatagatcaatggaacagaacagagccctcagaaataatgctgcttatctacaactatctgatctttgacaaacctgacaaaaacaagaaatggggaaaggattccctatttaataaatggtgctgggaaaactggctagccatatgtagaaagctgaaactggatcccttccttacatcttatgcaaaaatcaattcaagatggattaaagacttaaatgttcgacctaaaaccataaaaaccctagaagaaaacctaggcaataccattcaggacataggcatgggcaaggacttcatgtctaaaacacgaaaagcaatggcaacaaaagccaaaattgacaaatggaatctcattaaactaaagagcttcttcacagcaaaagaaactaccatcagagtgaacaggcaacctacagaatgggagaacatttttgcaatctactcatctgacaaagggctaatatccagaatctacaatgaactcaagcaaatttacaagaaaaaaacaaacaaccccatcaaaaagtgggagaaggatatgaacagacacttctcaaaagaagacatttatgcagccaaaagacacatgaaaaaatgcccatcatcactgaccatcagagaaatgcaaatcaaaaccacaatgagataccatctcacaccagttagaatggcgatcattaaaaagtcaggaaacagcagagtatactccttccacttaaatataaaagttaactgtaagacagcctcaggaggtgttccaaaaggcattgttaatataggagatgacagttccatgcatgttattgcccctgaagaccttctagtgggacaggctgtggagatggaagacagatactag

SEQ ID NO: 124240 - DNA, 4921 bp, Homo sapiens
atgtaccaagcaaatggaaaacaaaaaaaggcaggggttgcaatcctagtctctgataaaacagactttaaaccaacaaagatcaaaagagacaaagaaggccattacataatggtaaagggatcaattcaacaagaagagctaactatcctaaatatatatgcacccaatacaggagcacccacattcatacagcaagtcctgagtgatctacaaagagacttagactcccacacattaataataggagactttaacaccccactgtcaacatcagacagatcaacgagacagaaagtcaacaaggatacccaggaattgaactcagctctgcaccaagcagacctaatagacatctacagaaccctccaccccaaatcaacagaatatacatttttttcagcaccacaccacacctattccaaaattgaccacatacttggaagtaaagcactcctcagcaaatgtaaaagaacagaaattataacaaactatctctcagaccacagtgcaatcaaactagaactcatgattaagaatctcactcaaaaccactcaaccatatggaaactgaacaacctgctcctgaatgactactgggtacataaggaaatgaaggcagaaataaagatgttctttgaaaccaacgagaacaaagacacaacataccagaatctctgggacacattcaaagcagtgtgtagagggaaatttatagcactaaatgcccacaagagaaagcaggaaagatccaaaattgacaccctaacatcacaattaaaagaactagaaaagcaagagcaaacactttcaaaagctagcagaaggcaagaaataactaaaatcagagcagaactgaaggaaatagagacacaaaaaacccttcaaaaaattaacgaatccaggagcaggttttttgaaaggatcaacaaaattgatagcctgctagcaagactaataaagaaaaaaagagagaagaatcaaatagatgcaataaaaaatgataaaggggatatcaccaccaatcccacagaaatacaaactaccatcagagaatactacaaacacctctacgcaaataaactagaaaatctagaagaaatggataaattcctcgacacatacactctcccaagactaaaccaggaagaagttgaatctctgaatagaccaataacgggagctgaaattgtggcaataatcaatagcttaccaaccaaaaagagtccaggaccagatggattcacagccgaattctaccagaggtacaaggaggaacaggtaccattccttctgaaactattccaatcaatagaaaaagagggaatcctccctaactcattttatgtgtccagcatcatcctgataccaaagccgggcagagacacaaccaaaagagagaattttagaccaatatccttgatgaacattgatgcaaaaatcctcaataaaatactggcaaaccgaatccagcagcacatcaaaaagcttatccaccatgatcaagtgggcttcatccctgggatgcaaggctggttcaatatatgcaaatcaataaatgtaatccagcatataaacagaaccaaagacaaaaaccacatgattatctcaatagatgcagaaaaggcctttgacaaaattcaacaacctttcatgctaaaaactctcaataaattagatattgatgggttggaagttctggccagggcaatcaggcaggagaaggaaataaagggcattcaatcaggaaaagaggaagtcaaattgtccctgtttgcagatgacatgattgcatatctagaaaaccccatcgtctcagcccaaaatctccttaagctgataagcaacttcaacaaagtctcaggatacaaaatcaatgtgcaaaaatcacaagcattcttatgcaccaataacagacaaacagaaagccaaatcatgagtgaactcccattcacaattgcttcaaagagaataaaatacctaggaatccaacttacaagggatgtgaaggacctcttcaaggagagctacaaaccactgctcaatgaaataaaagaggatacaaacaaatggaagaacattccatgctcatgggtaggaagaatcaatatcgtgaaaatggccatactgcccaaggtaatttatagattcaatgccatccccatcaagctaccaatgactttcttcacagaattggaaaaaactaccttaaagttcatatggaaccaaaaaaagagcccacattgccaagacaatcctaagcaaaaagaacaaagctggaggcatcacgctacctgacttcaagctatactacaagcctacggtaaccaaaacagcatggtactggtaccaaaacagagatatagaacaatggaacagaatagagcccttggaaataataccacacatctacagccatctgatctttgacaaacctgagaaaaacatgaaatggggaaaggattccctatttaataaatggtgctgggaaaactggctagccatatgtagaaagctgaaactggatcccttccttacaccttatagaaaaatcaattcaagatggattaaagatttaaacgttagacctaaaaccataaaaaccctagaagaaaacctaggcattaccattcaggacataggcgtgggcaaggacttcatgtccaaaacaccaaaagcaatggcaaccaaagccaaaattgacaaatgggatctaattaaactaaagagcttctgcacagcaaaagaaactaccatcagagtgaacaggcaacctacaaaatgggagaaaattttcgcaacctactcatctgacaaagggctaatatccagaatctacaatgaactcaaacaaatttacaagaaaaaaacaaacaaccccatcaaaaagtgggcgaaggacatgaacagacacttctcaaaagaagacatttatgcagccaaaaaatacatgaaaaaatgctcatcatcactggccatcagagaaatgcaaatcaaaaccactatgagatatcatctcacaccagttagaatggcaatcattaaaaagtcaggaaacaacagtcttgctagtggtctatcaattgacaaaattcaacaacccttcatgctaaaaactctcaataaattaggtattgatgggacgtatttcaaaataataagagctatctatgacaaacccacagccaatatcatactgaatgggcaaaaactggaagcattccctttgaaaactggcacaagacagggatgccctctctcaccgctcctattcaacatagtgttggaagttctggccagggcaatcaggcaggagaaggaaataaagggtattcaattaggaaaagaggaagtcaaattgtccctctttgcagacgacatgattgtttatctagaaaaccccatcgtctcagcccaaaatctccttaagctgataagcaacttcagcaaagtctcaggatacaaaatcaatgtacaaaaatcacaagcattcttatacaccaacaacagacaaacagagagccaaatcatgagtgaactcccattcacaattgcttcaaagagaataaaatacctaggaatccaacttacaagggatgtgaaggacctcttcaaggagaactacaaaccactgctcaaggaaataaaagaggatacaaacaaatggaagaacattccatgctcatgggtaggaagaatcaatatcgtgaaaatggccatactgcccaaggtaatttatagattcaatgccatccccatcaagctaccaatgactttcttcacagaattggaaaaaactactttaaagttcatatggaaccaaaaaagagcccgcattgccaagtcaatcctaagccaaaagaacaaagccggaggcatcacactacctgacttcaaactatactacaaggctacagtaaccaaaacagcatggtactggtaccaaaacagagatatagatcaatggaacagaacagagccctcagaaataacgccgcttacctacaactatctgatctttgacaaacctgagaaaaacaagcaatggggaaaggattccctatttaataaatggtgctgggaaaactggctagccatatgtagaaagctgaaactggatcccttccttacaccttatacaaaaatcaattcaagatggattaaagatttaaacgttagacctaaaaccataaaaaccctagaagaaaacctacgcattaccattcaggacatagggatgggcgaggacttcatgtccaaaacaccaaaagcaatggcaacaaaagccaaaattgacaaatgggatctaattaaactaaagagcttctgcacagcaaaagaaactaccatcagagtgaacaggcaacctacaaaatgggagaaaattttcgcaacctactcatctgacaaagggctaatatccagaatctacaatgaactcaaaccaatttacaagaaaaaaacaaacaaccccatcaaaaagtgggcgaaggacatgaacagacacttctcaaaagaagacatttatgcagccaaaaaacacatgaaaaaatgctcatcatcactggccatcagagaaatgcaaatcaaaaccacaatgagatatcatctcacaccagttagaatggcaatcattaaaaagtcaggaaacaacagaagtaaagacataaaagatagagaagatcctttggcttatggagtttttgctccagtcgtaagggtggaatcaagtttacaggaaggaagctggtgggtttcattttggacagaacgaggacgagctatgtgggagaacattcaaatagagctaggattcaggaagaagcaggacccaggatgccaccttacgtggaaatgtggatactacttctatgatggacgaagaggaggaagttgtttgcagatgcaactgactctgtag

SEQ ID NO: 124241 - DNA, 4014 bp, Homo sapiens
atgacaggatcaaattcacacataacaatattaactttaaatataaatggactaaattctgcaattaaaagacacagacgggcaagttggataaagagtcaagacccatcagtgtgctgtattcaggaaacccatctcacgtgcagagacacacataggctcaaaataaaaggatggaggaagatctaccaagcaaatggaaaacaaaaaaaggcaggggttgcaatcctagtctctgataaaacagactttaaaccaacaaagatcaaaagagacaaagaaggccattacataatggtaaagggatcaattcaacaagaggagctaactatcctaaatatttatgcacccaatacaggagcacccagattcataaagcaagtcctgagtgacctacaaagagacttagactcccacacattaataatgggagactttaacaccccactgtcaacattagacagatcaacgagacagaaagtcaacaaggatacccaggaattgaactcagctctgcaccaagcggacctaatagacatctacagaactctccaccccaaatcaacagaatatacattttttttagcaccacaccacacctattccaaaattgaccacatagttggaagtaaagctctcctcagcaaatgtaaaagaacagaaattataacaaactatctctcagaccacagtgcaatcaaactagaactcaggattaagaatctcactcaaagccgctcaactacatggaaactgaacaacctgctcctgaatgactactgggtacataatgaaatgaaggcagaaataaagatgttctttgaaaccaacgagaacaaagacaccacataccagaatctctgggacgcattcaaagcagtgtgtagagggaaatttatagcactaaatgcctacaagagaaagcaggaaaagatccaaaattgacactctaacatcacaattaaaagaactagaaaagcaagagcaaacacattcaaaagctagcagaaggcaagaaataactaaaatcagagcagaactgaaggaaatagagacaaaagaaaacccttcaaaatatcaatgaatccaggagctggttttttgaaaggatcaacaaaattgatagaccgctagcaagactaataaagaaaaaaagagagaagaatcaaatagacacaataaaaaatgataaaggggatatcaccaaccgatcccacagaaatacacactaccatcagagaatactataaaaacctctacgcaaagaaactagaaaatctagaagaaatggataaattcctggagacatacaccctcccaagaccaaaccaggaagaagttgaatctctgaatagaccaataacaggatctgaaattgtggcaataatcaatagcttaccaaccaaaaagagtccaggaccagatggattcacagccgaattctaccagaggtacaaggaggaactggtaccattccttctgaaactattccaatcaatagaaaaagaaggaatcctccctaactcatttgatgaggccagcatcatcctgataccaaagctgggcagagacacaaccaaaaaaagagaattttagaccaatatccttgatgaacattgatgcaaaaatcctcaataaaatactggcaaaccgaatccagcagcacatcaaaaagcttatccaccatgatcaagtgggcttcatccctgggaatgcaaggctggttcaatatatgcaaatcaataaatgtaatccagcatataaacagaaccaaaggcaaaaaccacatgattatctcaatagatgcagaaaaggcctttgacaaaattcaacaacccttcctgctaaaaactctcaataaattaggtattgatgggacgtatctcaaaataataagagctatctatgacaaacccatagccaatatcatactgaatgggcaaaaactgacctttgaaaaattccctttgaaaattggcacaagacagggatgccctctctcaccactcctgttcaacatagtgttggaagttctggccagggcaatcaggcaagagaaagaaataaagggtattcaattagcaaaagaggaagtcaaattgtccctgtttgcagatgacatgattgtatatttagaaaaccccattgtctcagtccaaaatctccttaagctgataagcaacttcagcaaagtctcagggtacaaaatatacaaaatcgatgtgcaaaaatcacaagcattcctatacaccaataatagacaaacagagagccaaatcatgagtgaactcccagttcacaattgcttcaaagagaataaaatacctaggaatccaacttacaagggatgtgaaggacctcttcaagggagaaccacaaaccactgctcaaggaaaataaaagaggatacaaacaaatggaagaacattccatggctcatgggtaggaggaagaatcaatctcgtgaaaatggccatacttgcccaaggtaatttacagattcaatgccatccccatcaagctaaccaatgactttcttcacagaattggaaaaaaactactttaaagttcatatggaaccaaaaaaagagcccgtattgccaagtcaatcctaagccaaaagaataaagctggaggaggcatcatgctacctgacttcaaactatactacaaggctacagtaaccaaaacaacatgatacagtaaccaaaacagcatggtactggtaccaaaacagagatatagatcaatggaacagaacagagccctcagaaataaggccgcatacatctacaaccatctgatctttgacaaacctgagaaaaaacaagcaatgggggaaaggattccctatttaataaatggtgctgggaaaactggctagccatatgtagaaagctgaaactggatcccttccttacaccttatacaaaaatcaattcaagatggattaaagatttaaacgttaaacctaaaaccataaaaaccctagaagaaaacctaggcattaccattcaggacataggcgtgggcaaggacttcatgtccaaaacaccaaaagcaatggcaacaaaagacaaaattgacaaatgggatctaattaaactaaagagtttaattaaactaaagagcacagcaaaagaaactaccatcagagtgaacaggcaacctaaaaaatgggagaaaattttcccaacctactcatctgacaaagggctaatatccagaatctacaatgaactcaaacaaatttacaagaaaaaaaaaacaaacaatcccatcaaaaagtggacgaaggcacatgaacagacacttctcaaaagaagacatttatgcagccaaaaaaacacatgaaaaaaatgctcatcatcactggccatcagagaaatgcaaatcaaaaccacaatgagataccatctctcaccagttagaatggcaatcatgaaaaaagtcaggaaacaacaggtgctggagaggatgcggagaaataggaacacttttacactgttggtgggactgtaaactagttcaaccattgtggaagtcagtgtggcgattcctcagggatctagaactagaaataccatttgacccagccatcccatttactgggtatatacccaaatgagtataaatcatgctgctataaagacacatgcacacgtatgtttattgcggcactattcacaatagcaaagacttggaaccaacccaaatgtccaacaatgatagactggattaagaaaatgtggcacatatacaccatggaatactatgcagccataaaaaatgatgagttcatatcctttgtagggacatggatgaaattggaaaccatcattctcagtaaactatcgcaagaacaaaaaaccaaacaccgcatattctcgctcatagtgcaatgctctgtggctgccccagctgtggctcaggcacaccaagacgcagctcaagccacttcagagggcacaagcaatgagccttggtggtgtccctatggtgctaattctgcag

SEQ ID NO: 124242 - DNA, 401 bp, Homo sapiens
cccttgtgaagttccgtggagacactcggtcccctgaaatggatgaagggcgaagggaggaggtcctcaggatttttccctcgcttttccttaagaagcaacaggctcaaaaccaaacggttggccttgcttactcctgaagtcgaagaggcttactcccctggaatccaagtggatgtggagcccatggcgtcctctggcgctctcggtctcttcgacccctttttactgtgttgatgataaatggggcaggattcccctcctgcaccacctgcagcatcctgtccaggatccatctgggagctgagaagaagcaaagtgtcagggatcgggggttctcgggctatgctgagaagcaaggaatgctgaagaaggggcctgagggaagggcttatggtgat

SEQ ID NO: 124243 - DNA, 647 bp, Homo sapiens
atgcagtttccaaaaacaaaaacaaagaagaaggaggaggaggaagaagaagaggaagaggaggaggaggaggaggaagaagaagaagaagaaggaggaagaagaagaagaagaagaggaagaagaaggagaagaagaaaaagaagaaataatctaatagggaaagctcccagatggatcctggacaggatgctgcaggtggtgcaggaggggaatcctgccccatttatcatcaacacagtaaaaaggggtcgaagaagccgagagcgccagaggacgccatgggctccacatccacttggattccaggaaaggcggtacatctacgaaagccctaatccatagagggaaagactcctcgttcctggcccagaaatgagatgagaaatttaggggccccgtacaggaaggcctttcgcaaagtccagactcaattgccttcgcagcccttaaagtttccttaggaaggtctgtgggagaacgaggttggtttaggaattggcccctgccttgtactacgtagttttgtcatccaaagtgttttagaagtgaattgaatcatagttacgccttattttgaaaccctgtaattcagagaacgtaaacccttattaaaatgcctcataatcaaaaaaaaaaaaaaaaaa

SEQ ID NO: 124244 - DNA, 1449 bp, Homo sapiens
atggggaaaaagttacccatttgttgtcccctacttgaggaggaaatcaaccctgaagtctgggcattggaaggagaatctggaaaggcaaaaaatgcccgcccagtccaaatcaggttaaaagatcccacaacttttccttatcaaaggcaatatcccttaaggtctgaagctcataaaggattacagaatattgttaaacatttgaaggctcaaggcttagtaaggaaatgcagcagtccctgcaacaccccaattctgggagtacaaaaaccgaacggtcagtggagactagtgcaagatcttagactcattgaggcagtaattccactatatccagttgtacccaacccctataccctgctctctcaaataccagaggaagcagaatggttcatcgttctggacatcaaggatgccttcttttgtattcccctgcactctgactcccaggatcccacagaccacacgtcccaacttatgtggacggtcttgccccaagggtttagggatagccctcatctgtttggtcaggcactggcccaagatctaagctacttctcaagtccaggcactctggtccttcaatatgtggatgatttacttctggctaccagttcagaagcctcgtgccagcaggctattctagatctgttgaactttctagctaatcaagggtacaagttgtctaggtcgaaggcccagctttgcctacagcagacattaaaacagttgaaggggttccttggaattaccggcttttgccaactatggatccctggatgcagcgagatagccaggctcctctatactccaatcaaggaaacccagagggcaaatactcatctagtagaatgggaaccagaggcagaaacagccttcaaaaccttaaagcaggtcctagtacaagctccagctttaagccttcctacaggacagaacttctctttatacgtcacagagagagccaggatagctcttggagtccttactcagactcgtgggacaaccccacaaccagtggcatacctaagtaaggaaattgatgtagtagcaaaaggctggcctcactgtttaagggtagttgcagcagtggccatcttagtgtcagaggctatcaaaataatacaaggaaaggatctcactgtctggagtactcatgatgtaaatggcacactaggtgccaaaggaagtttatggctatcagacaacaacctacttagataccaggcactactccttgagggaccagtgcttgaaatatgcatgtgcgtggccctcaaccctgccccttttctcccagaggatggggaaccaatcgagcatgactgccaacaaattatagtccagacttatgccgcccaagatgatctcttagaagtccccttaactaatcctgaccttaacctatataccaatggaagttcatttgtggaaaatgggatatga

SEQ ID NO: 124245 - DNA, 3912 bp, Homo sapiens
cggagaaagctccaaaagcaagccctgggccctgaacaaaatctagagacattattaaacctggcaacctcggtgttctataatagggaccaagaggaacaggtccaaaaggaaaagcgagatcagagaaaggccgcagccttagtcatggccctcagacaaacaaaccttggtggttcagagaggacagaacatgaagcaggccaatcacctggtaaggcttgttatcagtgtggtttactgggacactttaaaaaagattgtccaatgagaaacaagctgccccctcgtccgtgtccactatgctgaggcaatcactggaaggtgcactgccccagaggatgaaggttccctgggtcagaagcccccagccagacgatccaacaacaggactgagggtgcctggggcaagcgccagctcatgtcatcaccctcactgagccccgggtatgtttaactattgagggccaggaaattgacttcctcctggacactggcgcggccttctcagtgttaatctcctgtcctggacgactctcctcaacctccgttaccatccaaggaatcctgggacagcctgtaaccaggtatttctcccacctcctcagttgtaattgggagactttgctcttttcacatgcctttcttcttatgcctgaaagacccacagggttattagggagggatatattagccaaggctggagctattatctacatgaatatggggaacaagttacccatttgttgtcccctacttgaggagggaatcaaccctgaagtctgggcattggaaggacaatttggaagggcaaaaaatgcccacccagtccaaatcaggttaaaagatcccaccacttttccttatcaaaggcaatatccctaaggcctgaagctcataaaggattacagaatattgttaaacatttgaaagctcaaggcttagtaaggaaatgcagcagtccctgcaacaccccaattctggaagtacaaagaccgagactagtgcaagatcttagactcattaatgaggcagtaatttcactatatccagttgtacccaacccctataccctgctctctcaaataccagaggaagcagaatggttcacagttctggacctcaaggatgccttcttctgtgttcccctgcactctgattcacagttcctctttgcttttgaggatcccacaaaccacacatcccaacttacatggatggtcttgccccaagggtttagggatagccctcatctgtttggtcaggccctagccaaagatctaggccacttctcaagtccaggcactctggtccttcaatatgtggatgatttacttttggctaccagttaggaagccttgtgccagcaggctactctagatctcttgaactttctagctaatcaagggtacaaggtgtctatgtcgaaggcccagctttgcctacagcaggttaaatatctaggcctaatcttagccaaagggaccagggccctcagcaaggaatgaatacagcctatactggcttatcctcgccctaagacattaaaacagttgagggagttccttggaattaccagcttttgccgactatggatccctggatacagcgagacagccaggcccctctatactctaatcaaggacacccagagggcaaatactcatctagtagaatgggaatcagaggcagaaacagccttcaaaaccttaaagcaggccctagtacaagcgccaggtttaagccttcccacaggacaaaacttctctttatatgtcacagagagagccgggatagctcttggagtccttactcagactcgtgggacaaccccacaaccagtggcacacctaagtaaggaaactgatgtagtagcaaaaggctggcctcactgtttaagggtagttgcagcagtggccgtcttagtgtcagaggctatcaaaataatacaaggaaaggatctcattgtctggactactcatgaagtaaatggcatactaggtgccaaaggaagtttatggctatcagacaactgcctacttagataccaggcactactccttgagggaccagtgcttcaaatatgcacatgcatggccctcaaccctgccacttttctcccagaggatggggaaccaatcaagcatgactgccaacaaattatagtccagacttatgccgcccgagatgatctcttagaagtccccttaactaatcctgaccttaacctatatactgatggaagttcatttgtggagaatgggatacgaaggttagtgatgtaaccatacttgaaagcaagcctcttcccccagggaccagtgcccagttagcggaactagtggcacttacctgggccttagaactgggaaagggaaaaagaataaatgtgtatacagatagcaagtatgcttatctaatcctacatgcccatgctgcaatatggaaagagagggagttcctaacctctgtaggaacccccattaaataccacaaggaaattatagagttattgcacgcaatgcaaaaacacaaagaggtgggaatcttacactgacaaagccatcagaataggaaggagaggggagaacagcagcataagcagctggcagaggcagcagaaaggaaagaaagagacaggaagtcaaagaaagagacagagaggaagagacaagaagttagagagaaagagggacagacacagaagtcaaagagagggtaaaaaagagaggaagagacaaagaagaagtcaaagagagagatggaagtagtaaagaaaaaacagtgtacctattcctttaaaagccagggtaaatttctctctacccacgcaaggcaattctctattggatctcaacccatatctgcctctcaaacagttgaagaaataatgaaatctatccttactttacaatcccaaataagactctttggcagcagtgactctccaaaaccgctgaggcctagatctcctcactgctgaaaaaggaggactctgcaccttcttaggggaagagtgttgtttttacactaaccagtcagggatagcatgagatgccacccagcgtttacaggaaaaggcttctgaaatcagacgcctttcaaattcttataccaacctctggagttgggcaacatggcttctcccctttctaggtcccgtggcagccatcttgctgttactcgcctttgggccccgtatttttaaccttcttgtcaaatttgtttggtctagaatcgaggccatcaagctacagatggtcttacaaatcgaaccccaaatgagttcaactaacaacttctaccgaggacccctggactgaccagctggcacttcccctggcctagagagttcccctctgaaggacactacaactgcaaagccccttcttcgcccctatccagcaggaagtagctagagcagtcatcggccaaattcccaacagcagttggggtgtcctgttgattgaggggtgacagcatgctggcagtcctcacagccctcactcgctcgctcactctcggcacctcctctgcctgggctcccactttggcagcacttgaggagcccttcagctctgtatctagctactctgatgggtccttggagaacctttatgtctagctcagggattgtaaatacaccaatcagcaccctgtgtctagctcagggtttgtgaatgcaccaatggacactctgtatctagctactctggtggggccttggagaacctttgtgtcaacactctgtatctaactaacctggtggggatgtggagaacctttgtgtctagctcagggatgtaaacgcaccaatcagtgccctgtcaaaccactcggctctaccaatcagcaggatgtgggtggggccagataagagaataaaagcaggctgcccgagccagcagtggc

SEQ ID NO: 124246 - DNA, 2532 bp, Homo sapiens
atgactcaggagcctagtgcaattatgagagaggtgccagaaatggtaaacattctgaaaggcactggagacatacataacacagagattcaaaatgacaacgggaaggtggggatgacaaaatgtatggctaaacctaaggatgagctccgaaatttgaagttaattctcagtgagtcactggaatcagcccagagacaaggtgtctcaaagcaagaaaaagtattgcagtgcagaagggctcaggacctgcagcccaccatgcctgagcctcccatcccctccatgggctcctgtgcagcccgagcctccccgactagtgccaccccctgctccagggcacccagtcccactgaccacccaacagctgcgaagtgcaggcgcatggcgcggtactggcaggcagctccacctgcagccctggtgctggatcaactgggtgaagccagctgggctcctgagtctgctaatctggtggggaagtggagaacctttgtgtctagctcagggactgcaaacgcaccaatcagcaccctgtcaaagcagaccactgggctctaccaatcggcaggatgtgggtggggccagaatttgggggctaaataccgggcacctgtcggccagttaaaagcgactagcacggccgccagactaaagacacgggtgtcaggctttctgggaaagggctctctaacaacccctgactcttcagagttgggaccgttggatcccacagaccacacttcccaacttacatggacggtcttgcctcaggggtttagggatagccctcatctgtttggtcaggctctggcccaagatctaggccacttctcaagtccaggcactctgatccttcaatatgtggatgatttacttttagctaccagtttggaagccttgtgccagaaagctactctagatctcttgaactttctagctaatcaagggtacaaggtgtctaggttgaaggcccagctttgcctacagcagcgagatagccaggcccctctatactctaatcaaggaaacccagagggcaaatactcatctagttgtatcggaaccagaggcagtaatcccttcgaaaccttaaagcaggccctagtacacgctccagctttaagccttcccataggacagaacttctctttatacatcacagagagagccgggatagctcttggagaccttactcagacttgtgggacaaccccacaaccagtggcatacttaagtaaggaaattgatgtagtagcaaaaggctggcctcactgtttaagagtagttgcagcagtggccatcttagtgtcagaggctatcaaaataatgcaaggaaaggatctcactgtctggactactcatgatgtaaatggcatactaggtgccaaaggaagtttatggctatcagacaaccacctactaagataccaggcactactccttgagggactggtgcttcaaatatgcacttgcgtggccctcaacactgccacttttctcccagaggatggggaaccaattgagcatgactgccaacaaattatagtccagacttacgccacccgagatgatctcttggaagtccccttaactaatcctgaccttaatctatataccgatggaagttcagttgtggagaatgggatacgaagggcaggttatgcaatagttagtgatgtaactatacttgaaagtaagcctcttgtcccagggacaagtgcccagttagcagaactagtggcacttacccgagccttagaactgggaaagggaaaaataataaatgtgtatacagatagcaagtatgcttatctaatcctacatgcccatgctgcaatatggaaagaatgggagttcttaacctctgggaacccccacggatgccacagggaagttatggagttattgcacatggtgcaggaaacaaaagaggtgggagtcttacactaccaaagccatcagaatgggaaggagaggggagaacagcagcgtaagcagctggcagaggcctcagctgccttcctctggggcagggctctggacttgcagcccaccatgcctgagcctcctatcccctccatgggctcctgtgcggcccgagcctccccaacgagtgccagccctgctccacggcgcccagtcccatcgaccacccaaaggctgaggagtgcaggtgcatggcacgggactggcaggcagctccacctgcagccccggtgctggatcaactgggtgaagccatctgggctcctgagtctggtggggcctcggagaacctttatgtctagctcagggattgtaaatacaccagttggcactctatctgtagctcaagagccactgtttgctgtgtacatggctgtgtccatggattgcggtgtcacagttgtgagacagatttccagggaatgcatatccatagtccagcttagcttacatgctcaatcttgtaccaagcaacgtggccagaagatgcaaatctctttggatagacccggaaactcctattttaactctgagcctgtatga

SEQ ID NO: 124247 - DNA, 197 bp, Homo sapiens; identical to SEQ ID NO: 121092

SEQ ID NO: 124248 - DNA, 259 bp, Homo sapiens
atggaatactatgcagccataaaaaagaatgagatcatgtcctttgcagggacatggatgaagctggaagccatcactctcagcaaactaacccaggaacagaaaaccaaacactgcatgttctcactcgcaacaaagagaatttgcagtgctttgaaaacagaaatccacatccacaggaaaaacaggcctccgccagccgcagaaaagggtgcttcaggcacagggcaaccaggcgagagaaaatgcattcagagcg

SEQ ID NO: 124249 - DNA, 295 bp, Homo sapiens
atggaatactatgcagccataaaaaggaatgagttcatgtccgttgcagggacgtggatgaagctggaagccatcactctcagcaaactaacacaggaacagaaaaccaaacactgcatgctctcactcgcaggcagatgggccagaggagcagagaggctgagaccaacccagaaaccaccacctctcacgccaaagctcacaccttcagcctccaacatgaaggtctccgcagcacttctgtggctgctgctcatagcagctgccttcagcccccaggggctcgctgggccag

SEQ ID NO: 124250 - DNA, 439 bp, Homo sapiens; identical to SEQ ID NO: 121095

SEQ ID NO: 124251 - DNA, 1527 bp, Homo sapiens
ggcaaatcataccccttcagggggccattcccacctgtatggaatccaattacctacttagatcataacaacttttggaggacaatggatgacatggggcgagagattccgagtgatgccccatggaaggctccccttgcagaagagtgggacaacatgacaatgaaggagctactggacaagctctgctggactgaatctgcaaagcagcttgccactctctttgtgaacctgtgtgtcactgcagagacccatgaggtctctgctctctggttcctgtggtatgtgaagcagtgtggaggcacaacaagaatcatctcgacaacaaatggaggacaggagaggaaatttgtgggcggatctggtcaagtgagtgagcggataatggacctccttggagaccgagtgaagctggagaggcctgtgatctacattgaccagacaagagaaaatgtccttgtggagaccctaaaccatgagatgtatgaggctaaatatgtgattagtgctattcctcctactctgggcatgaagattcacttcaatccccctctgccaatgatgagaaaccagatgatcactcgtgtgcctttgggttcagtcatcaagtgtatagtttattataaagagcctttctggaggaaaaaggattactgtggaaccatgattattgatggagaagaagctccagttgcctacacgttggatgataccaaacctgaaggcaactatgctgccataatgggatttatcctggcccacaaagccagaaaactggcacgtcttaccaaagaggaaaggttgaagaaactttgtgaactctatgccaaggttctgggttccctagaagctctggagccagtgcattatgaagaaaagaactggtgtgaggagcagtactctgggggctgctacacaacttatttcccccctgggatcctgactcaatatggaagggttctacgccagccagtggacaggatttactttgcaggcaccgagactgccacacactggagcggctacatggagggggctgtagaggccggggagagagcagcccgagagatcctgcatgccatggggaagattccagaggatgaaatctggcagtcagaaccagagtctgtgagggactgctgtgcagaaccctcatttccctcaatgccgatccgtgaaggatgtgatctgctgagtgctcaaaagcacccacctgatgccaaacgacgcttacattatcccaatactgtcttctgtctttacctaactggaaatttttaccatggattcatgtgtgggggtggggagaaggttgtcaaaacagcttttgaaagccccttcttctcccatcattctcagcaaactaacgcaggaacagaaaaccaaacactgcatgttctcactcataagtgggagttgaacaatgagaacacatggacacagggagaggaacatcacacaccagggcctgagggggcaagaggacggagagcattaggacaaatacctaatgcatgcagggcttaa

SEQ ID NO: 124252 - DNA, 389 bp, Homo sapiens; identical to SEQ ID NO: 121100

SEQ ID NO: 124253 - DNA, 298 bp, Homo sapiens
atggatgaagctggaaaccatcattcgcagcaaactcacacaggaacagaaaaccaagcactgcatgttctcactcataagtgggagttaaacaatgagaacacatggacacagggaggggaacatcacacaccagggcctgttggggaccagaacaaggaaaggcccacagagaaagccaagctgcatcaaggcaaattttctctacaaatgcagatctcctccataaaagatagctttttagatattctaacatttccagcttttccgaataaccatcttgaaatatgtcgaagaa

SEQ ID NO: 124254 - DNA, 512 bp, Homo sapiens
atggatgaagctggaagcaatcatcctcagcaaactgacccaggaacagaaaaccaaacactgtatgttctcactcataagtgggagttgaacaatgagaacacatggacacagggaggggaacacatagggcctgttgtggggtggaagggagagagtatagagacaaggaaagcactcaggtccaatccgtggggcactccaatacgtagacatcaggaagccacgaagggaccaacaccaccaccaccaccaccaccaccaccaccaccaatactaccactatccacactaccaccaacatcaccagcaaatgaccaggaaggagctatattagccagtaggagattggggtgttccagaagacaagagaagagaatgcatccatccacatggcccaaaggagaccaccttctcccagctcactcacctgatcacggtcatgccaatacgtgccaggtgttaagaggcaaagggcagccacaacttccagtcagaaaggccatgagcag

SEQ ID NO: 124255 - DNA, 1253 bp, Homo sapiens
tgaaaactaaggtacacagagattatgtcacttactcaagattacatcgccagtatgctgccgtgctggaattggaagccagagcccatcctcttaactaccccaccactctgcctcttcaagcagaaggcgagcgtttggaaaataagaagggatgcaaaggcaggtcttgccatggccagtcagatccttctaattctgcagcttccagctcagatattaccttctcggggaggataaagaaactaaggcacaggaagttcagtagattgtccaaggtcatgcagctgggccagcttcagcccgtgaaattccagcacagttcagcaaagcacagaccagacatggcgtcccacaccagtgagctggcagctgcttcctttgtaaccagacaggtgtttgtggctcagatgctgctaaggactgaattatgtccccccaaaattcatgttgaagcctcaacctccagtgcagctgtatttagtgatagggcctgtaaggaggtagttagattagacaagaattttaacatctccatggtggacaacttcagagggcaaggctggttatataccatggaatactatgcagccataaaaaagaatgagttcatgtcctttgcagggacatggatgaagctggaaaccatccttctcagcaaactaacacaggaacagaaaaccaaacactgcaggttctcactcatagcccctggcagccatcattctgcattctgcctttatgaatttgactcctctagggatttcctggattttgccgatttcggaaccaccatcaaacaggattttcgcctgctggggcaaaccagcgtggaccgcttgctgcaactctctcagggccaggcggtgaagggcaatcagctgttgcccgtctcactggtgaaaagaaaaaccaccctggcgcccaatacgcaaaccgcctctccccgcgcgttggccgattcattaatgcagctggcacgacaggtttcccgactggaaagcgggcaggattttgccgatttcggaaccaccatcaaacaggattttcgcctgctggggcaaaccagcgtggaccgcttgctgcaactctctcagggccaggcggtgaagggcaatcagctgttgcccgtctcactggtgaaaagaaaaaccaccctggcgcccaatacgcaaaccgcctctccccgcgcgttggccgattcattaatgcagctggcacgacaggtttcccgactggaaagcgggcagtga

SEQ ID NO: 124256 - DNA, 1563 bp, Homo sapiens
atggatgaagctggaaaccagcaaactaacataggaacagaaaaccaaacactgcatgttctcactcataagtgggagttgaagaatgagaacacagggacacagggaggggaacatcacacactggggcctgttggtggagagagagagagtgaaactgctgcccctgtaagggagagctggccctcttgcagtcggacaggagggagccagaaaccagcaagcataccagggagtgtggctgtaagtgtgggagtggcaggagtcatggagcaggagagggcagccaagacaaagggccttgatgaagggttaaaggtctattattcactagctgctgtatcaaaatctaaaagggttttccctgtattttttggtgataaaagctcatgggagttgaattcatcagtgtacacgctgaatgaactaatgtcagaggcaaagaaagcagttgcagaactggttggagtgactgatcctgattatcaagggaaaacctcactgctactacactgtggggaattggaaaaaactactttaaagttaatatggaaccaaaaaagagcctgcattgccaagacaaacctaagccaaaagaacaaagctggatgcatcacgctacccaacttcaaactatactacaaggctacagtaaccaaaacagcatggtactggtaccaaaacagagatatagacaaatggaacagaacagaggcctcagaaataacgccgcatatctacaactgtctgatctttgacaaacctgacaaaaacaagaaatggggaaaggattccctatttaataaatggtgctgggaaaactggctagccatatgtagaaagctgaaactggatctcttccttacaccttatccaaaaattaattcaagatggattaaagacttaaatgttagacctaaaaccataaaaaccctagaagaaaacctagacaataccatgcaggacataggcatggacaaggacttcatgactaaaacaccaaaagcaatggcaacaaaagccaaaattgacaaatgggatctacttaaactaaagagcttccgcacagcaaaagaaactaccatcagagtgaacaggcaacctacagaatgggagaaaacttttgcaatctacccatctgacaaagggctaatatccagaatctacaaagaactcaaacaaatttacaagagaaaagcaaacaaccccatcaaaaagtgggcaaaggatatgaacagacacttctccaaagaagatatctatgcagccaacagacacgtgaaaaaatgcccatcatcactggtcatcagagaaatgcaaatcaaaaccacaaatggattggaggggatccagacagattcctgggaacctactatagtcatctttgaggaagatattgagagtatgatccagggtggtggactacagatcctgggagcggtcctgacacctgtatgtgaaggccatgcctgctaccgagaagcctgcagtgagagtccgagcagcagctccgcttctttagagttacatgatccaggccaggaagccccatctttcctctaa

SEQ ID NO: 124257 - DNA, 2253 bp, Homo sapiens
atgataggatcaaaaatcaatgaaattgaacataaaaaacaacagagaaaaatcaaagaagcgaagacccggttctttgtaaagatcaataacaaatctctagcaagacaaagaaaaaacagagaagacaatataagaactgaaataagggacatggatgaagctggaaaccatcattctcagcaaactaacacaggaacagaaaaccaaacactgcatgttctcactcataagtgggagttgaacaatgagaacccatggacacagggaagggaacatcacacactggggcctgtgaggggggggagagatgcaggtgaagcagggagaattctgacagtgacagcctgggaactggcgagaacgatcggacaaatggaggggaaaaatctgaccagcatctcagaatgtttcctcctggggttctctgagcagctggaggagcagaagcccctctttgggtccttcctgttcatgtacttggtcacggtggcaggcaacctcctcatcattctagtcatcattactgacactcaactccatacccccatgtacttctttctagccaacctctcccttgcagatgcctgctttgtgtccaccacagtccctaagatgctggcaaacatacagatccagagtcaggccatctcctactcagggtgtctactacagttgtattttttcatgttatttgtgatgctggaggcattcctcttggcggtcatggcctatgactgctacgtggccatatgccacccacttcattacattctgatcatgagccctgggctctgcatcttcctcgtgtctgcatcctggatcatgaatgccctccactcccttctacacacacttctgatgaacagcctgtccttctgcgcaaaccatgagatcccacacttcttctgtgacatcaatcccctcctgagtctgtcctgcacagaccccttcaccaatgagctggtgatcttcatcactgggggtctcacaggactcatttgtgtgctttgcctgattatctcttacacgaacgttttctcgaccatcctgaagatcccatcagctcaggggaagcggaaagccttttccacctgcagctctcatctctccgtggtctctctcttctttgggacttctttttgtgttgatttcagttctccctcaacccactcggcccagaaggacacagttgcatcagtgatgtacacagtgatggtaattgctgtagataatagcaattctagctcaccagctccctattcaccttatctgaagcccagacacgatcgtctgataataaaagattccatattcatggattcaaccaaccatgggtcaaaaatacagtatctgtgggatatggaacccacaaataaaaagggctggctttttgtatccacaggttccacagacaaactgcaggacttgagcatccataggtttggggatgtgcagggggtcgtggaatcaattccccaggctgtagatgaaggggttcagcatgtgggtcaccccagtgtacatcacagccatgacagtgtccttcacagtgttatgattcgtcaatgggcacaagtagagaccaataattgtcccatagaagagagacaccacagagaggtgggggccacaggtggagaaagccttctggatgcccccagtggaagggaccctgaggatggccagcttcaacaaggtagatgtatcacagaaaaagtgaggaatcacattctcagcacaaaaggacagcctggccataagcaaggtgtgcaacgtggcatgggcagtggtcaacagccaggagagtgtcagcagaccaaggcaacacttggggctcatgatagtggtgtagtgcagaggaaagcaaatagccacatagcagtgataagccatgaccacaaggaggaagctctccagaactccataaaacagatgaaagtacatctgagccaggcagtccgcaaaggggatggatgggttttggctctgcatgttctgcagcaatttgggcattgtgaccgaggaaaagcagaggtcagagaaggacaagttgctgagacacaaatacataggcatgtggaggtgggagtccagtcgaatgaggacaatgacgaggaggttccccaggagggtggtaagatacacggccaagaacaaggcatagaacagattccgctgctcaggttggatggaaggcccaggagcaggaactctgagatcatggtttggttcttcttcatcattctgtga

SEQ ID NO: 124258 - DNA, 892 bp, Homo sapiens
atgcttaccagcaggtccattgtccaccaggaacggaatttttccccggtggggtacatattcccaaagaccctttgggcacaggaacttaaaaacgcagagaattctggccagaaaaaaagtattcgctggttatccagatcagaagggacggtggcctggccggacttagaggaaactctggggcacaaggaggtgatgcctgtcacttgtgacatggtgtgcagccgccagagccgccctccagggcacagggtgggcccggcaagagtgaaactccgtcagaaggaggatgaggagaaagaggaggaggatgaggaggaggaggagaagaagaaggagaagaaggagaaaatttggacatgtactacaatatggatgaacttggaagacattatgggcaaaatatatagaaaaatgggcaaaagacatgaacggccacctcacattaaaagcaacaccagtgtcctcatcgtgaaactagacgcccgatcttatcctcgaagcaatgaatctcaacaggaactggtgctccgcaggatggcaggacgcggagacgtggtgctgtcaggctgggacatggatgaagttggaaaccatcgttctcagcaaactaacacaagaacagaaaatcaaacactgcatgttctcactcataagtgggagctgaacaatgagaacacatggacacagggaggagaacatcacataccggggcctgtcaggggtgagtgggtaaaaagagaatttgtggcaattcttaaaaacttgaccaccacaggaagacaatttggaggcattttggctgcacacagtatagccactacactgaaatactggtaccatggctcaccacctggggagattgtatctttaggaatattgagtgaag

SEQ ID NO: 124259 - DNA, 614 bp, Homo sapiens
atgcagaaccaggagaagtttggagagctcatctctgagtgggcaccctatgggagaccaagacctcagatagctgtgggggaccatcatatctcagtttatgatggggaggtcaactggaggatgtctagtctgcaggcctcagcagctgggaaggattatgctaatcggggaactgagtggggagaggagcctagccagatgctacgtcatgagctgctcagtggagagatgtgcgtgtcaaggaaccgagggcagcctctggccaacagcgagagaagatctgaggccctcagtcccgtaaccccaaagaaactaattcctgccgacggccacaagagtgatccaggaaggacatggatgaagctggaaaccatcattctcagcaaactaacccaggaacagaaaaccaaacaccacatgttctcactcataagtgggagttgaacaatgagaacacatggacacagggaggggaacgtcacacaccagggcctgtcgggggtgggaggcctagcaattcattagaattacctgtgaagcttttaaaatgtaaggtttggatggaatgctcagaccctaccttagacccaattaagcccacagctttgagg

SEQ ID NO: 124260 - DNA, 784 bp, Homo sapiens
atataataataataaataaataaataaataattaaaaaaatttaaaaacaaccctctttaaaaaaaaaaaaaagaaataccatttgatccagcaataccattactgggtatataccccaaaggattataaatcactctactgtaaagacacatgccacaccgtatgtttattgccaggactatttacaatagcaaaaacttgggacccaaccccaaatgcccaagcaatgatagactggaaatgaagaacatgtggcacatacacacccatggaatactatgcagcccataaaaaaggatgagttcatgtccctttgcagggacatggatgaagctggaaacccatcatcctcagcaaactaacacaggaaccagaaaaccaaacactgcatgtccctcactcataagtgggagttgaacaatgagaacacatggacacagggatggggaacatcacacaccggggcctgttggcgggtcccactttgctccattttgggttgtgggttttgattctacctttcaccctagaggcattcctcaaatggctggtgatccttgcctgtctgcacatattgaagagggggacaataagctgactggaagcaaccggctcataggagtaggatttgttgactctggcattcctgaaactgctgcttccctggagacccccaatatcagctgccaaattttgcacagaatcttctcatctcctggctggaagcataagcctggctaccagcattcagacagccaagtaggggaaagtgctaagcattaa

SEQ ID NO: 124261 - DNA, 1865 bp, Homo sapiens
acatctacaaccatctgatctttgacaaacctgacaaaaacaagcaatgggggaaaggattccctatttaataaatggtgctgggaaaactggctagccatatgtagaaaactgaaactggaccccttccttacaccttatacaaaaattaactcaagatggattaaagacttaaacgtaagacctaaaaccataaaaaccctggaagaaaacctaggcaataccattcaggacataggcatgggcaaagacttcatgactaaaacaccagaagcaatggcaacaaaagccaaaattgacaaatgggatctaatccaactaaagagcttctgcacagcaaatgaaactgtcatcagagtgaacaggcaacctacagaatgggagaaaatttttgcaatcatctacccatctgacaaaggtctaatatccaaaatctacaaggaactttatgagaaaaaaacaaacaacctcatcaaaaagtgggcaaaggatatgaacagacacttctcaaaggaagacttttatgaggccaaaaaacatgaaaaaagctcatcattgctgggtcagggcgttacaaagggaggctgctgtcttcccatgaatctattagggacctacaggagcgaagagaacccttctgagtatcagcgaagacagcttattaagactttacgagtttgcaagccatcctcgtcctatttcctcacttcggactttttggacacaccttccttttcctgtgagccaacccaaacgaatgagttacaaggttgctccctgcgcttccgagtggcgactgcagcgggtccggtgcaggtgaggggcgcgcgcctgcccagctttgcagcccccgaacgcggcctcgcacagatacccagacaaatggattctaaaatttgaatagaagagcaaagaaaataggaaccaatttgaaggactacaaggtggactgcttgctcagctcagtatcaacacttatggagtcattgcagttttcagtagaggtgtacttctgagaagaggcttcttgggtcttcatgcagccatggatctggataaaccatctgtttggggctcattaaaacagcggaccatgccattgttgatcaacttgagcaagaagaaggtgaaaaagaacccaagtaagcccccagatctacgggcaaggcatcacttggaccgccgtctcagactctctgtgcctgatcacctggaggatgaggccttggccccagagggccggccttactccgggccacagtcttcctacacctcggtgcccagcagtctgtccactgcagggatctttcccaagagcagcagtagctccttgaaacagtctgaagaagaattggattggagccaggaagaagcccgtcaccttccttgggggggaaccaaactcaaagaaggcctatgcctctcctgctgaccggagacgggtgtccagcaacggcatctttgatcttcagaaaacttcccttggaggggatgcaccagaagagccagagcaactcatgatcataagagccttactttttgaaggaattcctgcattgtgtgtcctggtgggacactgtgacttgggtgtctcccaaagcaggagagcaggtactcttgaaagtcatggtgtggaggagtgggaaggtgatgaaggtttggctgctggggctcagcgagctacaggtggtgctggcattagagattttatgattgaggtgtactgttttgaaaatagaatctcagatcccctggagctgggtcatgacaaaactggaccaattatccagcgtgaatttaatgcagtcccagatccagatgttagcagtggatctcagaaggaaagagaaagagatgacctctag

SEQ ID NO: 124262 - DNA, 1449 bp, Homo sapiens
atgctccaggccgacgccgtagactctgccagccagcgggcggccccggcgcctggccaggctcggctgttccgggctcggtgtccccagccccagacgcccggagccccatctccggcccctcgcgcgcactccgcagacacttacggcccagcgccgccggcggtccgggactcgaaatcccgacccacgaccctcaccttcctggggttgattacaaggaaggcagaccccgccagtggcaaggcgggacggggaggacccctcaggaaaagggagcccctccgcgagcggcgcaagggctctcggagtcccagctgcagccgccaccccgcgtgcgtcaactttgtagcaattcaacagcacatcttaccaaattactttgggcttcatttttggtgctttaaaacaaagaagaagaagaagaagaagaagaaaaccatgcaaagagagggcaaatcgtttcatattcacagatgggcttcaccgctctgtataagcggtgatgagtgggtcttagcaaagcgcctggcccggtctctcgccatgcagcagtcgcatcataagcatggctgtgatttgttccttcaacaacacacgcggatgggacgcctgctgtatgccaagcacaccatgggggacagggcccaaagatggcaatattgtgaggtggtggttggatttccagccatcctgcaagccaataacaggcagctgaaaacatcaccagatgtggaaccagaacagcaaagacaaagtcagtgctggatcgagacatggaggaaggaagagaattacagagaaacaaagtttgcattaaggacacagtatactcaaggaccatctcccctggaagcttcacaaccaacctttgagagctgcgcttccagccccgggccatggcggcaaagcgcccttgtcatcggcacccacgtcctgatatctgcagagaacatcctgtccctgggcagggagccccagtgtcccccaatagttatgaggacctccatggcaggggaagagggagacggaggagtcccactggctcttaactgcctcaacccagaagtgacactcatcacctctattcacagcccattggccagagccagtcacatgacccaacccgacctccagagaagctgggaaatgcagaacagcccccgagtgtggttggcagtgcccattggcaccatgtccaggaagaggccatataagaatgtgcttgcttctcccccactttctgccatgaaatctttctatatcatcattctgcaagttgtatgcaccatcatcatcatcatcatcatcctcatccatcgctatcacttacgagcacccattctatatacatgcaccaggacatgtgaaatcaatgctcaggttgccctggttcaccaagtacctccaaatcaaaagctggcttcagtccgctgccgacctttctga

SEQ ID NO: 124263 - DNA, 513 bp, Homo sapiens
atggagggtgtccacagaaaaccttccttcctggccctcccaggtcacctggtgaaatcagaagagacagtcatcctgcaatgttggtcggatgtcatgtttgagcacttccttctgcacagagagggaacctacagatgctacggttctgttcctcactccccctatcagttgtcagctcccagtgaccctctggacatggtgatcataggtctatatgagaaaccttctctctcagcccagccgggccccacggttcaggcaggagagaatgtgaccttgtcctgcagctcccggagctcctatgacatgtaccatctatccagggaaggggaggcccatgaacgtaggctccctgcagtgcgcagcatcaacggaacattccaggccgactttcctctgggccctgccacccacggagggacctacagatgcttcggctctttccgtgacgctccctacgagtggtcaaactcgagtgatccactgcttgtttctgtcacaggaaactaa

SEQ ID NO: 124264 - DNA, 327 bp, Homo sapiens
tcaccctcccatgatgtagtcaacatgtaagctgcatgggcagggcgcaaataacatcctgtgcgctgctgagctgagctggggcgcggccgcctgttgcaccggcagcaccatgtcgctcatggtcgtcagcatggcgtgtgttgtgagtccttgtcctgcagctcccggagctcctatgacatctaccatcatcagttctctctgtttcacggccagggtagacagcacggccaagctcctgggttcatgatgctcacattgccacgtcccgccaccctccagccttctagccccgctgtccgtcattccacactctacgtccat

SEQ ID NO: 124265 - DNA, 957 bp, Homo sapiens
atgtggtcaacatgtaaactgcatgggcagggcgccaaatacatcctgtgcgctgctgagctgagctggggcgcggcctcctgtctgcacggcagcaccatgtcgctcacggtcgtcagcatggcgtgcgttgggggcctggccactcatgggtggtcaggacaaaccctcctgtctgcccggcccagcactgtggtgcctcgaggaggacacgtggctttcagtgtcactatcgtcgtgggtttaacaatttcatgctgtacaaagagacagaagccacgttcccatcttccacggcagaatattccaggagagctcatcatgggccctgtgaccccagcacatgcagggacctacagatgtcgggttcacgcccacactccctcactgggtggtcggcacccagcaaccccctgtgatcatggtcacaggaaaccacagaaaaccttcctcctggcccacccagggcccctgctgaaatcaggagagacagtcatccgcaatgttgttgtcagctccagtgaccccctggacatcgtgatcacaggtgggaaaacccgtgtctgtcccatgtcttatgatcctagagccatagctgagagcttcctgccgatgatggggagaagcatggacagatgcagagagaaccgaagactgggtgaaacccttcaagtagttggccttcacccacagaaccagctccaaatctggtatctgcagaacctgcatgttctgattgggacctcagtggtcatcttcctcttcatcctctcctcttctttctcctttatcgctggtgctccaacaaaaagagactctgatgaacaagaccctcaggaggtgacgtacgcacagttgatcactgcgttttcatacagagaaaaatcagtcgcccttctcagaggccaagacacccctaacagataccagcgtgtacacggaacttccaaatgctag

SEQ ID NO: 124266 - DNA, 637 bp, Homo sapiens
atgggcctggaggtggagttacgggcctgcagtagagatatgggcctgaagtggagacatgggcctggagtggagatatgggccaggagtggagatatgggcctagaggtcgatatctgggcctggagtggagatatgggccaggagtggagatatgggcctagaggtcgatatctgggcctggagaggagatatgtgcctaggatggagatacgggcctgggtgtggagatatgggactggagaggatatatgggcctggagtggagatatgggactggagaggagatatggacctggagtggagataagggcctggattggagatatgggcccagggtggagatctgagcctggattggagatatgggcctggattggcgatatgggcttagggtggaaatatcggcctggagtggagatatgggcctggagtggagatatgggcttgagagaggggatgtttaacgacactttgcgcctcattggagaacaccatgatggggtctccaaggccaacttctccatcagtcgcatgaagcaagacctggcagggacctacagatgctacggttctgttactcactccccctatcagttgtcagctcccagtgaccctctggacatcgtgatcatag

SEQ ID NO: 124267 - DNA, 1317 bp, Homo sapiens
atgtcgctcacggtcgtcagcatggcgtgcgttgggttcttcttgctgcagggggcctggccactcatgggtggtcaggacaaacccttcctgtctgcccggcccagcactgtggtcgctcgaggaggacacgtggctcttcagtgtcactatcgtcgtgggtttaacaatttcatgctgtacaaagaagacagaagccacgttcccatcttccacggcagaatattccaggagagcttcatcatgggccctgtgaccccagcacatgcagggacctacagatgtcggggttcacgcccacactccctcactgggtggtcggcacccagcaaccccgtggtgatcatggtcacaggaaaccacagaaaaccttccctcctggcccacccagggcccctgctgaaatcaggagagacagtcatcctgcaatgttggtcagatgtcatgtttgagcacttctttctgcacagagaggggatctctgaggacccctcacacctcgttggacagatccatgatggggtctccaaggccaacttctccatcggtcccttgatgcctgtccttgcaggaacctacagatgttatggttctgttcctcactccccctatcagttgtcagctcccagtgaccccctggacatcgtgatcacaggtctatatgagaaaccttctctctcagcccagccgggccccacggttcaggcaggagagaacgtgaccttgtcctgtagctcctggagctcctatgacatctaccatctgtccagggaaggggaggcccatgaacgtaggctccgtgcagtgcccaaggtcaacagaacattccaggcagactttcctctgggccctgccacccacggagggacctacagatgcttcggctctttccgtgccctgccctgcgtgtggtcaaactcaagtgacccactgcttgtttctgtcacaggtatctgcagacacctgcatgttctgattgggacctcagtggtcatcttcctcttcatcctcctcctcttctttctcctttatcgctggtgctccaacaaaaagaatgctgctgtaatggaccaagagcctgcgggggacagaacagtgaataggcaggactctgatgaacaagaccctcaggaggtgacgtacgcacagttggatcactgcgttttcatacagagaaaaatcagtcgcccttctcagaggcccaagacacccctaacagataccagcgtgtacacggaacttccaaatgctgagcccagatccaaagttgtctcctgcccacgagcaccacagtcaggtcttgagggggttttctag

SEQ ID NO: 124268 - DNA, 1011 bp, Homo sapiens
atgtcgctcatggtcgtcagcatggcgtgtgttggtggtcaggacaagcccttcctctctgcctggcccagccctgtggtgtctgaaggagaacatgtggctcttcagtgtcgctctcgtcttgggtttaacgaattcagtctgtccaaagaagacgggatgcctgtccctgagctctacaacagagtattccgaaacaccgttttcataggccctgtgaccccagcacatgcagggacctacagatgtcggggttcacacccacacttcctcactgggtggtcagcacccagcaaccccctggtgatcatggtcacaggtcccctggtgaaatcagaagagacagtcatcctgcaatgttggtcagatgtcatgtttgagcacttccttctgcacagagaggggaagtttaatgacactttgcgcctcactggagagctccatgatggggtctccaaggccaacttctccatcggtcgcatgacgcaagaccttgcagggacctacagatgctacggttctgttcctcattccccctatcagttgtcagctcccagtgaccctctggacatcgtgattacaggtctatgtgggaaaccttctctctcagcccagccgcgccccatggttaaggcaggagagagcgtgaccttgtcctgcagctcccggagctcctatgacatctaccatctatcaagggacggggaggctcatgaacttaggttccctgcagtgcccaaggtcaatggaaccttccaggccaactttcctctgggccctgccacccacggagggacctacagatgcttcggctctttccgtgactctccctacgagtggtcagaccttagtgacccactgcttgtttctgtcacagctaaacagagtggaagttggacactgagttttggcgtacagcaaaatcctaagtccattgttgggttgaacacggccatgttgtacatcctggtttcacagcagacactggaggaaaacagcctgtattcataa

SEQ ID NO: 124269 - DNA, 1105 bp, Homo sapiens
gtggtcaggacaagcccttgctgtctgcctggcccagccttgtggtgcctctaggacatgtcattcttcggtgtcactcttatcttgggtttaacaacttcagtctgtacaaggaaggagtccacagaaaaccttccctcctggcccacccaggtcgcctggtgaaatcagaagagacagtcatcctgcaatgttggtcagatgtcaggtttgagcacttccttctgcacagagaagggaagtttaaggacactttgcacctcattggagagcaccatgatggggtctccaaagccaacttctccatcggtcccatgatgcaagaccttgcagggacctacagatgctacggttctgttactcactccccctatcagttgtcagctcccagtgaccctctggacatcgtcatcacaggtctatatgagaaaccttctctctcagcccagccgggccccacggttttggcaggagagagcgtgaccttgtcctgcagctcccggagctcctatgacatgtaccatctatccagggagggggaggcccatgaacgtaggttctctgcagggcccaaggtcaacggaacattccaggccgactttcctctgggccctgccacccacggaggaacctacagatgcttcggctctttccgtgactctccctatgagtggtcaaactcgagtgacccactgcttgtttctgtcacaggtaactccagatacctgcacgctctgattgggacctcagtggtcatcatcccctttgctatcctcctcttctttctccttcatcgctggtgtgccaacaaaaaaaatgctgctgtaatggaccaagagcctgcagggaacagaacagtgaacagcgaggattctgatgaacaagaccatcaggaggtgtcatacgcataattggatcactgtgttttcacacagagagaaatcactcgcccttctgagaggcccaagacacccccaacagataccagcatgtacatagaacttccaaatgctgagcccagatccaaagttgtcttctgtccacgagcaccacagtcaggccttgaggggatcttctagggagacaacagccctgtctcaaaacc

SEQ ID NO: 124270 - DNA, 1743 bp, Homo sapiens
ccggcagcaccatgtcgctcacggtcgtcagcatggcgtgcgttgggttcttcttgctgcagggggcctggccactcatgggtggtcaggacaaacccttcctgtctgcccggcccagcactgtggtgcctcgaggaggacacgtggctcttcagtgtcactatcgtcgtgggtttaacaatttcatgctgtacaaagaagacagaagccacgttcccatcttccacggcagaatattccaggagagcttcatcatgggccctgtgaccccagcacatgcagggacctacagatgtcggggttcacgcccacactccctcactgggtggtcggcacccagcaaccccgtggtgatcatggtcacaggaaaccacagaaaaccttccctcctggcccacccagggcccctgctgaaatcaggagagacagtcatcctgcaatgttggtcagatgtcatgtttgagcacttctttctgcacagagaggggatctctgaggacccctcacgcctcgttggacagatccatgatggggtctccaaggccaacttctccatcggtcccttgatgcctgtccttgcaggaacctacagatgttatggttctgttcctcactccccctatcagttgtcagctcccagtgaccccctggacatcgtgatcacaggtctatatgagaaaccttctctctcagcccagccgggccccacggttcaggcaggagagaacgtgaccttgtcctgtagctcctggagctcctatgacatctaccatctgtccagggaaggggaggcccatgaacgtaggctccgtgcagtgcccaaggtcaacagaacattccaggcagactttcctctgggccctgccacccacggagggacctacagatgcttcggctctttccgtgccctgccctgcgtgtggtcaaactcaagtgacccactgcttgtttctgtcacaggaaacccttcaagtagttggccttcacccacagaaccaagctccaaatctggtatctgcagacacctgcatgttctgattgggacctcagtggtcatcttcctcttcatcctcctcctcttctttctcctttatcgctggtgctccaacaaaaagaatgctgctgtaatggaccaagagcctgcgggggacagaacagtgaataggcaggactctgatgaacaagaccctcaggaggtgacgtacgcacagttggatcactgcgttttcatacagagaaaaatcagtcgcccttctcagaggcccaagacacccctaacagataccagcgtgtacacggaacttccaaatgctgagcccagatccaaagttgtctcctgcccacgagcaccacagtcaggtcttgagggggttttctagggagacaacagccctgtctcaaaaccaggttgccagatccaatgaaccagcagctggaatctgaaggcatcagtctgcatcttaggggatcgctcttcctcacaccacgaatctgaacatgcctctctcttgcttacaaatgcctaaggtcgccactgcctgctgcagagaaaacacactcctttgcttagcccacaagtatctatttcacttgacccctgcccacctctccaacctaactggcttacttcctagtcctacttgaggctgcaatcacactgaggaactcacaattccaaacatacaagaggctccctcttaacacggcacttacacacttgctgttccaccttccctcatgctg

SEQ ID NO: 124271 - DNA, 2332 bp, Homo sapiens
tcaaggcctgactgtggtgtcatgggcaggagacaactttggatcagggctcagcatttggaagttccgtgtacacgctggtatctgttgggggtgtcttgggcctctgagaagggcgactgatttttctctgtgtgaaaacgcagtgatccaactgtgcgtacgtcacctcctcagggtcttgttcatcagagtctttttttgttggagcaccagcgatgaaggagaaagaagaggaggaggatgaagaggatgatgaccactgaggtcccaatcagaacatgcaggtgtctggggttactttggcatgctgagacggtcggatcacttgaggttgggagtttcaagtagcgggtagcattcgacgcaggaagcggcttagccatgatagcgagtcgagctcgtacgcggggatgctctagagtccgggggtcccctcccatgatgtggtcaacatgtaaactgcatgggcagggcgccaaaaacatcctgtgcgctgctgagctgagctcggtcgcggctgcctgtctgcccggcagcaccatgtcgctcttggtcgtcagcatggcgtgtgttgggttcttcttggtccagagggccggtccacacgtgggtggtcaggacaagcccttcctgtctgcctggcccagcgctgtggtgcctcgaggaggacacgtgactcttcggtgtcactatcgtcataggtttaacaatttcatgctatacaaagaagacagaatccacgttcccatcttccatggcagattattccaggagagcttcaacatgagccctgtgaccacagcacatgcagggaactacacatgtcggggttcacacccacactcccccactgggtggtcggcacccagcaaccccgtggtgatcatggtcacaggaaaccacagaaaaccttccctcctggcccacccaggtcccctggtgaaatcaggagagagagtcatcctgcaatgttggtcagatatcatgtttgagcacttctttctgcacaaagaggggatctctaaggacccctcacgcctcgttggacagatccatgatggggtctccaaggccaatttctccatcggtcccatgatgcttgcccttgcagggacctacagatgctacggttctgttactcacaccccctatcagttgtcagctcccagtgatcccctggacatcgtggtcacaggtccatatgagaaaccttctctctcagcccagccgggccccaaggttcaggcaggagagagcgtgaccttgtcctgcagctcccggagctcctatgacatgtaccatctatccagggagcggggagcccatgaacgtaggctccctgcagtgcgcaaggtcaacagaacattccaggcagatttccctctgggccctgccacccacggagggacctacagatgcttcggctctttccgtcactctccctacgagtggtcagacccgagtgacccactgcttgtttctgtcacaggaaaccccagacacctgcacattctgattgggacctcagtggtcatcatcctcttcatcctcctcctcttctttctccttcatctctggtgctccaacaaaaaaaatgctgctgtaatggaccaagagcctgcagggaacagaacagccaacagcgaggactctgatgaacaagaccctgaggaggtgacatacgcacagttggatcactgcgttttcacacagagaaaaatcactcgcccttctcagaggcccaagacaccccctacagataccatcttgtacacggaacttccaaatgctaagcccagatccaaagttgtctcctgcccatgagcaccacagtcaggccttgaggacgtcttctagggagacaacagccctgtctcaaaaccgagttgccagctcccatgtaccagcagctggaatctgaaggcgtgagtcttcatcttagggcatcgctcctcctcacgccacaaatctggtgcctctctcttgcttacaaatgtctaggtccccactgcctgctggaaagaaaacacactcctttgcttagcccacagttctccatttcacttgacccctgcccacctctccaacctaactggcttacttcctagtctacttgaggctgcaatcacactgaggaactcacaattccaaacatacaagaggctccctcttgacgtggcacttacccacgtgctgttccaccttccctcatgctgtttcacctttcttcggactattttccagccttctgtcagcagtgaaacttataaaattttttgtgatttcaatgtagctgtctcctcttcaaataaacatgtctgccctccaa

SEQ ID NO: 124272 - DNA, 1863 bp, Homo sapiens
atgggcctggagtggagatatgggcctggaggtgcagatatggacctggagtggagatatggccctggagtggagatgtgggtctggagtggagatatgggcctggaggtggagataagggcctggagtggagatatgggcctggagtggagatatgagcctggagatggagatatgggcctggagtggagatatgggcctggaggtggtcaggacaagcccttgctttctacctggcccagccttgtggtgcctccagaacatgtgactcttcggtgtcactctaatcttgggtttaacaacttcagtctgtacaaggatgatggggtgcctgtccctgagctctacaacagaatattctggaaaagccttttcatgggccctgtgaccccgtcacacacagggacctatagatgccggggttcacacacacactcccccagtggggggtcggcacccagcaaccccctggtgatcgtggtcacaggattccgcagaaaaccttccctcctggcccacccaggtcccctggtgaaatcagaagagacagtcatcctgcaatgttggtcagatgtcatgtttgagcacttccttctgcacagagaggggacgtttaaccacactttgcgcctcattggagagcacattgatggggtctccaagggcaacttctccatcggtcgcatgacacaagacctggcagggacctacagatgctacggttctgttactcactccccctatcagttgtcagcgcccagtgaccctctggacatcgtgatcacaggtctatatgagaaaccttctctctcagcccagccgggccccacggttctggcaggagagagcgtgaccttgtcctgcagctcccggagctcctatgacatgtaccatctatccagggaaggggaggcccatgaacgtaggctccctgcagggcccaaggtcaacagaacattccaggccgactttcctctggaccctgccacccacggagggacctacagatgcttcggctctttccgtgactctccatacgagtggtcaaagtcaagtgacccactgcttgtttctgtcacaggaaactcttcaaatagttggccttcacccactgaaccaagctccgaaaccggtaaccccagacacctacacgttctgattgggacctcagtggtcaaactccctttcaccatcctcctcttctttctccttcatcgctggtgctccaacaaaaaaaatgcatctgtaatggaccaagggcctgcggggaacagaacagtgaacagggaggattctgatgaacaggaccatcaggaggtgtcatacgcataattggatcactgtgttttcacacagagaaaaatcactcccccttctcagaggcccaagacacccccaacagatagcagcatgtacatagaacttccaaatgctgagtccagatccaaagctgtcttctgtccacgagcaccacagtcaggccttgaggggatcttctagggagacaacagccctgtctcaaaaccgggttgccagctcccatgtacctgcggctggaatctgaaggcatcagtcttcatcttaggggatcgctcttcctcaaaccacgaatctgaacatgcctctctcctgcttacaaatgtctaaggtccccactgcctgctggagagaaaacacactcctttgcttagcccacaattctccatttcacttgacccctgcccacctctccaacctaactggcttacttcctggtctacttgaggctgcaatcacactgaggaactcacaattccaaacatacaagaggctccctcttaacacagcacttagacacgtgctgttccaccttccctcatgctg

SEQ ID NO: 124273 - DNA, 1960 bp, Homo sapiens
tcaccctcccatgatgtggtcaacatgtaaactgctgggcagggcgccaaataacatcctgtgcgctgctgagctgagctggggcgcagccgcctgtctgcaccggcagcaccatgtcgctcatggtcgtcagcatggcgtgtgttgggttgttcttggtccagagggccggtccacacatgggtggtcaggacaaacccttcctgtctgcctggcccagcgctgtggtgcctcgaggaggacacgtgactcttcggtgtcactatcgtcataggtttaacaatttcatgctatacaaagaagacagaatccacattcccatcttccatggcagaatattccaggagagcttcaacatgagccctgtgaccacagcacatgcagggaactacacatgtcggggttcacacccacactcccccactgggtggtcggcacccagcaaccccgtggtgatcatggtcacaggaaaccacagaaaaccttccctcctggcccacccaggtcccctggtgaaatcaggagagagagtcatcctgcaatgttggtcagatatcatgtttgagcacttctttctgcacaaagaggggatctctaaggacccctcacgcctcgttggacagatccatgatggggtctccaaggccaatttctccatcggtcccatgatgcttgcccttgcagggacctacagatgctacggttctgttactcacaccccctatcagttgtcagctcccagtgatcccctggacatcgtggtcacaggtccatatgagaaaccttctctctcagcccagccgggccccaaggttcaggcaggagagagcgtgaccttgtcctgtagctcccggagctcctatgacatgtaccatctatccagggaggggggagcccatgaacgtaggctccctgcagtgcgcaaggtcaacagaacattccaggcagatttccctctgggccctgccacccacggagggacctacagatgcttcggctctttccgtcactctccctacgagtggtcagacccgagtgacccactgcttgtttctgtcacaggaaacccttcaagtagttggccttcacccacagaaccaagctccaaatctggtaaccccagacacctgcacattctgattgggacctcagtggtcatcatcctcttcatcctcctcctcttctttctccttcatctctggtgctccaacaaaaaaaaatgctgctgtaatggaccaagagcctgcagggaacagaacagccaacagcgaggactctgatgaacaagaccctgaggaggtgacatacgcacagttggatcactgcgttttcacacagagaaaaatcactcggcccttctcagaggcccaagacacccccaacagataccagcatgtacatagaacttccaaatgctgagcccagatccaaagttgtcttctgtccacgagcaccacagtcaggccttgaggggatcttctagggagacaacagccctgtctcaaaaccgagttgccagctcccatgtaccagcagctggaatctgaaggcgtgagtcttcatcttagggcatcgctcctcctcacgccacaaatctgaatgtgcctctcacttgcttacaaatgtctaaggtccccactgcctgctggagaaaaaacacactcctttgcttagcccacagttctccatttcacttgacccctgcccacctctccaacctaactggcttacttcctagtctacttgaggctgcaatcacactgaggaactcacaattccacacatacaagaggctccgtcttaacgcagcacttagacacgtgctggttccaccttccctcatgctgtttcacctttcttcggactattttccagccttctgtcagcagtgaaacttataaaattttttgtgatttcaatgtagctgtctcctcttcaaataaacatgtctgccctccaa

SEQ ID NO: 124274 - DNA, 1596 bp, Homo sapiens
ctgtgtgctgctgagctgagctggggcgcggccgcctgtctgcaccggcagcaccatgtcgctcatggtcatcatcatggcgtgtgttgggttcttcttgctgcagggggcctggccacaggagggagtccacagaaaaccttccttcctggccctcccaggtcacctggtgaaatcagaagagacagtcatcctgcaatgttggtcggatgtcatgtttgagcacttccttctgcacagagaggggaagtttaacaacactttgcacctcattggagagcaccatgatggggtttccaaggccaacttctccattggtcccatgatgcctgtccttgcaggaacctacagatgctacggttctgttcctcactccccctatcagttgtcagctcccagtgaccctctggacatggtgatcataggtctatatgagaaaccttctctctcagcccagccgggccccacggttcaggcaggagagaatgtgaccttgtcctgcagctcccggagctcctatgacatgtaccatctatccagggaaggggaggcccatgaacgtaggctccctgcagtgcgcagcatcaacggaacattccaggccgactttcctctgggccctgccacccacggagggacctacagatgcttcggctctttccgtgacgctccctacgagtggtcaaactcgagtgatccactgcttgtttccgtcacaggaaacccttcaaatagttggccttcacccactgaaccaagctccaaaaccggtaaccccagacacctacatgttctgattgggacctcagtggtcaaaatccctttcaccatcctcctcttctttctccttcatcgctggtgctccgacaaaaaaaatgctgctgtaatggaccaagagcctgcagggaacagaacagtgaacagcgaggattctgatgaacaagaccatcaggaggtgtcatacgcataattggatcactgtgttttcacacagagaaaaatcactcgcccttctgagaggcccaagacacccccaacagataccagcatgtacatagaacttccaaatgctgagcccagatccaaagttgtcttctgtccacgagcaccacagtcaggccttgaggggatcttctagggagacaacagccctgtctcaaaaccgggttgccagctcccatgtaccagcagctggaatctgaaggcatcagtcttcatcttagggcatcgctcttcctcacaccacgaatctgaacatgcctctctcttgcttacaaatgtctaaggtccccactgcctgctggagagaaaacacactcctttgcttagcccacaattctccatttcacttgacccctgcccacctctccaacctaactggcttacttcctagtctacctgaggctgcaatcacactgaggaactcacaattccaaacatacaagaggctgcctcttaacacagcacttagacacgtgctgttccacctcccttcagactatctttcagccttctgccagcagtaaaacttataaattttttaaataatttcaatgtagttttcccgccttcaaataaacatgtctgccctcatgg

SEQ ID NO: 124275 - DNA, 1849 bp, Homo sapiens
atgtcgctcatggtcgtcagcatggcgtgtgttgggttgttcttggtccagagggccggtccacacatgggtggtcaggacaaacccttcctgtctgcctggcccagcgctgtggtgcctcgaggaggacacgtgactcttcggtgtcactatcgtcataggtttaacaatttcatgctatacaaagaagacagaatccacattcccatcttccatggcagaatattccaggagagcttcaacatgagccctgtgaccacagcacatgcagggaactacacatgtcggggttcacacccacactcccccactgggtggtcggcacccagcaaccccgtggtgatcatggtcacaggaaaccacagaaaaccttccctcctggctcacccaggtcccctggtgaaatcaggagagagagtcatcctgcaatgttggtcagatatcatgtttgaacacttctttctgcacaaagaggggatctctaaggacccctcacgcctcgttggacagatccatgatggggtctccaaggccaacttctccatcggtcccatgatgcaagaccttgcagggacctacagatgctacggttctgttactcactccccctatcagttgtcagctcccagtgaccctctggacatcgtcatcacaggtctatatgagaaaccttctctctcagcccagccgggccccacggttctggcaggagagagcgtgaccttgtcctgcagctcccggagctcctatgacatgtaccatctatccagggagggggaggcccatgaacgtaggttctctgcagggcccaaggtcaacggaacattccaggccgactttcctctgggccctgccacccacggaggaacctacagatgcttcggctctttccgtgactctccatacgagtggtcaaactcgagtgacccactgcttgtttctgtcacaggaaacccttcaaatagttggccttcacccactgaaccaagctccgaaaccggtaaccccagacacctgcatgttctgattgggacctcagtggtcatcatcctcttcatcctcctcctcttctttctccttcatcgctggtgctccaacaataaaaaatgctgcggtaatggaccaagagtctgcaggaaacagaacagcgaatagcgaggactctgatgaacaagaccctcaggaggtgacatacacacagttgaatcactgcgttttcacacagagaaaaatcactcgcccttctcagaggcccaagacacccccaacagatatcatcgtgtacacggaacttccaaatgctgagtccagatccaaagttgtctcctgcccatgagcaccacagtcaggccttgagggcgtcttctagggagacaacagccctgtctcaaaaccgggttgccagctcccatgtaccagcagctggaatctgaaggcgtgagtctgcatcttagggcatcgatcttcctcacaccacaaatctgaatgtgcctctcacttgcttacaaatgtctaaggtccccactgcctgctggagaaaaaacacactcctttgcttagcccacagttctccatttcacttgacccctgcccacctctccaacctaactggcttacttcctagtctacttgaggctgcaatcacactgaggaactcacaattccaaacatacaagaggctccctcttaacgcagcacttagacacgtgttgttccaccttccctcatgctgttccacctcccctcagactagctttcagtcttctgtcagcagtaaaacttatatattttttaaaataacttcaatgtagttttccatccttcaaataaacatgtctgcccccatggt

SEQ ID NO: 124276 - DNA, 1187 bp, Homo sapiens
ctttctcctgcagcttctcctccgacatgtagtccggtagcggggctagagggccaggcaccgggttacccggccctcgataaggaaacactccggccatatccggagaatcctgtgcctgacatgcagctctggggtctttctgcaggggctgcgggctgggagccggggcaccggccctggcctacgcactggttggcgtctttctcctcgggctcctcggaggcgtcttcacactccttcagcctccagtccatgatgtagccaatgacgggggccgtcagcaggcacagcagctggagcacgccgaagatggaggtgtagaggccaactgcggcatccggctggcacttcacctccaggtcgacggtggacaggcacagcttgtggccctcctgcagcgccacctgctccttggcactcctcatggagctgcccacactcaggcgccggcccaccgtggtcacctgcttgtagaactgcttccctgtgatcttgtggtcaaagcccagccagctgaacttgatcttcaccctcgggccccgggagagtgtctgtgggtgcttgattcctggaaaggtgactgccgaggaggcgtaggacccaatcatcaaggcaataaacgtggaccgaaggtcgccgaacatgttgggcagcttggcttccgcctggcctttctggaagctaccaaaatggcggaagacagagcggacagggccttcggatccgcggggcttcccttccgcgaaggagaccgatggccgcttggccggagctaggctggaggtgcgcgggatggcgaatggcgtggaggcgtcctcagggggcgggaaagcacctgcagccaggctggcctctgacgaccctgcctgggccacagggaccatcccttcttggggtggcacacagtaggcaggaacctcatctgcctctccagactcaggatcggatgagaaggagtcatcagtggcccagccggcagagggcggctcaatgaagctgtccttgaggtctgatcggggggcccagcagcagcaggcacagcaggcaagacccaggaagagcagcagcagaggcacaaggctgcccacgatgagggcagtgtcccgactgccagagcctgggccccagccagccagggtcacagcgctgacagtggccagtatctggctcacaggcctccccat

SEQ ID NO: 124277 - DNA, 3392 bp, Homo sapiens
tccaagctgaattcgcggccgcgtcgaccacgccggccctgggcagtgacggggttcgggtgaccatggacagtgcgctcaccgcccgtgacagggtgggggtgcaggatttcgtgctgctggagaacttcaccagcgaggccgccttcatcgagaacctacggcggcgatttcgggagaatctcatctacacctacattggccccgtcctggtctctgtcaatccctaccgggacctgcagatctacagccggcaacatatggagcgttaccgtggcgtcagcttctatgaagtgccccctcacctgtttgccgtggcggacactgtgtaccgagcactgcgcacggagcgtcgggaccaggctgtgatgatctctggggagagcggggcaggcaagaccgaagccaccaagaagctgctgcagttctatgcagagacctgcccagccccccaacgcggaggtgccgtgcgggaccggctgctacagagcaacccggtgctggaggcctttggaaatgccaagaccctccggaacgataactccagcaggttcgggaagtacatggatgtgcagtttgacttcaagggtgcccccgtgggtggccacatcctcagttacctcctggaaaagtcacgagtggtgcaccagaatcatggggagcggaacttccacatcttctaccagctgctggaggggggcgaggaagaaactcttcgcaggctgggcttggaacggaacccccagagctacctgtacctggtgaagggccagtgtgccaaagtctcctccatcaacgacaagagtgactggaaggtcgtcaggaaggctctgacagtcattgatttcaccgaggatgaagtggaggacctgctaagcatcgtggccagcgtccttcatttgggcaacatccactttgctgccaacgaggacagcaatgcccaggtcaccaccgagaaccagctcaagtatctgaccaggctcctcagcgtggaaggctcgacgctgcgagaagccctgacacacaggaagatcatcgccaagggggaagagctcctgagcccgctgaacctggaacaggccgcgtacgcacgaaacgccctcgccaaggctgtgtacagccgcacttttacctggctcgtcgggaaaatcaacaggtcgctggcctccaaggacgtggagagccccagctggcggagcaccacggttctcgggctcctggatatttatggcttcgaagtgtttcagcataacagctttgagcagttctgcatcaattactgcaacgaaaagctgcagcagctcttcatcgaactcccgctcaagtcggagcaggaggaatacgaggcagagggcatcgcgtgggaacccgtccagtatttcaacaacaaaatcatctgtgatctggtggaggagaagtttaagggcatcatctcgattttggatgaggagtgtctgcgcccgggggaggccacagacctgaccttcctggagaagctggaggatactgtcaagcaccatccacacttcctgacgcacaagctggctgaccagaggaccaggaaatctctgggccgaggggaattccgccttctgcactatgcgggggaggtgacctacagcgtgaccgggtttctggacaaaaacaatgaccttctcttccggaaccttaaggagaccatgtgtagctcaaagaatcccattatgagccagtgcttcgaccggagcgagctcagtgacaagaagcggccagagacggtcgccacccagttcaagatgagcctcctgcagctggtggagatcctgcagtctaaggagcccgcctacgtccgctgcatcaaacccaatgatgccaaacagcccggccgctttgacgaggtgctgatccgccaccaggtgaagtacctggggctgttggaaaacctgcgtgtgcgcagagctggctttgcctatcgccgcaaatacgaagctttcctgcaaaggtacaagtcactgtgcccagagacgtggcccacgtgggcaggacggccgcaggatggggtggctgtgctggtccgacacctgggctacaagccagaagagtacaagatgggcaggaccaagatcttcatccgcttccccaagaccctgtttgccacagaggatgccctggaggtccggcggcagagcctggccacaaagatccaagctgcctggaggggctttcactggcggcagaaattcctccgggtgaagagatcagccatctgcatccagtcgtggtggcgtggaacactgggccggaggaaggcagccaagaggaagtgggcggcacagaccatccggcggctcatccgaggcttcatcctgcgccacgccccccgctgccccgagaacgccttcttcttggaccatgtgcgcacgtcttttttgctaaacctgaggcggcagctgccccggaatgtcctgggacacctcgtggcccacgcccccacctgccctgcgtgaggcctcagagcttctgcgggagttgtgcataaagaacatggtgtggaaatactgccggagtatcagccctgagtggaagcagcatctgcagcagaaggccgtggctagtgagatcttcaagggcaagaaggataattaccctcagagtgtacccaggctcttcatcagcactcgggttggtacagatgagatcaacccccgagtgctgcaggccttgggctctgagcccattcagtatgctgtgcctgttgtgaaatacgaccgcaagggctacaagcctcggttcccggcagctgctgcttcacggcccaacggccgttcgtcatcgtggaggacgccaaagttcaagcagaggattgattacgccaaacctgaccggaatctctgtcagcagcctgagcgacagtctttttgtgcttcatgtacagcgtgcggacaataagcaaaagggagatgtggtgctgcagagtgaccacgtgattgagacgctgaccaagacagccctcagtgccaaccgcgtgaacagcatcaacatcaaccagggcagcatcacgtttgcagggggccccggcagggatggcaccattgacttcacacccggctcggagctgctcatcaccaaggccaagaacgggcacctggctgtggtcgccccacggctgaattatcggtgataaaggcgcccactggaccatcccaacgcccaaagctttgcttttctcctcctccccttcccagttaccaaagagtcgaatttccagacagggacccagggacaccccgaagcccacctgcaatttcccacctcctgcccatccctttcttgagggagcagcaggggccaggagctaccccaggagtgggccaggccgggccacagcaataggaaagccagggccagagcga

SEQ ID NO: 124278 - DNA, 3771 bp, Homo sapiens
atgctcaacgggtgtgcccacgcccaccccatattccccacgaggatactgtcagagtgtccccgagggatgctcagagcaggcttccacctgaaccgcagagaggccctcccacccagcaggagccacatctccgctgctgttctagctcctggcgccctgctttcttgggggcccgaccaccccctggaattatacgggttacacagtcatcaggaccctccaacagggtatgaaggtgtgaagggtgcccccgtgggtggccacatcctcagttacctcctggaaaagtcacgagtggtgcaccagaatcatggggagcggaacttccacatcttctaccagctgctggaggggggcgaggaggagactcttcgcaggctgggcttggaacggaacccccagagctacctgtacctggtgaagggccagtgtgccaaagtctcctccatcaacgacaagagtgactggaaggtcgtcaggaaggctctgacagtcattgatttcaccgaggatgaagtggaggacctgctgagcatcgtggccagcgtccttcatttgggcaacatccactttgctgccaacgaggagagcaatgcccagggtcaccaccgagaaccaagctcaagtatctgaccaggctcctcagcgtggaaggctcgacgctgcgagaagccctgacacacaggaagatcatcgccaagggggaggagctcctgagcccgctgaacctggagcaggccgcgtacgcacgagacgccctcgccaaggctgtgtacagccgcacttttacctggctcgtcgggaagatcaacaggtcgctggcctccaaggggcgtcgtccagcttttcccctctcctggtcctgtgtccccactgagccactgtgggctcttctccttccttacagctttgagcagttctgcatcaattactgcaacgagaagctgcagcagctcttcatcgagctcacgctcaagtcggagcaggaggagtacgaggcagagggcatcgcgtgggagcccgtccagtatttcaacaacaaaatcatctgtgatctggtggaggagaagtttaagggcatcatctcgattttggatgaggagtgtctgcgccccggggaggccacagacctgaccttcctggagaagctggaggatactgtcaagcaccatccacacttcctgacgcacaagctggctgaccagcggaccaggaaatctctgggccgaggggaattccgccttctgcactatgcgggggaggtgacctacagcgtgaccgggtttctggacaaaaacaatgaccttctcttccggaaccttaaggagaccatgtgtagctcaaagaatcccattatgagccagtgctttgaccggagcgagctcagtgacaagaagcggccagagacggtcgccacccagttcaagatgagcctcctgcagctggtggagatcctgcagtctaaggagcccgcctacgtccgctgcatcaaacccaatgatgccaaacagcccggagacagccgtcagcgccagcccgctgaccacggcgctccccctaccccaggccgctttgacgaggtgctgatccgccaccaggtgaaagccggctttgcctatcgccgcaaatacgaagctttcctgcaaaggtacaagtcactgtgcccagagacgtggcccacgtgggcaggacggccgcaggatggggtggctgtgctggtccgacacctgggctacaagccagaagagtacaagatgggcaggaccaagatcttcatccgcttccccaagaccctgtttgccacagaggatgccctggaggtccggcggcagagcctggccatctgcatccagtcgtggtggcgtggaacactgggccggaggaaggcagccaagaggaagtgggcggcacagaccatccggcggctcatccgaggcttcatcctgcgccacgccccccgctgccccgagaacgccttcttcctggaccatgtgcgcacctcttttttgctaaacctgaggcggcagctgccccagaatgtcctggacacctcgtggcccacgcccccacctgccctgcgtgaggcctcagagcttctgcgggagttgtgcataaagaacatggtgtggaaatactgccggagtatcagccctgagtggaagcagcagctgcagcagaaggccgtggctagtgagatcttcaagggcaagaaggataattaccctcagagtgtacccaggctcttcatcagcactcggcttggtacagatgagatcagcccccgagtgctgcaggccttgggctctgagcccattcagtatgcggtgcctgttgtgaaatacgaccgcaagggctacaagcctcgctcccggcagctgctggtcacgcccaacgccgtcgtcatcgtggaggacgtcaaagtccccccggtggtggggacagtgtgccccggccctgagccccgcaccctctccctgcacgtgttcagccccatcctgctgctcagcctggtcaccatgtgcgtcacgcagctgcggctcatcttctacatgggggctatgaacaacatcctcaagttcctggtcagcggcgaccagaagacagtgatggccacggttggcctctacacctccatcttcggcgtgctccagctgctgtgcctgctgacggcccccgtcattggctacatcatggactggaggctgaaggagtgtgaagacgcctccgaggagcccgaggagaaagacgccaaccaaggcgagaagaaaaagaagaagcgggaccggcagatccagaagatcacttaatgccatgcgggccttcgccttcaccaacctgctgctcgtgggctttggggtgacctgcctcattcccaacctgcctctccagatcctctccttcatcctgcacacaatcgtgcgaggattcatccactccgctgtcgggggcctgtacgctgccgtgtacccctccacccagttcggcagcctcacgggactgcagtctctgatcagcgcgctcttcgcccttctgcagcagccgctgtttctggccatgatgggtcctctccagggagaccctctgtgggtgaacgtggggctgctccttctcagcctgctgggcttctgcctcccgctctacctgatctgctaccggcgccagctgggagcggcagctgcagcaggaggcaggaggatgacaaactcttcctcaaaatcaacgggttcgtccaaccagggagggcctttcgtgtagtggcttgccggcttcggaactgcggtctcctgcctgtgcttcagtgactgacccctgtccttgcccctccagagtaccccacgcacccccagggaccttcgccgtctccgtgccagcgttcacgctccctcccggggccctgcctcggaaactctgtggtggaaggacgggagagggccccggacacgcgcgtcttctcctgccgaacgcaggggctgccctgactttgctctgccgccccccggggacccggggcctggggtctctgtggtgcctgcagcaggagccaggaacgcccggcaggcaggcgctctcccgccagtgtctggattctgcctcttgccaaagcagagggggctgccatcccctgcctgccacctgcccctcggctgcatgcccacagccgtacctgcctgaggacaaaggcttgcactgtctcgcccgcgcctggcccccaccccctccccggccagcctgaggctgcctgaggaaggaaggacccgcttcctgttg

SEQ ID NO: 124279 - DNA, 416 bp, Homo sapiens
tttcgtggcgtcgctaggcagcttcgaaccagcgcaatgacgatgccagtcaacggggcccacaaggatgctgacctgtggtcctcacatgacaagatgctggcacaacccctcaaagacagtgatgttgaggtttacaacatcattaagaaggagagtaaccggcagagggttggattggagctgattgcctcggagaatttcgccagccgagcagttttggaggccctaggctcttgcttaaataacaaatactctgaggggtacccgggccagaggctcccctgcaaactttgctgtgtacactgccctggtggaaccccatgggcgcatcatgggcctggaccttccggatgggggccacctgacccatgggttcatgacagacaagaagaaaatctctgccacgtccatct

SEQ ID NO: 124280 - DNA, 843 bp, Homo sapiens
atgtgcggggctgtgttccggcagcttcggacccatgcaatagcaatgccagtcaacagggcccacaaggatgctgacctgtggtcctcacatgacaagatgctggcgcagcccctcaaagacagcgatgttgaggctcccctgcaaactttgagtgtaactgccctggtggaaacccatgggtgcatcatgggcctggacctgccagatgggggtcacctgacccacgggttcatgacagacaagaagaaaatctctgccacgtccatcttctttgaatctatgccctataagggaggtccccacaaccacaccattgctggggttgctgtggccctgaagcaagctatgactctggaatttgaagtttatcagcaccatgtggtggccaactgcagagctctgtctgaggcactgacggagctgggctaccaaacagtcacaggttgttctgataaacatttgatcctcgtggatctccattcaatcaaaggcacagatggcagaagggctgagaaggtcctagaagcctgttctattgcctgcaacaagaacacctgcccagatgatagaaacactctacggcccagtggactgcggctggggaacccagcactgacatctcttggacttttggaaaaaggcttccaaaaggtagcccactttatccacagagggatagagctaaccctgcagatccagagcaacgctggcatcagagccaccctgaaagagttcaaggagagactagcagggcataaataccaggggtgtgtgcaggctctccaggaggaggttgagagcttcactctcttccctctgcctggcctgcctgacttctaa

SEQ ID NO: 124281 - DNA, 1580 bp, Homo sapiens
gcagcttcgaaccagtgcaatgacgatgccagtcaacggggcccacaaggatgctgacctgtggtcctcacatgacaagatgctggcacaacccctcaaagacagtgatgttgaggtttacaacatcattaagaaggagagtaaccggcagagggttggattggagctgattgcctcggagaatttcgccagccgagcagttttggaggccctaggctcttgcttaaataacaaatactctgaggggtacccgggccagagatactatggcgggactgagtttattgatgaactggagaccctctgtcagaagcgagccctgcaggcctataagctggacccacagtgctggggggtcaacgtccagccctactcaggctcccctgcaaactttgctgtgtacactgccctggtggaaccccatgggcgcatcatgggcctggaccttccggatgggggccacctgacccgtgggttgagtgacagacaagaagaaaatctctgccacgtccatcttcttttaatctatgccctacaaggcgaacccagagactggctacatcaactatgggcagctggaggagaacgcacgcctcttccacccgaagctgatcatcgcaggaaccagctgctactcccgaaacctggaatatgcccggctacggaagattgcagatgagaacggggcgtatctcatggcggacatggctcacatcagcgggctggtggcggctggcgtggtgccctccccatttgaacactgccatgtggtgaccaccaccactcacaagaccctgcgaggctgccgagctggcatgatcttctacaggaaaggggttgctgtggcactgaagcaagctatgactctggaatttaaagtttatcaacaccaggtggtggccaactgcagggctctgtctgaggccctgacggagctgggctacaaaatagtcacaggtggttctgacaaccatttgatccttgtggatctccgttccaaaggcacagaatggtggaagggctgagaaggtgctagaagcctgttctattgcctgcaacaagaacacctgtccaggtgacagaagcgctctgcggcccagtggactgcggctggggaccccagcactgacgtcccgtggacttttggaaaaagacttccaaaaagtagcccactttattcacagagggatagagctgaccctgcagatccagagcgacactggtgtcagagccaccctgaaagagttcaaggagagactggcaggggataagtaccaggcggccgtgcaggctctccgggaggaggttgagagcttcgcctctctcttccctctgcctggcctgcctgacttctaaaggagcgggcccactctggacccacctggcgccacagaggaagctgcctgccggaggacccccacctgagagatggatgagctgctccaaaggggaactgttgacactcgggccctttgagggggtttcttttggacttttttcatgttttcttcacaaatcaaaatttgtttaagtctcattgttagtaattctgggacaggttattaaaggatttaaatttg

SEQ ID NO: 124282 - DNA, 412 bp, Homo sapiens
tggaactgcctgcaaccctgcctggccacctccaggcctggctccccacctcacacattatgcggacttattgcctggctctcccttccacgtggctctcccaccacctgagtcagagctgtgggaaaccccagacgtgtcactcattactggagccccgcctgggtcagacgccagtgacagaagctgtgagtggaagacgagggattgccatcgcctatgaggatgagggaagcggctgataccatgtggggctggagacatagatggacttatgaatggctgctaggacctttagtgctccctgcaccaacctcccatccccctgccaagatccttgaaggaccctggaacgagggagagcaggcaagccttcacaggataggatccgtctctgtcctgtcctggcact

SEQ ID NO: 124283 - DNA, 1197 bp, Homo sapiens
atggagtcgatgtttagcagccctgccgaggcggcgctgcagcgagagaccggggtgccaggactgcttactcctcttccggacctggacggagtgtacgagctggagcgagtcgctggatttgtccgcgacctggggtgtgaacgagttgccttgcagttccctgaccagctattgggagatgctgtggctgtggctgcacgactggaggagacgacagggtcaaagatgttcattctgggtgacacagcctacggcagctgctgcgtggatgtgctgggtgctgagcaagctggagctcaggctctcatacattttggccctgcctgcttaagccctccagcccgcccactgcccgttgccttcgtgcttcgtcaacgttctgtggccttggagctctgtgtcaaggcctttgaggcccagaacccagaccccaaagcgcctgtggtgctgctgagtgagccggcctgtgcccatgccctggatacagggaagactcaggatgagggtgcccgggctggacggctaagggcacgaagacgatatctggtagagagggccagagatgcccgcgtggtagggctgctggcaggcacactgggtgtagcccaacaccgtgaggcactggcccacttgcggaacctgactcaggctgctggcaagcgtagctatgtgttggccctggggcggcccacccctgccaagcttgccaacttccctgaggtggatgtctttgtgctattagcctgtcctctgggtgctctagccccccagctttctggtagcttcttccagcctatactggcaccatgtgagctggaagctgcctgcaaccctgcctggccacctccaggcctggctccccacctcacacattatgcggacttattgcctggctctcccttccacgtggctctcccaccacctgagtcagagctgtgggaaaccccagacgtgtcactcattactggagatctccgacccccacctgcctggaagtcatcaaatgatcatggaagcttggctctgaccccacggccccagctggagctggctgagagcagtcctgcagcctcattccttagttcccggagctggcaagggctggagccccgcctgggtcagacgccagtgacagaagctgtgagtggaagacgagggattgccatcgcctatgaggatgagggaagcggctga

SEQ ID NO: 124284 - DNA, 483 bp, Homo sapiens
  misc_feature (1)...(483): n = a,t,c or g
gcccccctccnnnnnnnnnnnnnnnnnnnnnnnnaaagagaaaaggtatctggtttatttaggttgctgtgatctccctgagaaataagagtcagtatagaccaacnctgtccaaccaatagaactttctgccatgatggcatatcctgtagctgcactgtcccctcatgtggctgtctgaacacttgaatgactaatgtgactgagaaactgagcttttaatcttaattaacttaaatttaagtttagccacatgtatttagtggctactgtactggacagtgcaggtctagctagacnnnnnnnnnnnnnnnnnnnnnnnnnnnnnnnnnnnnnnnnnnnnnnnnnnnnnnnnnnnnnnnnnnnnnnnnnnnnnnnnnnnnnagtgcttctgataaatagtgggcagaggccagcccacgcgtccgcgnacgcgtgggtcgncccgggnnttcgaggcgatcatcagggtttcaaggggtc

SEQ ID NO: 124285 - DNA, 393 bp, Homo sapiens
ggcacgaggggccgactgtgattccccctacccccacaagggcgaatttgactttcctgttggctgctctagaggactcaggccccgaagctgtcccagggaggtccccgctgcatcccaccacccaagctgtgcctcatggagtcgatgtttagcagccctgccgaggcggcgctgcagcgaggagaccggggtgccaggactgcttactcctcttccggacctgggacggagtgttgccttgcagttccctgaccagctattgggagatgctgtggctgtggctgcacgactggaggagacgacagggtcaaagatgttcattctggggtgacacagcctacggcagctgctgcgtggatgtgctgggtgctgagcaagctggagctcagg

SEQ ID NO: 124286 - DNA, 382 bp, Homo sapiens
cagcctatactggcaccatgtgagctggaagctgcctgcaaccctgcctggccacctccaggcctggctccccacctcacacattatgcggacttattgcctggtgagtagtgggggcattgcctaagctggaaacctggggcacggagtcagggggtgagtatggattttctttcctcctccctttcaggctctcccttccacgtggctctcccaccacctgagtcagagctgtgggaaaccccagacgtgtcactcattactggagatctccgacccccacctgcctggaagtcatcaaatgatcatggaagcttggctctgaccccacggccccagctggagctggctgagagcagtcctgcaggtaaaatgtacaagt

SEQ ID NO: 124287 - DNA, 2570 bp, Homo sapiens
  misc_feature (1)...(2570): n = a,t,c or g
cccgggtcgacccacgcgtccggagaaacagtagttaggatggctgaaggggatactcactcggctgaaggccgactgtgattccccctacccccacgaggcgattttgaccccctgagggctgctctagaggactcaggccccgaagctgtcccagggaggtccccgctgcatcccaccacccaagctgtgcctcatggagtcgatgtttagcagccctgccgaggcggcgctgcagcgagagacacggggtgccaggactgcttactcctcttccggacctggacggagtgtacgagctggagcgagtcgctggatttgtccgcgacctggggtgtgaacgagttgccttgcagttccctgaccaagctattgggagatgctgtggctgtggctgcacgactggaggaagacgacaggggtcaaagatgttcattctggggttgacacagcctacggcagctgctgcgtggatgtgctgggtgctgagcaagctggagctcaggctctcatacattttggccctgcctgcttaagccctccagcccgcccactgcccgttgccttcgtgctttcgtcaacgttctgtggccttggaactctgtgtcaagacctttggggcccaaaacccagaccccaaagcgcctgtggtgctgctgagtgagccggcctgtgcccatgccctggaggctttggctactctcctgcgcccacggtacctggacctgctagtctccagcccagcttttccccaaccagtgggttccctgagtccagagcctatgcccctagagcgttttgggcgccgcttcccccttgccccagggaggcgtctagaagagtatggtgccttctatgtagggggctctaaggccagccctgacccagaccttgacccagacctgagtcggctgctcttggggtgggcaccaggtcaacccttctcctcctgctgtccagatacagggaagactcaggatgagggtgcccgggctggagggctaagggcacgaagacgatatctggtagagagggccagagatgcccgcgtggtagggcttgctggcaggcacactgggtgtagcccaacaccgtgaggcactggcccactttgcggaaccttgattcaggctgctgggcaagtgtagctatgtgttggccctggggcggcccacccctgccaagcttgccaacttccctgaggtggatgtctttgtgctattagcctgtcctctgggtgctctagccccccagctttctggtagcttcttccagcctatactggcaccatgtgagctggaagctgcctgcaaccctgcctgggncacctccagggcctgggttccccacctcacacattnattgcggacttattgcctggctctcccttccacgtggctctcccaccacctgagtcagagctgtgggaaaccccagacgtgtcactcattactggagatctccgacccccacctgcctggaagtcatcaaatgatcatggaagcttggctctgaccccacggccccagctggagctggctgagagcagtcctgcagcctcattccttagttcccggagctggcaagggctggagccccgcctgggtcagacgccagtgacagaagctgtgagtggaagacgagggattgccatcgcctatgaggatgagggaagcggctgataccatgtggggctggagacatagatggacttatgaatggctgctaggacctttagtgctccctgcaccaacctcccaatcccccttgcccaagatccttgaaggaacccttggaaaggagggagagcaggcagccccttcaccaggataggatccgtctctgtccctgtccctggcaactggcacaagctcagcacatgccccagtaatgcgtgttgtttggctgatggaaataaagggcttagggacttccctgaggcctctggaccccatctgtcttccctgagggcagccccaggacctttggccaatcccagttcccagggttgcagttgagggtctgtccttgtcaaaaggcaggtgctagacagtctaggaccagggtttctcaaactccgtacttgacatttggggccaagataattctttgttgtgggggctgtctggtgtatggtagggtgctcagcagcatccctggccctctgcccccacctagacatccagaagcactccccccccagttgtgaacaacccaaaaatatcctcccagaccttggccaaatgttatcctgtgggggaaaattgcccctcaattgagaaccactggtctagcctagacctgcactgtccagtacagttagccactaaatacatgtggctaaacttaaatttaagttaattaagattaaaagcctcagtttctcagtcacatgttgtcattcaagtgttcagacagccacatgaggggacagtgcagctacaggatatgccatcatggcagaaagttctattggttggacagtgttggtctatactgactcttatttctcacgggagatcacagcaacctaaataaaccagataccttttctcaaaaaaaaaaaaaaa

SEQ ID NO: 124288 - DNA, 605 bp, Homo sapiens
  misc_feature (1)...(605): n = a,t,c or g
ttgcggccgccagggaggcggcgggccgcgacatgctggccgccgacctccggtgcagcctcttcgcctcggccctgcagagctacaagcgcgactcggtgctgcggcccttccccgcgtcctacgcccgcggcgactgtaaggactttgaagccctgcttgcagatgccagcaagttacctaacctgaaagaacttctccagtcctccggagacaacccacaaacggggcctggggacctggtgagcttggatttttatcctcaaaaggtcctgacaaatccacaagtgcaggggaatgcagaagttttgaaaaagattccaaaagctgactggggctcctcacacgcctgttcctgcaccggacttcctgtttgaaattgagtactttgacccagccaacgccaaattttatgagaccaaaggagaacgagacctaatctatgcatttcatggtagccgcctagaaaacttccattccattatccacaatggcctgcactgccatctgaacaagacatccttgttcggagaggggacctacctcancagtgacttgagcctggccctcatatacagcccccatggccatgggtggcagcacag

SEQ ID NO: 124289 - DNA, 1153 bp, Homo sapiens
atgcagccctcaggctgggcggccgccagggaggcggcgggccgcgacatgctggccgccgacctccggtgcagcctcttcgcctcggccctgcagagctacaagcgcgactcggtgctgcggcccttccccgcgtcctacgcccgcggcgactgtaaggactttgaagccctgtttgaaaagatccaaaagctgactggggctcctcacacgcctgttcctgcaccggacttcctgtttgaaattgagtactttgacccagccaacgccaaattttatgagaccaaaggagaacgagacctaatctatgcatttcatggtagccgcctagaaaacttccattccattatccacaatggcctgcactgccatctgaacaagacatccttgttcggagaggggacctacctcaccagtgacttgagcctggccctcatatacagcccccatggccatgggtggcagcacagcctcctcggccccatccttagctgtgtggccgtgtgtgaggtcattgaccatccggacgtcaagtgccaaaccaagaagaaggattccaaggagatagatcgcagacgagcgagaatcaaacatagtgaagggggagacatccctcccaagtacttcgtggtcaccaataaccagctgctgcgagtgaagtacctcctggtgtattcacagaagccacccaagagggcttcgagccagctctcctggttttccagccattggtttaccgtcatgatatccctgtatctgctgctgctgctcatagtcttctgtggcctactggcccttcaagacagaggcctgccccaagtgtgcccacagatcccatgtggatggagacctccttcagaggggtcacaggtctttgagactcagcctgggctttaatgtgtaggaaaagccttctggccacccagagagccggagccctgcttgctgtattctctgctcccttcttcctgctgggttttagccataatagggcccggtacgatttgggagtgacatttctgtaaagaagaggaaaaatcatttttctataatttgtaaagttgtgaaagagccactaccacagtttttacattgattattggaacatttcagaataaataaagatattttcttaatgaaaaaaaaaaaaaaa

SEQ ID NO: 124290 - DNA, 1059 bp, Homo sapiens; identical to SEQ ID NO: 114869

SEQ ID NO: 124291 - DNA, 522 bp, Homo sapiens; identical to SEQ ID NO: 114701

SEQ ID NO: 124292 - DNA, 751 bp, Homo sapiens
atggccctgcaaaatgtccgtgtcctaatacccagaatctgtcaatatgttaccttacatggccaatgggtcttcaaagatgtgactaaatcaagtttcaagagatggggagattatcctggtttatctggggatgccagtgaaatttggtgccgtgactcggatcggggaacctcccttaggagatcaatcccctgtcctcctgctctttgtttcgtgaggaagatccacctacgacctctggtcctcagaccaaccagcccaaggaacatctcaccaattttaaatccgcggctgaagactgacgctgccagttcgcctcagaagccccctaaaccatcacggacgccaagcttcgggtatctctcacagcagaaggtctgctggcaactttgttccttaacccaaagcctgaatactaataatgtgaaaagtctaatgttattcaggccacataactgctttcctcctgaaataccaccttgtaaagatagagaaaatgactgtatagaggtgggaaggccaaaccaaggaattatgtctgacagaagggaagaaatgaccgtggtggccttgtcagaccctgtaggaaaggcctctacccatctagtgaaagtgtctacccagactaagaggcttctgaggcgatcgggcagtgtcagtcttcagctgctaagccgagaagatctgggaaggattcagtcagagagccttgggccagagttccaggggctctgggagtggctgccag

SEQ ID NO: 124293 - DNA, 397 bp, Homo sapiens
agagagacaaaggagacacgttttatccatggacccaaaactccggtgctggtcacggactgggaaggcagccttcccttggtgtttaatcattgcagagatgcctgattattcacccacgtttcaaaggtgtcagaccacgcagggacgcctgccttggtccttcacccttagcagcaagtcccgcttttctggggaaggggcaagagcttgctacaagtgccagaaatctgaccaccaggccaaggaatgcccgcaacccgggattcctcctaagccatgtcccatctgtgcgggaccacactggaaatcggactgttcaactcacctggcagccactcccagagcccctggaactctggcccaaggctctctgactgactccttcttggcttag

SEQ ID NO: 124294 - DNA, 263 bp, Homo sapiens
cctgcaggaattcggcacgaggaaagatccacctacgacctctggtcctcagaccgaccaggccagggaacatctcaccaattttaaatcatccgcttccagatcccctggaactctggcccaaggctctctgagtgactccttcccagatcttctcggcttagcagctgaagactgacactgcccaatcgccttggaagcctacaggacaatcacagatgctctgggtaactctcacagtggaggggacgtgagtaaaaatg

SEQ ID NO: 124295 - DNA, 513 bp, Homo sapiens
atggaggcaagggaaacaggcccttggaaagaaggtaatgtggagcgggtagcctccgtattgattaagaaggggacgggcttaccttccactgtgagagttaccggaagctcggcgtccgtgatggtctacggggcttccgaggcgatcgggcagcatcagtcttcagccgctaagccgagaagatctgtgaaggagtcagtcagagagccttgggccagagttccaggggctctgggagtggctgccagcatgaagtcacatggacacaacaggtatcccatgtctcctcaggtcgggctcccgctcccggagcaagagccggagccggagccagagtcggagccggagcaagaaagagaaaagcaggagccccagcaaggacaagagcctgcagccgcagccatagcgctggcaagagccgcagcaagagcaaagaccaagctgaagagaagatccaaaacaatgacaatgtcgggaaacccaagagccggagtcctagcaggcataaaa

SEQ ID NO: 124296 - DNA, 462 bp, Homo sapiens
atggtctatggggcttccgaggcgatcgggctgtgtcagtcttcagccgctaagccaagaagatctgggaaggagtcagtcagagagccttgggccagagttccaggggctctgggagtggctgccagaacagctccctcggtccttcattcaagccttgggcagcctttcttactttcctcgaaccctaatgaatctctcttggcccctctgcctcagaaaatggggctatttgttctgtatttacccttccaagtgggactcccttccacggttccatggcctcttatccttccttcaaaggtccctgaagaagagggccagcttcagagtactcttccttgtggtataaagctacttcctgtgttcacttcccaccatgcgtttttaggcgtgttctgcaatcagtgggtctcagatgtttttctggctcttttcttgatgaagctccttggtgcccag

SEQ ID NO: 124297 - DNA, 864 bp, Homo sapiens; identical to SEQ ID NO: 115468

SEQ ID NO: 124298 - DNA, 140 bp, Homo sapiens
atgatctgggaaggagtcagtcagagagcgttgggccagagttccagtggctctgggagtggctgccgggatgagccttttcagattctgagccctttcagaattctcagaaatcttgaggaagacactggacttccctg

SEQ ID NO: 124299 - DNA, 1773 bp, Homo sapiens
atggccttgggaatctctgcccctgtggctttgcagggtacagccccactcctggctgtgcttagtggctgcagctttcccaagcacatgttgcaaactgtcaatggatcaccattctggggtttggagaatggtggccctcttctcagagctcgactaggcagtgctccagtggagactctagaactgttttcatcgctcaataaaattctccactcttaccattcttcagttgtcaagtgtgacctcattcttcttggacgctggacaaaagcttgggacccactaagtgcaggtggaggctgtcacactggccctttgcccttgcaagtggagggcaaccaccccactggcagctacagggttcctaacaggccacagtaccggtctgtggcctggggcttggggacctctggtctggtcaattacacatttctcctgaattctggagagacaacataccagttcctcagaggaaacaaagattttcttaaaaatcacatcaaattaaattactgctttttgcttattgaagtggataatcttactcttgtttttgtcattgaaaagacactaggccagatatttgatattccaaaggtagagcttctcttctcctaccaatgctttccaatggttgaaaacagacagaagccagagggtgaggaagactgtgtgatacagttgtcagagctcagctgcacagaatgcagcaaaaaagcatggagaatggaggttctgcataccaacaaaaccaccaatgccacccagtgtggagggcccgctcagcttcaacaattcaacgctgttctttctgaaaaagtacacatcgtgccttctctacttcgctcttggaacataatttctcatggcagatttccatcatttgaaacttttaatacaaagaactgcatagcgtataatccaaatggaaatgctttagatgaatcctgtgaagataaaaatcgttatatctggttggagaagcctcaggaaacttacagtaatgacagaagggaaagcaaacacatccctctacgcatggcagcagaaaggagacgtgctgagcaaaaggaaaaataccctcttattaaatcatcagatctaggggcttccgaggcgatccggcagcgtcagtcttcagctgctaagctgagaaaatctgggaaggagtcagtcagagagccttgggccagagttccaggggctctgggagtggctgccagggcactgatagcagaagatgctggcttgagtagagtgatcttatttcattatggtgaaagttggaacctcttacgtgccgatcaacgtctcattttcgccaaaagttggcccagggcttcccggtatcaacagggacaccaggatttatttattctgcgaagtgatcttccgtcacaggtatttattcgcgataagctcatggagcggcgtaaccgtcgcacaggaaggacagagaaagcgcggatctgggaagtgacggacagaacggtcaggacctggattggggaggcggttgccgccgctgctgctgacggtgtgacgttctctgttccggtcacaccacatacgttccgccattcctatgcgatgcacatgctgtatgccggtataccgctgaaagttctgcaaagcctgatgggacataagtccatcagttcaacggaagtctacacgaaggtttttgcgctggatgtggctgcccggcaccgggtgcagtttgcgatgccggagtctgatgcggttgcgatgctgaaacaattatcctga

SEQ ID NO: 124300 - DNA, 366 bp, Homo sapiens
atgggggctgtctgtgaagctttgcggcagtacagcccagaaggggacggacttaccctccactgtgagagttacccgaagctcggcatccgtgatggtctgggggcttccgaggcgatccggcagcgtcagtcttcagccgctaagctgagaagatctgggaaggagtcagagagccttgggccagagttccaggggctctgggagtggctgccagtcagagttactcttgctgctgctgctgctgctgctgctgctgctgctgctgctacggtggtggcggcggcggtggtggcggtggctgccgaggcctcatggttgtcagctccatgcctcctgaacttcactccactgaaatctggttgg

SEQ ID NO: 124301 - DNA, 420 bp, Homo sapiens; identical to SEQ ID NO: 114509

SEQ ID NO: 124302 - DNA, 595 bp, Homo sapiens
atggtctccactctgctaaagatcaattctgagaaggaagagttcacaatgtaccctaagataattcataaactgaagatggaagaagaactgtctgagtccccccaggatgtcataacaaaggtgatggaagccctagatgcagcaggcagcctgctctgtgggagagactcagcccccctgcacccaggtgaaataaacagctttattgctcacacaaagcctgtttggtggtctcttcacacggactcacatgaaatttggtgccgtgactcggatcgggggacctcccttgggggatcaatcccctgtcctcctgctctttgctccgtgaaaaagatccacttacgatctcagggcctcagacccaccagcccaaggaacatctcaccaattttaaatcaggaccccactgaaaatcggactgttcaactgcacctggcagccactcccagagcccctggaactctggcccaaggcgctctgactgactccttcccagatcttctcagcttagcagctgaagactgacactgcccaatcgcctcagaagcctacaggaccatcacagatgctctaggtaactctcacaggg

SEQ ID NO: 124303 - DNA, 1593 bp, Homo sapiens
tcaggataattgtttcagcatcgcaaccgcatcagactccggcatcgcaaactgcacccggtgccgggcagccacatccagcgcaaaaaccttcgtgtagacttccgttgaactgatggacttatgtcccatcaggctttgcagaactttcagcggtataccggcatacagcatgtgcatcgcataggaatggcggaacgtatgtggtgtgaccggaacagagaacgtcacaccgtcagcagcagcggcggcaaccgcctccccaatccaggtcctgaccgttctgtccgtcacttcccagatccgcgctttctctgtccttcctgtgcgacggttacgccgctccatgagcttatcgcgaataaatacctgtgacggaagatcacttcgcagaataaataaatcctggtgtccctgttgataccgggaagccctgggccaacttttggcgaaaatgagacgttgatcggcacgtaagaggttccaactttcaccataatgaaataagatcactggcagccactcccagagcccctggaactctggcccaaggctgactgactccttcccagatcttctcggcttagcggctgaagactgacactgcttgatcgcctcggaagccccctgggtatattgcatgatgttgaggtttggggtatgattgattctgtcacccagatactgagtatagtacacaatagttaatttttcaattgtctcttctccctctctccctccatagtagtccccagtgtcttttgttgccatcagcagctgtatgacactgtccccaggtctcatgtctgtataaacatacacatcataggatatttcagggaaggttggcgtgttatcatttgcatccatcacttgaatattgacgatgactggctcactttcttgtacaccatcaaatgctgttatcgaaaaggtgtaagtttgctgttcttccctgtccactggttgaagtaaggtgaggtagcgagtaataccagtctgtgtgacggtgaagactgaggtgtagtcattcagaaaaaggtgaagctctgggtcttttgtatcttctatgtccttgtccagagctactattcttaaaggtgaagtcaaattgagactgtccgaaatggttgctcccactggggcagattccaggatatagccttgataactgggcattgtaaaatatggactttgattgttttcatccagtatttcaatgtgtagaccggcaaaggcaggaagaggatgaccattgtcttgttcagccttaataaccaaatcaaatttctggtgaaagtctctgtttactggctccaggagactaagttctgctgtcctaggatgcatatggaaaaatcgtgggtaatcctcaggagtccctttgctccagttaccaacaagttcctcatctctatctgagaccacctcagcctggttttcatcattaatatcattatcagcattttggtcaaagccattcggtaagtctctagagagttccaaactttctcgcatcttcctatcttctacagagccctgcaaactgttccaatctctgcctgttacccagttccaaagtcgtttctgcat

SEQ ID NO: 124304 - DNA, 433 bp, Homo sapiens
gtataatcatataacaaatgaggaaactgagggtcaaagaaacccagtaactttccaatgttacctccttgccagcaccaaaggggatggacttaccttccactgtgagagttacccgaagctcggcgtccgtgagggtctagggggcttccgaggggatcgggcagtcagtcttcagccgctaagcccagaagatctgggaaggagtcagtcagagagccttgggccagagttccaggggctctgggagtggctgccagacaagcagaagagtggcaaggcagagaaggagagaagaaagggaacatctgaacctcgagaggagtttggctggggacgatcggagaggagactggctgtgggacggccaaattccagaggaagatcatcttcccactccatcccctttctagctccccatccatcccactga

SEQ ID NO: 124305 - DNA, 414 bp, Homo sapiens
atgtccaagacaaaggcaccagcagatttggtgtctggtgagggcctgttcctcaaagaaggtacattctatttgtcttcccatggtggaagaagttgggatcagcttgggaccaggagatactctccctgtgagaaaaggggggcttctgaggcgattgggcagcgtcagtcttcagccgctaagccaagacgatctgggaaggaaggagtcagtcagagagccttgggccagagttccaggggctctagaagtggctgccaggaccaacacctacaagttacttccagctccaagaggccgtgcagaggaaggggcctctgtgtgtaatttttctgtcaggataggccatctgttcctggtttgcattaagagtcttgtacgtgttggtgcactcctggcaatttggaccaa

SEQ ID NO: 124306 - DNA, 1290 bp, Homo sapiens
atgcctggcgataagtacggcgatggcattaccttaatcaagtacatcaagcgccatttcccaagcctgtcgatcattgttctgactatgaacaacaacccggcgattcttagtgcggtattggatctggatatcgaagggatcgtgctgaaacaaggtgcaccgaccgatctgccgaaagctctcgccgcgctgcagaaagggaagaaatttaccccggaaagcgtttctcgcctgttggaaaaaatcagtgctggtggttacggtgacaagcgtctctcgccaaaagagagtgaagttctgcgcctgtttgcggaaggcttcctggtgaccgagatcgctaaaaagctgaaccgcagtattaaaaccatcagtagccagaagaaatctgcgatgatgaagctgggtgtcgagaacgatatcgccctgctgaattatctctcttcagtgaccttaagccagataagacgcgttagtgtcttatctggcatttgcaccgattgccggatgcggcgtaaacgccttatccggcctacgattcccattatttcaacaaattacattaaagtaggccagataagacgcgtcagcgtcgcatctggcatttgcgctgaatgccggatgcggggtaaacgctttatcgtcctaggaattccgggatttctggacctctcggggtataacgcagcgtctgggaagcgccaaagcttgcatgcctgcagccgcgtaacctggcaaaatcggttacggttgaaacgttttccttcaattcatgggccttttaatgaagcttcacaagaagcggcgcgtcgtaagtcgattgagaaagagctggaatgggtacgtcaaggtactaaaggccgtcagtcgaaaggtaaagcacgtctggcgcgctttgaagaactgaacagcaccgaatatcagatcactgtattacacacaggaggaaaatcagagttaggaagggggcttccgaggcgatcgggcagtgtcagtcttcagccgctaagccgagaagatctgggaaggagtcagtcagagagccttgggccagagttccaggggctctggaagtggctgccagatgaatcctctgtctggccggccccaggttgtctgcttctttactgcacacatgttgacaaagaaaagggaagaaggagcctccatgttgaacatgccttgcttccagtgaaaggaagagatgatccaagcaaatttaggaccaatagcagactcttcacactgcctggggatagagggaccaccctgggctcctcttactcctgg

SEQ ID NO: 124307 - DNA, 411 bp, Homo sapiens; identical to SEQ ID NO: 114508

SEQ ID NO: 124308 - DNA, 1686 bp, Homo sapiens
atgctgtcagacaaatgtcagcatcagataatgcatatggatagcatgcatgacatgaccatcaccatcatgatcaccgtcaagcttcttattggagaaactgacagcatacgttttaaactagccattaaacctgcctgtgaccttgtcagcctccaccacgtttatctggatggatgcatggttcttggcaccggtgacgcggttactagcagagactttcttccgcatgtacaggtccacaagctcgccggtgtgcttttggatttcaagactgtgcctgctgccacgacactgcgtaattcttctattccttcagctcttcctgaaccgatgactgctagtgaagcagctgctaggaaaagccaaataaaagccagaataacagataccattggaccaacagaaacctcaattgcaccaagacaaagaccaaaggccaactctgctactactgccactcccagtgtgctgaccattcaaagttcagcaacacctgttaaagtccttgctcctggtgaattcggtaaccatagaccaaaagagtacagtgtctctcccggcggctttcatgggctggccgttgagtatcagcagctttttcaggcgcatgttgcaagctgtaggattgaacagttgcatttgaatgtaggcagccgccacagcagcatagagtactccagcaactacagcagggagattggagattacagcaactccatttacagcatcgtcatcctcaccagcagcagcagcagcagcagcagcaacagcaacagcagcagcagcaacagcaacagcagcagcagcagcagcagcagcagcaccaccaccaccaccaccaccacttacttcaagatgcttatatgcagcaggtcagttgctgataaagaggccattgcaaatttcacaaatcagaagaacatcagcaatccacctgatatgtcagggtggaatccttttggagaggataatttctctaagttaacagaagaggaactattggacagagaatttgaccttctaagatcaaactcagcccacctgcacccaggtgaaataaacagccatgttgctcacacaaagcctgtttggtggtctcttcacacagatgtgcatgaaatttggtgccgtgactcggatcgggggacctcccttgggagatcaatcccctgtcctcctgttctttgctccatgagaaagatccacctacaacctcaggtcctcagactgaccggcccaaggaacatctcatcaattttaaatcaggagcttgctacacgtgccggaaatctggccactaggccaaggaatgcctgcagcctgggattcctattaagccgcatctcatctgtgtgggaccccactgaaaatcggactgttcaactcacctggcagccactcccagagcccctggaactctggcccgaggctcactgactgactccttcccagatcttctcagcttagcagctgaagactgacactgcccgatcacctcggaagcctgtttaagttgcgtttccgagttgacgtgcacatcacagatttcacagtgaaatgttttattttggaggcctgtgtttcctttattaacaggtcctttgcctttcactcctgccctaggaaaggctttgatagtgccacttccattccgggcttctaacatggttttgtgcttagtac

SEQ ID NO: 124309 - DNA, 756 bp, Homo sapiens
aaaggcaagagttgcatggacagattctctgcaaggtgctgagcaaggtagcagacatgccaggtcttgagtgcattgtgtctagaggtagagcacagaggaggaaaagggggattctgaggcgatcgggcagcttcagtcttcagccgctaagcccagaagatctgggaaggagtcagtcagagagccttgggccagagttccaggggctctgggagtggctgccaaggtgagttggacagtccgatttccagtggggtcccgcacagatgggacgcagcttaggaggaatcccgggctgcaggcattccttggcctggtggccagatttctggcacttgtagcaagctccttccagaaaagcgggaaaggggttgggtcgtggaaataaggggttggggtgcagagataagaggtcggggcatggaaataagggattggggcacagagatataagaggttggggtgcagaaataagggattgggccacagagataagaggtcggggcgtggaaataagggactggggcacagagatacgaggttggggtacttgctcctctagaaaagcggacttgccactcagggtgaaggagaaggggttgggtgtttcttgccccccagaaaggcggagaaggggtagagacacagagagaaggggttggggtacttgccccttccccagaaaagcgggacttgccgctaagggtgaaggaccaaggcaggcgtccctgcgtggtctgacacctctgaaac

SEQ ID NO: 124310 - DNA, 1103 bp, Homo sapiens
atgggggctgtctgtgaggccttgcggcagtacggcccagaaggggacagacttaccttccactgtgagagttacccgaagctcggtgtccatgatggtttagggggcttccgaggagatccggcagtgtcagtcttcagccgtgaagctgagaagatctgggaaggagtcaatcagagagccttgggccagagttccaggggctctgggagtggctgccaggtgagtcgaacagtccgattttcagtggggtcccacacagatgggacgcagcttaggaggaatcctgggcagcgggcattccttggcccagtggccagatttccggcacgtgtagcaagctccttgtctatgatgcaaagacctttgttcacgtgtttgtcggctgaccctctccccacaattgtcttgtgaccctgacacatccccctttgtcccttcctcagaaaatcgggacttgccgctaagggtgaaggaccaaggcaggtgtccctgtgtggtctgacacccttgaaacgtgagtgtataatcagagaggtgtccctgcaatgattaaacaccaagggaaggctgccttcccagtccatgaccggtgccggagttgggtccatggataaaacgtgtctcctttgtctcccttcttttaaaacaaatcttttgtctttgtcttcatttctgcattcgtccccttcgttcaatcctgtaggaattgacagtgatattggggagttcccatccctggatttgggatttcctcgagtttccagccctgtccttgtggccaaaaagtggcacagtttggtttttgaatcctgttcgtgacgccaaaaatattctgcaggtattgggagatccacagctaagacaccaggacctcctggaagcctagaaacagtgagagtgccggtccgacatccttcagttttattctgggcctgggttttagtactttctggagataaaccaagatacccactatggctatgtctgctaaaatgtctaatggatattagctcttgggtcactttctcccttaggaccacctgaagtatagagtgtagcctctcaagggagcaggtggcagccttggggctgaaaggcat

SEQ ID NO: 124311 - DNA, 1539 bp, Homo sapiens
ggggcttccgaggcgatcaggcagcatcagtcttcagccactaagccaagaagatctgggaaggagtcagtcagagagcctcgggccagagttccaggggctctggcagtggctgtcagactttcaaacttaacaccagtgatttgccaggggcttttgggccatcagccacagactgaaggctgtacttttggcttccctacttttgagattttgggacttggaatgacttctttgctcttcagcttgcaaatgtcttatgctgggacttcactttgtgattgtaggtaacatctgtgctacactcaaggagaaatactcctcaatgctccatttagatgtgaccatgaagaaaaatggggagaaaagaacaaggctccaaaaaagaaagaagggaatgcctccacatccggcttatgaggacctaaacatagctgccatcactctccctgccaatgttgtccttcatcagccaagtggcttcagaacttcagggcagctggaccccgtttggtggtctcttgacacggacgcgcatgaaatttggtgccaagacccgggacttggatcaggggacttcccttgggagatcactcccctgtcctcctactctttgctccatgagaaagatccacctacgacctcaggtcctcagaccgaccagcccaagaaacatctcaccaatttcaaatccaagacaaaggagacaggttttatccatggacccaaaactccggcaccggtcacggactgggaaggcagccttcccttggtgtttaatcattgcagggacacctctctgattattcacccatgtttcaagggtgtcagaccacgcagggatgcctgccttggtccttcacccttagcggcaagtcccgcttttctggagaaggggcaagatttaattaacctcgccttcaaggtgtacaataatagaaaaaagttgcaattccttgcctccactgtgagacaaaccgcagccacatctccagcacacaagaacttccaaatgcctgaaccgcagcggccaggcgttcctccagaacctcctcccacaggagcttgctacatgtgccggaaaatctggccactggcacaaggaatgccggcagcccgggattcctcttaagccgcgtcccatctgtgtgggaccccactgaaaatcggactgttcaactcacctggcagccactcccagagcccctggaactatggcccaaggctctctgtctgactgactccttcccagatcttcttggcttagcagcttgaagactgacactgcccgatcgcctcggaagccccggagaccattcacggacgccgagcttcgcgtaactctcacagtggaagcccctggcccacagcctggtaccctggagctccataaatacctgttgagtgaatgagaggatgaaggcttctgcagagagagagtggaagaaaagtggcgtcttttgacttcggacttggctttccttgcagaggcctcagggaggaacaacacggaaacaaagatggccttgtcctgggccc

SEQ ID NO: 124312 - DNA, 2448 bp, Homo sapiens; identical to SEQ ID NO: 121935

SEQ ID NO: 124313 - DNA, 1947 bp, Homo sapiens; identical to SEQ ID NO: 119723

SEQ ID NO: 124314 - DNA, 507 bp, Homo sapiens
accaacaaaattgacagaccactagcaagactaataaagaagaaaagagagaagaagcaaatagacgcaataaaaaatgacaaaggggatatcaccactgatcccacagaaacacaaactaccatcaaagaatactataaacacctctatgcaaataaactagaaaatctagaagaaatggataaattcttcgacacatacaccctcccaagactaaaccaagaagaagttgaatctctgaatagaccaatagcaggctctgaaattgaggcaataattaatagcttaccaaccaaaaaagtccaggaccagatggattcacagccaaattctaccagagagaataaaatacctaggaatccaacttacaagggatgtgaaggacctcttcaaggagaactacaaacgctgctcaatgaaataaaagaggatagaaacaaatggaagaacattccatgcttatgggtaggaagaatcaatatcgtgaaaatggccatactgcccaag

SEQ ID NO: 124315 - DNA, 809 bp, Homo sapiens; identical to SEQ ID NO: 121938

SEQ ID NO: 124316 - DNA, 3819 bp, Homo sapiens; identical to SEQ ID NO: 118066

SEQ ID NO: 124317 - DNA, 2265 bp, Homo sapiens; identical to SEQ ID NO: 116371

SEQ ID NO: 124318 - DNA, 2835 bp, Homo sapiens; identical to SEQ ID NO: 121594

SEQ ID NO: 124319 - DNA, 2760 bp, Homo sapiens; identical to SEQ ID NO: 121968

SEQ ID NO: 124320 - DNA, 2307 bp, Homo sapiens
atgaaggaaaaaatgttaagggcagctagagagaaaggtcgggttacccacaaagggaagcccatcagactaacagcggatctctcggcagaaactccacaagccagaagagagtgggggccaatattcaacattcttaaagaaaagaattttcaacccaggatttcatatccagacaaactaagcttcataagtgaaggagaaataaaatactttacagacaagcaaatgctaagagattttgtcaccaccaggcctgtcctaaaagagctcctgaaggaagcactaaacatggaaaggaacaactggtaccagccactgcaaaaacatgccaaaaacatgccaaacagcatcatcctgataccaaagccgggcagagacacaacaaaaaaagagaattttagaccaatatccttgatgaacattgatgcgaaaatcctcaataaaatactggcaaaccgaatccagcagcacatcaaaaagcttatccaccatgatcaagtgggcttcatccctgggatgcaaggctggttcaatatacacaaatcaataaatgtaatccagcatataaacagaaccatcgacaaaaaccacatgattatctcaatagatgcagaaaaggcctttgacaaaattcaacaactcttcatgctaaaaactctcaataaattaggtattgatgggacatatctcaaaataagaataaaatacctaggaatccaacttacaagggaagtgaaggacctcttcaaggagaactacaaaccactgctcaatgaaataaaagaggacacaaacaaatggaagaacattccatgctcatgggtaggtagaatcaatatcatgaaaatggccatactgcccaaggtaatttatagattcaatgccatctccaacaagctaccaatgactttcttcacagaattggaaaaaactactttaaacttcatatggaaccaaaaaagagcccgcatcgccaagtcaatcctaagccaaaagaacaaagctggaggcatcacgctacctgacttcaaacaatactacaaggctacagtaaccaaaacagcatggtactggtaccaaaacagagatatagatcaatggaacagaacagagccctcagaaataacaccgcatatctacacctatctgatctttgacaaacctgagaaaaacaagcaatggggaaaggattccctatttaataaatggtgctgggaaaactggctggccgtatgtagaaagctgaaactggatcccttccttacaccttatacaaaaattaattcaagatggattaaagacttaaacgttagacctaaaaccataaaaaccctagaagaaatcctaggcattaccattcaggacacaggcatgggcaaggacttcatgtctaaaacaccaaaagcaatggcaacaaaagccaaaattgacaagtgggatcaaattaaactaaagagcttctgcacagcaaaagagactaccatcagagtgaacaggcaacctacaaaatgggagaaaattttcgcaacctattcatctgacaaagggctaatattcagaatctacaatgaacttaaacaaatttacaagaaaaagacaaacaaccccatcaaaaagtgggcgaaggacatgaacagacccttctcaaaagaagacatttatgcagccaaaaaatacatgaaaaaatgctcaccatcactggccatcagagaaatgcaaatcaaaaccacaatgagataccatctcacaccagttagaatggcgatcattaaaaagtcaggaaataacagacaaacagagagccaaatcatgagtgaactcccaatcacaattgcttcaaagagaataaaatacctaggaatccaacttacaaaggatgtgaaggacctcttcaaggagaactacaaaccactgctcaatgaaataaaagaggacacaaacaaatggaagaacattccatgctcatggataggaagaatcaatattgtgaaaaatggccatactgcccaagcccacaaatgtacatgtcaccaacctggcagcccaagacactacagctctggaggcagcccaaatatccttggaagggcacccacaggagaaagaaataagcgtgaccgctatgccattattaagtccctcctgaccactgggtcagccatgaagaagatagaagacaacaacacacttgtggatgtcaaaatcaacaagtaccagatcaaacaggttgtaaagaagctctatgacactgatgtggtcaacaccctgatcaggcctgagggagagaagaaggcagatgtttga

SEQ ID NO: 124321 - DNA, 2952 bp, Homo sapiens; identical to SEQ ID NO: 123225

SEQ ID NO: 124322 - DNA, 1800 bp, Homo sapiens
atggcacgagaactacgtgacgaatgcacaagcttcagtaaccgactcgatcaactggaagaaagggtatcagtgatggaagatgaaatgaatgaaatgaagcaagatgagaagtttagagaaaaaagaggaaaaagaaatgaacaaagcctccaagaaatatgggactatatgaaaagaccaaatctatgtctgattggtgtacctgaaagtgacagggagaatggaaccaagttggaaaacactgcaggatattatccaggagaacttccccaacctagcaggcaggccaccattcaaattcaggaaatacagagaatgccacaaagatactcctcaagaagagcaactccaagatacataattgtcagattcactaaagttgaaatgaaggaaaaaatgttaagggcagctagagagaaagatgcagaaaaggcctttgacaaaattcaacagcccttcacgctaaaaactctcaataaattaggtattgatgggacgtatctcaaaataataagagctatttatgacaaacccacagccaatgtcatactgaatgggcaaaaactggaagcattccctttgaaaaccggcacaagacagggatgccctctctcaccacttctattcaacatagtgttggaagttctggccaggacaatcaggcaggagaaagaaataaagggtattcaattaggaaaagaagaagtcaaattgtccctgtttgcagatgacatgatcgtatatttagaaaaccccattgtctcagcccaaaatctccttaagctgataagcagcttcagcaaagtctcaggatacaaaatcaatgtacaaaaatcacaagcattcttacacaccaataacagacaaacagagagccaaatcatgagtgaactcccattcaaaattgctactaagagaataaaatacctaggaatccaacttacaagggatgtgaaggacctcttccaggagaactacaaaccactgctcaacgaaataaaaaaggacacaaacaaatggaagaacattccatgctcatggataggaagaatcagtattgtgaaaatggccatactgcccaaggtaatttatagattcaatgccatccccatcaagctaccaatgactttcttcacagaattggaaaaaactactttaaagttcatatggaaccaaaaaagagcctgcattgccaagacaatcctaagccaaaagaacaaagctggaggcatcaagctacatgactgcaaactatactacaaggttatagtaaccaaaacagcatggtactggtaccaaaacagagatatagaccaatggaacagaacagagccctcagaaataatgccgcttatctacaactatctgatctttgacaaacctgacaaaaacaagcaatggggaaaggattccctatttaataaatggtgctgggaaaactggctagccatatgtagaaagctgaaactggatcccttccttacaccttatacaaaaattaattcaagttggattaaagacttaaatgttagacctaaaaccataaaaactctagaagaaaacctaggcaataccattcaggacataggcatgggcaaggacttcatgtctaaaacactaaaagcaatggcaacaaaagccaaaattgacaaatgggatctaattaaactcaagagcttctgcacagcaaaagaacctaccatcagagtgaacaggcaacctacagaatgggagaaaatttttgctatctactcatctgacaaagggctaatatccagaatctacaaagaactctaa

SEQ ID NO: 124323 - DNA, 2283 bp, Homo sapiens; identical to SEQ ID NO: 121953

SEQ ID NO: 124324 - DNA, 4729 bp, Homo sapiens; identical to SEQ ID NO: 121970

SEQ ID NO: 124325 - DNA, 1431 bp, Homo sapiens
atgggagactttaacacccaactgtcaacattagacagatcaacaagacagaaagttaacaaggatacccaggaattgaactcagctctgcaccaagcggacctaatagacatctacagaactctccaccctgaatcaacagaatatacatttttttcagcaccacaccacacctattccaaaattgaccacatagttggaagtaaagctctcctcagcaaatgtaaaagaacagaaattataacaaactgtctctcagaccacactgcaatcaaactagaactcaggattaagaaactcactcaaaaccgctcaactacatggaaactgaacaacctgctcctgaatgactactgggtacataacaaaatgaaggcagaaataaagatgttctttgaaaccaacgagaacaaagacacaacataccagaatctctgggacactttcaaagcagtgtgtagagggaaatttatagcactaaatgcccacaagagaaagcaggaaagatccaaaattgccaccctaacatcacaattaaaagaactagaaaagcaagagcaaacacattcaaaagctagcagaaggcaagacataactaaaatcagagcagaactgaaggaaacagagacacatgaatccaggagctggttttctgaaaggatcaacaaaattgatagactgctagcaagactaataaagaaaaaaagagagaagaatcaaatagacgcaataaaaaatgataaaggggatatcaccaccgatcccacagaaatacaaactaccatcagagaatactacaaacacctctacgcaaataaactagaaaatctagaagaaatggataaattcctcaacacatacaccctcccaagactaaaccaggaagaagttgaatctctgaatagaccaataacaggctctgaaattgtggcaataatcaatagcttaccaaccaaaaagagtccaggaccagatggattcacagccgaattctaccagaggtacaaggaggaactggtaccattccttctgaagctattccaatcaatagaaaaagagggaatcctccctaattcgttttatgaggccagcatcatcctgataccaaagccgggcacaggcacaaccaaaaaagagaattttagaccaatatccttgatgaacattgatgcaaaaatcctcaataaaatactggcaaaccaaatccaacagcacatcaaaaagcttatccaccaagatcaagtgggcttcatccctgggatgaaagcctggttcaatataggcaaatcaataaatgtaatccagcatataaacagaaccaaagacaaaaaccacatgattatctcaatagatgcagaaaaggcctttgacaaaattcaacaatgcttcatgctaaaaactctcaataaattaggtattgatgggacgtaa

SEQ ID NO: 124326 - DNA, 2721 bp, Homo sapiens; identical to SEQ ID NO: 120374

SEQ ID NO: 124327 - DNA, 1230 bp, Homo sapiens
atggaagatgaaatgaatgaaatgaagcatgaagagaagtttagagggaaaagaataaaaagaaatgaacaaagcctccaagaactatgggactatgtgaaaagaccacatctacatctgattgatgtacctgaaagtgatggggagaatggaaccaagttggaaaacactttgcaggatattatccaggagaacttccccaatctagcaagacaggccaacattcaaattcaggaaatgcagagaaagccacaaagatactcctcgagaagagcaactccaagacacataattgtcagattcaccaaagttgaaatgaaggaaaaaatgttaagggcagccagagacaaaggccaggttacccacaaagggaagcccatcagactaacagctgatctcttggcagaaactctacaagccagaagagagtgggggccaatattcaacattcttaaagaaaagaattttcaacccagaatttcatatccagccaaactacgcttcacaagtgaaggagaaataaaatcctttacagacaagcaaatgctgagagattttgtcaccaccaggcctgccctaaaacagctcctgaaagaagcactaaacatggaaaggaacaaccgactgccagcaagactaataaagaagaaaagagagaagaatcaaatagacgcaacgaaaaatgataaaggggatatcaccaccgatcccacagaaatacaaactaccatcagagaatactataaacacctctatgcaaataaactagaaaatctagaagaaatggataaattcccggacacatacaccctcccaaggctaaaccaggaagaagttgaatctctgaatagaccaataacaggctctgaaattgaggcaataattaagagcttaccaaccaaaaaaaggccaggaccagatagattcacagccgaattctaccagaggtataaggaggaactggtaccattccttctgaaactattccagtcaacagaaaaagagggaatcctccctaactcattttatgaggccagcatcatcctgatagcaaagcctggcagagacacaaccaaaaaagagaattttagaccaatatccttgttgaacattgatgcaaaaatcctcaataaaatattggcaaatcgaatccagcaacacatcaaaaagcttatccaccatgatcaagtgggcttcatccctgggatgcaagggtggttcaacatatga

SEQ ID NO: 124328 - DNA, 2168 bp, Homo sapiens
atcaacaaaattgatagaccactagcaagactaataaagaagaaaagagagaagaatcaaatagatgcaataaaaaatgataaaggggatatcaccaccaatcccacagaaatacaaactaccatcagagaatattataaacacctctacgcaaataaactagaaaatctagaagaaatggataaattcctcgacacatacatcctcccaagactaaaccaggaagaagttgaacctctgaatagaccaataacaggctctgaaattgaggaaataatcaatagcttaccaaccaaaaaaactccaggaccagatggattcacagccgaattctaccagaggtacaaagaggagctggtaccaatccttctgaaactattccaatcaatagaaaaagagggaatcctccctaactcattttatgaggccagcatcatcctgataccaaagcctgacagagacacaaccaaaaaagagaatttcagaccaatatccctgatgaacatcgatgtaaaaatcctcaataaaatactggcaaaccgaatccagcagcacatcaaaaagcttatccaccatgatcaagtgggcttcatccctgggatgcaaggctggttcaacatacgcaaatcaataaatgtaatccagcatataaacagaaccaaagacaaaaaccacatgattatctcaatagatgcagaaaaggcctttgacaaaattcaacaacccttcatgctaaaaactctcaataaattaggtattgatgggacgtatctcaaaataataagagctatctatgacaaacccacagccgatatcatactgaatgggcaaaaactggaagcattctctttgaaaactggcacaagacagggatgccctctctcaccactcctattcaacatagtgttggaagttctggccagggcagtcaggcaggagaaggaaataaagggcattcgattaggaaaagaggaagtcaaattgtccctgcttgcagatgacatgattgtatatctagaaaaccccatcgtctcagccccaaatctcctcaagctgataagcaacttcagcaaaagaataaaatacctaggaatccaacttacaagggatgtgaaggacctcttcaagaagaactacaaaccactgctcaatgaaataaaagaggatacaaacaagtggaagaacattccatgctcatgggtaggaagaatcaatatcgtgaaaatggccatactgcccaaggtaatttatagattcaatgccatcccaatcaagctaccaatgactttcttcacagaattggaaaaaactactttaaagttcatatggaaccaaaaaagagcctgcatcgccaagtcaatcctaaaccaaaagaacaaagctggaggcatcatgctacctgacttcaaactatactacaaggctacaggaaccaaaacagcatggtactggtaccaaaacagagatatagatcaatggaacagaacacagccctcagaaataatgccacatatctacaactatctgatctttgacaaacctgacaaaaacaagaaatggggaaaggattccctatttaataaatggtgctgggaaaactggctagccatatgtagaaagctgaaactggatcccttccttacaccttatacaaaaattaattcaagatggattaaagacttaaacgttagccctaaaaccataaaaaccctagaagaaaacctaggcaataccattcaggacataggcatgggcaaggacgtcatgtctaaaacaccaaaagcaatggcaacaaaagccaaaattgacaaatgggatctaattaaactaaagagcttctgcacagcaaaagaaacgaccatcagagtgaacaggcaacctacagaatgggagaaaatttttgcaacctactcatctgacaaagggctaatattcagaatctacaatgaactcaaacaaatttacaagaaaaaaacaaacaacctcatcaaaaagtgggcgaagaacatgaacagacacttctcaaaagaagacatttatgcagccaaaaaacacatgaaaaaatgctcatcatcactggccatcagagaaatgcaaatcaaaaccacaatgagataccatctcacaccagttggaatggcaatcattaaaaagtcaggaaacaacag

SEQ ID NO: 124329 - DNA, 1845 bp, Homo sapiens
atgattatctcaatagatgcagaaaaggcttttgacaaaattcaacagcccttcatgctaaaaactctcaataaattaggtattgatgggacgtatctcaaaataataagagctatttatgacaaacccacagccaatatcatactgaatgggcaaaaactggaagcattccctttgaaaaccggcacaagacagggatgccctctctcaccactcctattcaacatagtgttggaaattctggccagggcaatcaggcaggagaaagaaataaagggtattcaattaggaaaagaggaagtgaaattgtccttgtttgcagatgacatgattgtatatctagaaaaccccattgtctcagcccaatatctccttaagctgataagcaacttcagcgaagtctcaggatacaaaatcaatgtgcaaaaatcacaagcattcttatacaccaataacagacaaacagagagccaaatcatgagtgaactcccattcactattgcttcaaagagaataaaatacctaggaatccaacttacaagggatgtgaaggacctcttcaaggagaactacaaaccactgctcaacgaaatacaagaggacacaaacaaatggaagaacattccaagctcatggataggaagaatcaatatcgtcaaaatggccatactgcccaaggtaatttatagattcaatgccatccccatcaagctaccaatgactttcttcacagaattgggaaaaactactttaaagttcatatggaaccaaaaaagagctcgcattgccaagacaatcccaagccaaaagaacaaagctggaggcatcatgctacctgacctcaaactatactacaaggctacagtaaccaaaacagcatggtattggtaccaaaacagagatatagatcaacggaacagaacagagccctcagaaataataccacacatctacaaccatctcatctttgacaaacctgacaaaaacaagaagtggggaaaggattccctatttaataaatggtgctgggaaaactggctagccatatgtagaaagctgaaactggatcccttccttacaccttatacaaaaattaattcaagatggattaaagacttaaatgttagacctaaaaccataaaaaccctagaagaaaacctaggcaataccattcaggacataggcatgggcaagcacttcatgtctaaaataccaaaagcaatggcaacaaaagccaaaattgacaagtgggatctaattaaactaaagagcttctgcactacaaaagaaactaccatcagagtgaacaggcaacctacagaatgggagaaaatttttgcaatctacccatctgacaaacagctaatatccagaatctacaaagaacttaaacacatttacaataaaaaaaaaaaaaaaaacaaccccatcaacaagtgggcgaaggatatgaacagacacttctcaaaagaagacatttatgcagccaacagacacatgaaaaaatgctcatcatcactggccatcagagaaatgcaaatagaaaccacaatcagataccatctcacaccagttagaatggcaatcattaaaaagtcaggaaacaacagaattgaacatggggaaatgatgagggtagcaggtcattttgaaatggaccttcgggtagtatttggggtggaaaaatcccctttctccaaccacattttggctaccccagcaacaccacccccacagaggtatcagcgctttgtgatgtccaagccaccccaggactaccattggataggggtgccccattctggccaaacaaagctgaagggtggggctcctcattacccaggg

SEQ ID NO: 124330 - DNA, 2880 bp, Homo sapiens
atggagaatgactttgacgagttgagagaagaaggcttcagacaatcaaattactctgagctacgggaggacattcaaaccaaaggcaaagaagttgaaaactttgaaaaaaatttagaagaatgtataactagaataaccaatacagagaagtgcttaaaggagctgatggagctgaaaaccaaggctcaagaactacgtgaagaatggagaagcctcaggagccgatgcgatcaactggaagaaagggtatcagcgatggaagatgaaatgaatgaaatgaagggagaagggaagtttagagaaaaaagaataaaaagaaatgagcaaagcctccaagaaatatgggattatgtgaaaagaccaaatctatgtctgattggtgtacctgaaagggatgggcagaatggaaccaagttggaaaacacgttgcaggatgttatccaggagaacttccccaatctagcaaggcaggccaacgttcagattcaggaaatacagagaacgccacaaagatactcctcgagaagagcaactccaagacacataattgtcagattcaccaaagttgaaatgaaggaaaaaatgttaagggcagccagagagaaagaaatacaaactaccatcagtgaatactacaaacacctctacacaaataaactagaaaatctagaagaaatggataaattccttgacacatacactctcccaacactaaaccaggaagaagttgaatctctgaatagaccaataacaggagctgaaattgtggcaataatcaatagcttaccaacgaaaaagagtccaggaccagatggattcacagccgaattctaccagaggtacaaggaggaactggtaccattccttctgaaactattccaatcaatagaaaaagagggaatcctccctaactcattttatgaggccagcatcattctgataccaaagtcaggcagagacacaacaaaaaaagagaattttagaccaatatccttgatgaacattgatgcaaaaatcctcaataaaatactggcaaaccgaatccagcagcacatcaaaaagcttatccaccatgatcaagtgggcttcattcctgggatgcaaggctggttcaatatacgcaaatcaataaatataatccagcatataaacagagccaaagacaaaaaccacatgattatctcaatagatgcagaaaaagcctttgacaaaattcaacaacccttcatgctaaaaactctcaataaattagctgataagcaacttcagcgaagtctcaggatacaaaatcagtgtacaaaaatcacaagcattcttatacaccaacaacagacagagagccaaatcatgagtgaactcccattcacaattgcttcaaagagaataaaatacctaggaatccaacttacaagggatgtgaaggacctcttcaaggagaactacaaaccactgctcaaggaaataaaagaggatacaaacaaatggaagaacattccatgctcatgggtaggaagaatcaatatcgtgaaaatggccatactgcccaaggcaatttacagattcaatgccatccccatcaagctaccaatgactttcttcacagaattggaaaaaactactttaaagttcatatggaaccaaaaaagagcccgcatcgccaagtcaatcctaagccaaaagaacaaagctggaggcatcacactacctgacttcaaactatactacaaggctacagtaaccaaaacagcatggtactggtaccaaaacagagatatagatcaatggaacagaacagagccctcagaaataacgccgcatatctacaactatctgatctttgacaaacctgagaaaaacaagcaatggggaaaggattccctatttaataaatggtgctgggaaaactggctagccatatgtagaaagctgaaactggatcccttccttacaccttatacaaaaatcaattcaagatggattaaagacttaaatgttggacctaacaccataaaaaccctagaagaaaacctaggcattaccattcaggacataggcacgggcaaggacttcatgtctaaaacaccaaaagcaatggcaacaaaagccaaaattgacaaacgggatctaattaaactaaacagcttctgcacagcaaaagaaactaccatcagagtgaacaggcaacctacaaaatgggagaaaattttcacaacctactcatctgacaaagggctaatatccagaatctacaatgaactcaaacaaatctacaagaaaaaaacaaacaaccccatcaaaaagtgggcgaaggacatgaacagacacttctcaaaagaacacatttatgcagccaaaaaacacatgaaaaaatgctcaccatcactggccatcagagaaatgcaaatcaaaaccacaatgagataccatctcacaccagttagaatggcaatcattaaaaagtcaggaaacaacaggtcctcaaacctggctgtccaaaaaggacgccgcaaagtcctgcagagcccccaaaagacacaagcgcggacagaaaagcatcccccgagagacagcgaagccacacaccctctccgggccagctaccagggcgggcaacttcacccctcgaagcaaacgaaagcccctgttctccaagcaaaggaaaaggggatggcaaacagaaataaacaggaaccgctctcagccttcatcttccgcgccctcccccagcaaactccaggaaacagtttctccatctgtgcgatgattgaggtgctcttcgttttttctttcattcaaaaacatactgaactaggtgatggtgaacaagatggacataaggccttcctcagtggcaaggatctcaagatcccttcttga

SEQ ID NO: 124331 - DNA, 1689 bp, Homo sapiens
atgattttctcaatagatgcagaaaaggcctttgacaaaattcaacaacccttcatgctaaaaactctcaataaattaggtattgatgggatgtatctcaaaataataagagctatgtatgacaaacccgcagccaatatcatactgaatgggcaaaaactggaagcattccctttgaaaactggcacaagacagggatgccctctctcaccactcctattcaacatagtattggaagttctggccagggcaatcaggcaggagaaggaaataaagggtattcaattaggaaaagaggaagtcaaattgtccctgtttgcagatgacatgattgtatatctagaaaaccccatcacctcagcccaaaatctccttaagctgataagcaactacagcaaagtctcaggatacaaaatcaatgtgcaaaaatcacaagcattcttatacaccaataacagacaaacagagagccaaatcatgagtgaacttccattcacaattgcttcaaagagaataaaatacctaggaatccaacttacaagggatgtgaaggacctcttcaaggagaactataaaccactgctcaataaaataaaagaggatacaaacaaatggaagaacattccatgctcatgggtaggaagaatcaatatcgtgaaaatggccatactgcccaaggtaatttatacattcagtgccatccccatcaagctaccaatgactttcttcacagaattggaaaaaactacttcaaagttcatatggaaccaaaaaagagcccgcatcgccaagtcaatcctaagccaaaagaacaaagctggaggcatcacactacctgacttcaaactatactacaaggctacagtaaccaaaacagcatggtactggtatcaaaacagagatatagaccaatggaacagaacagagccctcagaaataatgccacacatctacaactatctgatatttgacaaacctgacaaaaacaagcaatggggaaaggattccctatttaataaatggtgctgggaaaactggctagacatatggagaaagctgaaactggatcccttccttacaccttatacaaaaattaattcaagatcgattaaagacttacatgttagacctaaaaccataaaaaccctagaagaaaacctaggcgataccattcaggacataggcatgggcaaggacttcatgtctaaaacatcaaaagcaatggcaacaaaagccaaaattgacaaatgggatctaattcaactcaagagcttctgcacagcaaaagaaactaccatcagagtgaacaggcaacctacagaatgggagaaaatttttgcaatctactcatctgataaaggactaatattcagaatctacaaagaactcaaacaaatttacaagaaaaaaacaaacagccccatcaaaaagtgggtgaaggatatgaacagacacttctcaaaagaagccatttatgcagccaaaagacacatgaaaaaatgctcatcatcactggccatcagagaaatgcaaatcaaaaccacactctcgttgccagctcaagtgtctgtggtggtcatgggctttccttctgctgggattccagaggcctgtggcaagagcgggctgttccttgcctattcaattaacccattccctcagagtcactgggaccaggaacaagtcatg

SEQ ID NO: 124332 - DNA, 2145 bp, Homo sapiens
atgctaaaaactctcaataaattacgtattgatgggacgtatctcaaaataataagagctatctatgacaaatccacagccaatatcatgctgaatgggcaaaaactggaagcattccctttgaaaactggcacaagacagggatgccctctctcaacactcctattcaacatagtgttggaagttctggccagggcaattaggcaggagaaggaaataaagggtattcagttaggaaaagaggaagtcaaattgtccctgtttgcagatgacatgattgtatatctagaaaaccccattgtctcagcccaaaatctccttaagctgataggcaacttcagcaaagtctcaggatacaaaatcaatgtacaaaaatcacaagcattcttatacaccaataacagacaaacagagagccaaatcatgagtgaactcccattcacaattgcttcaaagagaataaaatacctaggaatccaccttataagggacgtgaaggacctcttcaaggagaactacaaaccactcctcaatgaaataaaagaggatacaaacaaatggaagaacattccatgctcatgtataggaagaatcaatatcgtgaaaatggccatactgcccaaggtaatttatagattcaatgccatccccatcaagctaccaatgactttcttcacagaattagaaaaaactactttaaagttcatatggaaccaaaaaagagcccgcatcgccaagtcagtcctaagccaaaagaacaaagctggaggcatcacgctacctgacttcaaactatactacaaggctacagtaaccaaaacagcacggtactggtaccaaaacagagatatagatcaatggaacagaacagagccctcagaaataatgccgcatatctacaaatatctgatctttgacaaacttgagaaaaacaagaaatggggaaaggattccctatttaatcaatggtgctgggaaaactggctagccatatgtagaaagctgaaactggatcccttccttacaccctatacaacaatcaattcaagatggattaaagacttaaacgttagatctaaaaccataaaaaccctagaagaaaacctacgcattgccattcaggacactggcatgggcaaggacttcatgtctaaaacaccaaaagcaatggcaacaaaagccaaaattgacaaatgggatctaattaaactaaagagcttctgcacagcaaaagaaactaccatcagagtgaacaggcaacccacaaaatgggagaaaattttcgcaacctactcatctgacaaagggctaatatccagaatctacaatgaactcaaacaaatttacaagaaaaaaacaaacaaccccatcaaaaagtgggcgaaggacatgaacagacacttctcaaaagaagacatttatgcagccaaaaaacacatgaaaaaatgctcaccatcactggccatcagagaaatgcaaatcaaaaccacaatgagatatcatctcacaccagttagaatggcgatcattaaaaagtcaggaaacaacagtacgtttgactttggacaacatgagtttgaactacacaggtccacttatacgcggattgttttcagtaaaattacaccaatattggaagttctggccagggcaattaggcaggagaaggaaataaagggtattcaattaggaaaagaggaagtcaaattgtccctgtttgcagatgacatgattgtatatctagaaaaccccattgtctcagcccaaaatctcctcaagctgataggcaacttcagcaaagtctcaggatacaaaatcaatgtacaaaaatcacaagcattcttatacaccaataacagacaaacagagagccaaatcatgagtgaactcccattcacaattgcttcaaagagaataaaatacctaggaatccaacttacaagggacgtgaaggacctcttcaaggagaactacaaaccactgctcaatgaaataaaagaggatacaaacaaatggaagaacattccatgctcatgggtaggaagaatcaatattgtgaaaatggccatactgcccaaggtaatttatagattcaatgccatccccatcaagctacccatgactttcttcacagaattggaataa

SEQ ID NO: 124333 - DNA, 1816 bp, Homo sapiens
atgattatctcaatagatgcagaaaaggcctttgacaaaattcaacaacgcttcatgctaaaaactctcaataaattaggtattgatgggctgtatctcaaaataataagagctatctatgacaaacccacagccaatatcatactgaatgggcaaaaactggaagcactccctttgaaaactggcacaagacagggatgccctctctcaccactccaattcaacatagtgttggaagttctggccagggcaattaggcaggagaaggaaataaagggtattcaattaggaaaagaggaagtcaaattgtccctgcttgcagacgacatgattgtatatctagaaaaccccatcgtctcagcccaaaatctccttaaggtgataagcaacttcagcaaagtctcaggatacaaaatcaatgtacaaaaatcacaagcattcttatacaccaataacagacaaacagagagccaaatcatgagtgaactcccattcacaattgcttcaaagagaataaaatacctaggaatccaacttacaagggatgtgaaggacctcttcaaggagaactacaaaccactgctcaatgaaataaaagaggatacaaagaaatggaagaacattccatgctcatgggtaggaagaatcaatatcgtgaaaatggccatactgcccaaggtaatttatagattcaatgccatccccatcaagctaccaatgactttcttcacagaactggaaaaaactaccttaaagttcatatggtaccaaaaaagagcccgcatcaccaagtcaatcctaagccaaaggaacaaagctggagacatcacgctacctgacttcaaactatactacaaggctacagtaaacaaaacagcatggtactggcaccaaaacagacatatagatcaatggaacagaacaaagccctcagaaataacgctgcatatctacaactatctgttctttgacaaccctgacaaaaacaagaaatggggaaaggattccctatttaataaatggtgctgggaaaactggctagccatatgtagaaagctgaaactggatcccttccttacaccttatacaaaaattaattcaagatggattaaagacttaaacattagacctaaaaccataaaaaccctagaagaaaacctaggcattaccattcaggacataggcatgggcaagtacttcatgactaaaacaccaaaagcaatggcaacaaaagccaaaattgacaaatgggatctaattaaactaaagagcttctgcacaggcaaagaaactaccatcagagtgaacaggcaacctacaaaatgggagaaaattttcgcaacctactcatctgacaaagggctaatatccagaatctacaatgaactcaaacaaatttacaagaaaaaaacaaacaaccccatcaaaaagtgggcgaaggacatgaacagacacttctcaaaagaagacatttatgcagccaaaaaacacatgaaaaaatgctcaccatcactggccatcagagaaatgcaaatcaaaaccacaatgagataccatctcacaccaacccacttattgtcattggaattgaagaatgtctcagaggaaaagaaaaacttgaaacattatactattggaattcagacacggaccaccaggtctgatggctggggtggccgtaatggaagtcagaccacaaaaaggagcaacccagcttctgagagaacatttcagctaaagcataagttgatagatgtcacaatccaagttcttttagatttccacgcaggaacttcagagttggtgacaagaattg

SEQ ID NO: 124334 - DNA, 2079 bp, Homo sapiens
atggataaattcctcaacacatacaccatcccaagactaaaccaggaagaagttgaatctctgaatagatcaataacaggctctgaaattgaggcaataattaataacttaccaaccaaaagaagtccaggaccagatggattcacacctgaattctaccagaggtacaaggaggagctggtaccattccttctgaaactattccaatcaatagtaaaagagggattcctccctaactcattttatgagggcagcatcatcctgataacaaagtctggcagagacacaacaaaaaaagagaatttaagaccaatatccctgatgaacatcaatgcaaaaatcctcaataaaatactggcaaaccaaatccagcagcacatcaaaaagcttatccaccatgaacaagtggacttcatccctgggatgcaaggctggttcaacatacgcaaatcaataaatgtaatccagcatataaacagaaccaacgacaaaaaccacatgattatctcaatagatgcagaaaaggcctttgacaaaattcaacaactcttcatgctaaaaactctcaataaattaggtattgatgggacgtatctcaaaataataagagctatctatgacaaacacacagccaatatcatactgaatgggcaaaaactggaagcattccctttgaaaactggcacaagacagggatgccctctctcaccactcctattcaacatagtgttggaagttctggccagggcaatcagtcaggagaaggaaataaagggtattcaattaggaaaagaggaagtcaaattgtccctgtttgcagatgacatgattgtatatctagaaaaccccatcgtctcagcccaaaatctccttaagctgataggcaacttcagcaaagtctcaggatacaaaatcagtgtgcaaaaatcacaagcattcttatacaccaataagagacaaacagagagccaaatcatgagtgaactcccattcacaattgtttcaaagagaataaaatacctaggaatccaacttacaagggatgtgaaggacctcttcaaggagaactacaaaccactgctcaatgaaatacaagacgagacaaacaaatggaagaacatgctcatgggtaggaagaatcaatatcgtgaaaatggtcatactgcccaagaattggaaaaaactactttaaagttcatatggaaccaaaaaagagcccgcattgccaagacaatcctaagccaaaagaacaaagctggaggcatcacgctacctgacttcgaactacactacaaggctacagtaaccaaaacagcatgctacttgtaccaaaacagagatatagaccaaaggaacagaacagagccctcagaaataatgccgcatatctacaactatctgatctttgacaaatctgacaaaaacaagaaatggggaaaggattccctatttaataaatggtgctgggaaaactggctagccatatgtagaaagctgaaactggatcccttccttccaccttatacaaaaattaattcaagatggattaaagacttaaatgttagacctaaaaccataaaaactctagaagaaaacctaggcaataccattcaggacataggcatgggcaaggacttcatgtctaaaacaccaaaagcaatgtcaacaaaagccaaaattgacaaatgggatctaattaaactaaagagcttctgcacagcaaaagaaactgccatcagagtgaacagggaacctacagaatgggagaaaatttttgcaatctactcatctgacaaagggctaatatccagaatctacaatgaattcaaacaaatttacaagaaaaaaacaaacaaccccatcaaaaagtgggcaaaggatatgaacagacacttctcaaaagaagacatttatgcagccaacagacacatgaaaaaatgctcatcatcactggccatcagagaaatgcaaatcaaaaccacacaggttggaggcagtgaggaaaaaagtgccagtgaacttggaaataagttaatagaattggaccaatctgaagaatggagaggaaaagaagactga

SEQ ID NO: 124335 - DNA, 2685 bp, Homo sapiens; identical to SEQ ID NO: 121971

SEQ ID NO: 124336 - DNA, 1996 bp, Homo sapiens
atgattatctcaatagatgcagaaaaggcctttgacaaaattcaacaactcttcatgctaaaaactctcaataaattaggtattgatgggacatatctcaaaataataagagctatctatgacaaacccacagccaatatcatactgaatgggcaaaaactggaagcattccctttgaaaactggcacaagacagggatgtcctctctcaccactcctattcaacatagtgttggaagttctggccagggcaatcaggcaggagaaggaaataaagggcattcaattaggaaaagaggaagtcaaattgtccctgtttgcagatgacatgattgtctatctagaaaaccccattgtctcagcccaaaatctccttaagctgataagcaacctcagcaaagtctcaggatacaaaatcaacttgcaaaaatcacaagcattcttatacaccaataacagacaaacagagagccaaatcatgagtgaactcccattcacaattgcttcaaagagaataaaatacctaggaatccaacttacaagggatgcgacagatctcttcaaggagaactacaaaccactgctcaatgaaataaaagaggatacaaacaaatggaagaacattccatgctcatgggtaggaagaatcaatatcgtgaaaatggccatacttcccaaggtaatttatagattcaatgccatccccatcaagctaccaatgacttccttcacagaattggaaaaaactactttaaacttcttatggaaccataaaagagcccacactgccaagtcaatcctaagccaaaagaacaaaactggaggcatcatgctacctgacttcaaactatactacaaggctagagtaaccaaaacagcatggtactggtaccaaaacagagatgtagaccaatggaacagaacagagccctcagaaataatgctgcatatctacaactatctgatctttgacaaacctgagaaaaacaagcaatggggaaaggattccctatttaataaatggtgctgggaaaactggctagccatatgtagaaagctgaaactggatcccttccttacaccttatacaaaaattaattcaagatggattaaagacttaaatgttagacctaaaaccataaaaaccctagaagaaaacctaggcaataccattcaggacataggcatgggcaaggacttcatgtctaaaacaccaaaagcaatggcaacaaaaaccaaaattgacaaatgggatctaattcaactaaagagcttcttctgcacagcaaaagaaactaccatcagagtgaacaggcaacctacagaatgggagaaaatttttgcaacctactcatctgacaaagggctaatatctagaatctacaatgaactcaaacaaatttacaagaaaaaaacaaacaaccccatcaaaaagtggacaaacgatatgaacagacacttctcaaaagaagacatttatgcagccaaaaaacacatgaaaaaatgctcatcattaccggccatcagagaaatgcaaatcaaaaccacaatgagataccatctcacaccagttagaatcgcgatcattaaaaagtcaggaaacaacagcaaagtggatgatatccatgctatctgtagccttcttaaagactttcttcgaaacttcaaagaacctcttctgacctttcgcctaaacaaagcctttatggaagcagcagaaatcacagatgaagacaacagcatatctgccatgtaccaggctgttggtgaactgccccaggccaacagggacacattggttttcctcatgattcacttgcagagagtggctcagagtccatatactaaaatgaatgttgccaatctggctgaagtctttggctctacaatagtggcccatgctgtgcccaatccagaaccagtgacgatgttacaggacatcaagtgtcaacccaaggtggtcgagcgcctgccttccttgcccctggagtactgga

SEQ ID NO: 124337 - DNA, 1816 bp, Homo sapiens
atgattatctcaatagatgcagaaaaagcctttgacaaaattcaacaacccttcatgctaaaaactctcaataaattaggtattgatgggacatatctcaaaataataagagctatctatgacaaacccacagcaaatatcataccgaatgggcaaaaactggaagcattccctttgaaaactggcacaacacagggatgccctttctcaccactcctattcaacatagtgttggaagttctggccagggtaatcaggcaggagaaggaaataaagggtactcaattaggaaaagaggaagtcacattgtccctgtttgcagatgacatgattgtatatctacaaaaccccattgtctcagcccaaaatctccttaagctgataggcaacttcagcaaagtctcaggatacaaaatcaatgtgcaaaaatcacaagcattcttatacaccaataacagacaaacagagagccaaatcatgagtgaactcccattcacaattgcttcaaagagaataaaatacctaggaatccaacttacaagggacgtgaaggacctcttcaaggagaactacaaaccactgctcaaggagataaaagaggatacaaacaaatggaagaacattccatgctcatgggtaggaagaatcaatatcgtgaaaatggccatactgcccaaggtaatttatcgattcaatgccatccccatcaagctaccaatgactttcttcacagaattggaaaaaactactttaaagttcaaatggaaccaaaaaagagcctgcattgccaagtcaatcctaagccaaaagaacaaagctggaggcatcatgctacccgacttcaaactatactacaaggctacagtaatcaaaacagcatggtactggtaccaaaacagagatatagaccaatggaacagaacagagccctcagaaataatgccgcatatctacaactatctgatcttcgacaaacctgaccaaaacaagcaatggggaaaggattccctatttaataaatggtactgggaaaactgcctagccatatgtagaaagctgaaactagatcccttccttacaccttatacaaaaattaattcaagatggattaaagacttaaatgttagacttaaaaccataaaagccctagaagaaaacctaggcaataccattcaggacataggcatgggcaaggacttcatgtctaaaacaccaaaagcaatggcaacaaaagacaaaattgacaaatgggatctaattaaaccaaagagcttctgcacagcaaaagaaactaccatcagagtgaacaggcaacctacaaaatgggagaaaattttcgcaacctactcatctgacaaagggctaatatccagaaactacaatgaactcaaacaaatttacaagaaaaaaacaatcggccccatcaaaaagtgggcagaggatatgaacaggcacttctcaaaagaagacacttatgcagccaaaaaacacatgaaaaaatgctcatcatcactggccatcagagaaatgcaaatcaaaaccacaatgagataccatctcacaccagttagaatggtgatcattaaaaagtcaggaaacaacaggtgctggagaggatgtggagaaacaggaacactttcacactgttggtgggactgtaaactaatcaaccattgtggaatttttgagagattaaggaccgaagactggtggggactcataaatgatacaagtaaagtattagccacaacagaagaaaaaggggtgcccaaacgcataatcttgaaatttgatgtctgtgctgtcattaatagca

SEQ ID NO: 124338 - DNA, 2876 bp, Homo sapiens
acccaataaaaaatgataaaggggatatcaccactgatcccacagaaatacaaactaccatcagagaatactataaacacctctatgcaaataaactagaaaatctagaagaaatggataaattcctcgacacatacaccctcccaagactaaaccaggaagaagttgaatctctgaatagaccaataacaggctctgaaattgaggcaataattaatagcttaccaaccaaaaaaagtccaggaccagatggattcacatccgaattctaccagaggtacaaggagacagtggtttgccggctttcgccgccaagttttaatggggggctccctttagggtccgatttagtgttttacgcccctggaccccaaaaaattatttgggtgatggttcacgtaggggccctcgccctgaaagacggtttttcgcccttggacgttggagtccacggattttgccgatttcggaaccaccatcaaacaggattttcgcctgctggggcaaaccagcgtgacccgcttgctgcaactctctcagggccaggcggtgaagggcaatcagctgttgcccgtctcactggtgaaaagaaaaaccaccctggcgcccaatacgcaaaccgcctctccccgcgcgttggccgattcattaatgcagctggcacgacaggtttcccgactggaaagcgggcagtgagcgcaacgcaattaatggtaaaggacgatgtcacttatgcaataaagctctcttgctggccggggcttgacattattccttcctgtctggctctgcaccgcattgaaactgagttaatgggcaaatttgataaaggtagactgcccacccatccacacttgatgctccgactggccattgaaactgttgctcatgactatgatgtcatagttattgacagcgcgcctaacttgggtatcggcacgattaatgtcgtatgtgctgcagatgtgctgattgttcccacgcctgctgagttgcttgactacacctccgcactgcagtttttcgatatgcttcgtgatctgctcaagaacgttgatcttaaagggttcgagcctgatgtacgtattttgcttaccaaatacagcaatagtaatggctctcagtccccgtggatggaggagcaaattcggcaggcctggggaagcatggttctaaaaaatgttgaattttgccgatttcggaccccccatcaaccaggattttcgcctgctggggcaaaccagcgtggaccgcttgctgcaactctctcagggccagccggtgaagggcaatcagctgttgcccgtctcactggtgaaaagaaaaaccaccctggcgcccaatacgcaaaccgcctctccccgcgcgttggccgattcattaatgcagctggcacgacaggtttcccgactggaaagcgggcaggaattcgggaaatatctgacttaatgatcattggcgagacagtaatcacaagatcccccacaggcactaggtcgcccgtgggtcaattccttgcagtttggggagggaaattaccctctccagcttttggaagcgggagtagggattttgccgatttcggaaccaccatcaaacaggattttcgcctgctggggcaaaccagcgtggaccgcttgctgcaactctctcagggccaggcggtgaagggcaatcagctgttgcccgtctcactggtgaaaagaaaaaccaccctggcgcccaatacgcaaaccgcctctccccgcgcgttggccgattcattaatgcagctggcacgacaggtttcccgactggaaagcgggcaggcgtggtctttatgtacacccattatgtggttttatcctcgtgcattttctcgtctgcgtcaactaactaggtattctagctcggggggtgtcgcggggtgtcactcgggcaaaccgagtcgcaagctttcgacactcgggttcgcgtcgctggtacaacattcaaccctatctcgggctactcttttgatttataagggattttgccgatttcggaacccccatcaaacaggattttcgcctgctggggcaaaccagcgtggaccgcttgctgcaactctctcagggccaggcggtgaagggcaatcagctgttgcccgtctcactggtgaaaagaaaaaccaccctggcgcccaatacgcaaaccgcctctctccgcgcgttggccgattcattaatgcagctggcacgacaggttttccgactggaaagcgggcagtgagcgcaacgcaattaatggattttgccgatttcggaaccaccatcaaacaggattttcgcctgctggggcaaaccagcgtggaccgcttgctgcaactctctcagggccaggcggtgaagggcaatcagctgttgcccgtctcactggtgaaaagaaaaaccaccctggcgcccaatacgcaaaccgcctctccccgcgcgttggccgattcattaatgcagctggcacgacaggtttcccgactggaaagcgggcaggattttgccgatttcggaaccaccatcaaacaggattttcgcctgctggggcaaaccagcgtggaccgcttgctgcaactctctcagggccaggcggtgaagggcaatcagctgttgcccgtctcactggtgaaaagaaaaaccaccctggcgcccaatacgcaaaccgcctctccccgcgcgttggccgattcattaatgcagctggcacgacaggtttcccgactggaaagcgggcagttggcgggctttccccgtcaagctcttaatcgggggctccctttagggttccgatttagtgctttacggcacttggaccccaaaaaacttgatttgggtgatggttcacgtagtgggccatcgccctga

SEQ ID NO: 124339 - DNA, 1935 bp, Homo sapiens
atgattatcccaatagatgcagaaaaggcctttgacaaaattcaacagcccttcatgctaaaaactctcaataaattaggtattcatgggatgtatctcaaaatcataagagctatttatgacaaacccacagccaatatcatattgaatgggcaaaaactggaagcattccctttgaaaactggcacaagacagggatgccctctcccaccactcctattcaacatagtgttggaaattctggccagggcaatcaggcaggagaaagaaataaagggtattcaattaggaaaagaggaagtcaaattgtccctgtttgcagatgacatgattatatatttagaaaaccccattgtctcagcccaaaatctccttaagctgataagcaacttcagcaaagtctcaggatacaaaatcaatgtgcaaaaatcacaagcattcttatacaccaataacagacaaacagagagccaaatcctgagtgaactcccattcacaattgcttcaaagagaataaaatacttaggaattcaacttacaagggatgtgaaggacctcttcaaggagaactacaaaccactgctcaacgagataaaagaggacacaaacaaatggaagaacattccatgcttatcgataggaaaaatcaatatcatgaaaatggccatactgcccaaagtaatttatagattcaatgccatccccatcaagctaccaatgactttcttcacagaattggaaaaaactactttaaagttcatatggaaccaaaaaagagcccgcattgccaagacaatcctaagccaaaagaacaaagatggaggcatcacactacctgacttcaaactatactacaaggctacagtaaccaaaacagcatggtaccagtaccaaaacagagatatagaccaatggaacagaacagagccctcagaaataataccacacgtctacaaccatctgatctttgacaaacctgacaaaaacaagaaatggggaaaggattccctatttaataaatggtgctgggaaaactggctagccatatgtggaaagctgaaactggatccgttccttacaccttatacaaaaattaattcaagatggattaaagacttaaatgttagacctaaaaccataaaaaccctagaagaaaacctaggcaataccattcaggacataggcatgggcaaggacttcatgtctaaaataccaaaagcaatggcaacaaaagccaaaattgacaaatggaatctaattgaactaaagagcttctgcacagcaaaagaaactaccatcagtgtgaacaggcaacctacagaatgggagaaaatttttgcaatctgcttatctgacaaagggctaatatccagaatctacaaagaactcaaacaaagacacaagaaaaaaacaaacaaccccatcaaaaagtgggcgaaggatatgaacagacacttctcaaaagaagacatttatgcagccaacagacacatgaaaaaatgctcatcatcactggccatcagagaaatgccaatcaaaaccacaatgagataccatctcacaccagttagaatggcgatcattaaaaagtcaggaaacaacagatgctggagaggatgtggagaaataggaacgctttcacactgttggtgggactgtaacctagttcaaccattgtggaaggcagtgtggcgattccttaaggatctagaactagaaataccatttgacccagccatctcattactgggttatacccaaaggattataaatcatgctgctataaagacacatgcacacaaagcactttcacatgcagacaacatcttccgctataattgcttcattgaccatctcttagaacttgccaatcaatcttccaaactgccacctctgtccctcaacagacaatgtgagaatatagatattttctga

SEQ ID NO: 124340 - DNA, 2046 bp, Homo sapiens
atggagaaattcctcgacacatacactctccgaaggctaaaccaggaagaagttgaatctctgaatagaccaataacaggatctgaaattgtggcaataatcaatagcttaccaaccaaaaagaatccaggaccagatggattcacagccgaattctaccagagagctatctatgacaaacccacagccagtatcatactgaatgggcaaaaactggaagcattccctttgaaaactggcacaagacagggatgccctctctcaccactcctattcaacatagtgttggaagttctggccagggcaattaggcaggagaaggaaataaagggtattcaattaggaaaagaggaagtcaaattgtccctgtttgcagacgacatgattgtatatctagaaaaccccactgtctcagcccaaaatctccttaagctgataagcaacttcagcaaagtctcaggatacaaaatcaatgtgcaaaaatcacaagcattcttatacaccaataatagacaaacagagagccaaatcatgagtgaactcccattcacaattgcttcaaagagaataaaatacttaggaatccaacttacaagggacgtgaaggacctcttcaaggagaactacaaaccactgctcaaggaaataaaagaggatacaaacaaatggaagaacattccatgctcatgggtaggaagaatcaatattgtgaaaatggccatactgcccaaggtaatgtatagattcaatgccatccccatcaagctaccagtgactttctgcacagaattggaaaaaactactttaaagttcatatggaaccaaaaaagagcccgcatcaccaagtcaatcctaagccaaaagaacaaagctggaggcatcacgctacctgacttcaaactatactacaaggctacagtaaccaaaacagcatggtactggtaccaaaacagagatatagatcaatggaacagaacagagccctcagaaataacgccgcatatgtacaactatctgatctttgacaaacctgagaaaaacaagcaatggggaaaggattccctatttaataaatggtgctgggaaaactggctagccatatgtagaaagctgaaactggatcccttccttacacattatacaaaaattaattcaagttggattaaagacttaaacgttagacctaaacccataaaaaccctagaagaaaacctaggcattaccattcaggacataggcatgggcaaggatttcatgtctaaaacaccaaaagcaatggcaacaaaagccaacattgacaaatgggatctaattaaactaaagagcttctgcacagcaaaagaaactaccatcagagtgaaaaggcaacttacaaaatgggagaaaattttcgcaacctactcatctgacaaagggctaatatccagaatctacaatgaactcaaacagatttacaagaaaaaaacaaacaaccccatcaaaaagtgggcaaaggatatgaacagacacttctcaaaagaagacatttatgcagccaaaagacacatgaaaaaatgctcatcatcactggccatcagagaaatgcaaatcaaaaccacaatgagataccatctcacaccagttagaatggcaatcattaaaaagtcaggaaataacagaccggccttaggacctggcgcagcacggaatgaggcttcgaggccggctaggggaggccgtcgctcatatccgacgtcaccagttcgcgccggcgatagacgaggacgccaacagcagcggagaaacgtttctctttcctctcagtttgcgcacaccatggcggcccctgcccagcagactactcagcctggcggcgggaagcgcaaaggcaaggctcagtatgtgctggccaagcgcgctcggcgctgcgacgctggcgggccccgtcagctagagcccgggctacagggcatcctcatcacctgcaatatgaacgagcgcaagtgcgtggaggaggcctacagcctcctcaacgaatacggcgacgacatgtatgggccagaaaag

SEQ ID NO: 124341 - DNA, 1700 bp, Homo sapiens
atggaagatgaaatgaatgaaatgaagcaagaagggaagtttagagaaaaaagaataaaaagaaacgaacaaagcctccaagaaatatgggactatgtgaaaagaccaaatctgcgtctgattggtgtacctgaaagtgacggggagaatggaaccaagttggaaaacactctgcaggatattatccaggagaacttccccaatctagcaaggcagaccaacattcagattcaggaaatacaaagaatgccacaaagatactcctcgagaagagcaactccaagacacataattgtcagattcaccaaagttgaaatgaaggaaaaaatgtcaagggcagccagagagaaagaaatacaaactaccatcagagaatactacaaacacctctacgcaaataaactagaaaatctagaagaaatggataaattcctcgacacatgcactctcccaagactaaaccaggaagaagttgaatctctgaatagaacagtaacaggatctgaaattgtggcaataatcaatagcttaccaaccaaaaagagtccaggaccagatggattcacagccgaattctaccagagacaatcagagagccaaatcatgagtgaattcccattcacaattgcttcaaagagaataaaatacctaggaatccaacttacaagggatgtgaaggatctcttcaaggagaactacaaaccactgctcaatgaaattaaagaggatacaaagaaatggaagaacattccatgctcatgggtaggaagaatcaatatcgtgaaaatggccatactgcccaaggtaatttatacattcaatgccatccccatcaagctaccaatgactttcttcacagaattggaaaaaactactttcaagttcatatggaatcaaaaaagagcccacgtcgccaagtcaatcctaagccaaaagaacaaagctggaggcatcacgctacctgacttcaaactatactacaaggctacagtaaccaaaacagcatggtactggtaccaaaacagagatatagatcaatggaacagaacagagccctcagaaataatgctgcatatctacagctatctgatctttgacaaacctgagaaaaacaagcaatggggaaaggattccctatttaataaatgggtgctgggaaaactgggctagccatatgtagaaagctgaaactggatcccttccttacaccttatacaaaaattaattcaagatggattaaagacttaaacattagacctaaaaccatagaaaccctagaagaaaacctaggcattaccattcaggacataggcatgggcaaggacttcatgtctaaaacatcaaaagcaatgtcaacaaaagccaaaattgacaaatgggatctaattaaactaaagagcttctgcacagcaaaagaaactaccatcaaagtgaacaggcaacctacaaaatgggagaaaattttcgcaacctactcatctgacaaagggctaatatccagaatctacaatgaactcaaacaaatttacaagaaaaaaaacaaacaaccccatcaaaaagtgggtgaaggatatgaacagacacttctcaaaagaagacatctatgcagccaaaagacacatgaaaaaatgctcatcatcactggccatcagagaaatgcaaatcaaaaccacaatgagataccatctcacaccagttag

SEQ ID NO: 124342 - DNA, 3213 bp, Homo sapiens; identical to SEQ ID NO: 116408

SEQ ID NO: 124343 - DNA, 2022 bp, Homo sapiens; identical to SEQ ID NO: 123218

SEQ ID NO: 124344 - DNA, 3147 bp, Homo sapiens
atgggagactttaacaccccactgtcaacattagacagatcatcgagacagaaagttaacaaggatacccaggaattgaactcaactctgcaccatgcggacctaatagacatctacagaactctccacccgaaatcaactgaatatacatttttttcagcaccacaccacacctattccaaaattgaccacgtagttggaagtaaagctctcctcagcaaatgtaaaagaacagaaattataacaaactgtctctcagaccacagtgctatcaaaccagaactcaggattaagaaactcactcaaaaccgctcaactacatggaaactgaataacctgctcctgaatgactactgggtgcataacaaaatgaaggcagaaataaagatgttctttgaaaccaacgagaacaaagacacaacataccagaatctctgggacacattcaaagcagtgagtagagggaaatttatagcactaaatgcccacaagagaaagcagaaaagatgcaaaattgacaccctagcatcacaattaaaagaagtagaaaagcaagagcaaacacattcaaaagctagcagaaggcaagaaataactaaaataagagcagaactgaaggaaatagagacacaaaaaacccttcaaaaaattaatgaatccaggagctggtttcttgaaaggatcaacaaaattgatagaccactagcaagactaataaagaagaaaagagagaagaatcaaatagatgtaataaaaaatgataaaggggatatcaccactgatcccacagaaatacaaactaccatcagagaatactacaaacacctctacgcaaataaactagaaaatctagaagaactggataaattcctcgacacacacaccctccaaagactaaaccaggaagaagttgaatccctgaatagaccaataacaggctctgaaattgtggcaataatcaatagcttaccaaccaaaaagagtccaggaccagatggatccacagccgaattctaccagaggtacaaggaggagctgttaccattccttcttaaattattccaatcaatagaaaaagagggaatcctccctaactcattttatgaggccagcatcatcctgataccaaagccgggcagagacacagccaaaaaagagaattttagaccaatatccttgatgaacattgatgcaaaaatcctcaataaaatactggcaaaccaaatccagcagcacatcaaaaagcttatatacaccatgatcaagtgggcttcatccctgggatgcaaggctgtgttggaagttctggccagggcaattaggcaggagaaggaaataaagggtattcaattaggaaaagaggaagtcaaattgtccctgtttgcagatgacatgattgtatatctagaaaaccccatcgtctcagcccaaaatctccttaagctgataagcaacttcagtaaagtctcaggatacaaaatcaatgtacaaaaatcacaagcattcttatacaccaataacagacaaacagagagccaaatcatgagtgaaatcccattcacaattgtttcaaagagaataaaatacctaggaatccaacttacaagggacatgaaggacctcttcaaggagaactacaaaccactgctcaatgaaataaaagaggatacaaacaaatggaagaacattccatgctcatggctaggaagaatcaatatggtgaaaatggccatactgcccaaggtaatttatagattcaatgccatcctcatcaagctagcaatgactttcttcacagaatcggaaaaaactactttaaagttcatatggaaccaaaaaagagcctgcatcgccaagtcaatcctaagccaaaagaacaaagtcataggcatcacgctacctgacttcaaactatactacaaggctatagtcaacaaaacagcatggtactggtaccaaaacagagatatagatcaatggaacagaacagagccctcagaaataacaccgcatatctacaactatctgatctttgacaaacctgagaaaaacaagcaatggggaaaggattccctatttaataaatggtgctgggaaaactggctagccatatgtagaaagctgaaactggatcccttccttacaccttatacaaaaattaattcaagatggattaaagacttccatgttagacctaaaaccataaaaaccctagaagaaaacctaggcattaccattcaggacataggcatggacaaggacttcatgtctaaaacaccaaaagcaatggcaacaaaagccaaaattgacaaatgggatctaatcaaactaaagagcttctgcagagcaaaagaaactaccatcagagtgaacaggccacctacagaatgggagaaaattttcgtaacctactcatctgacaaagggctaatatccagaatctacaatgaactcaaacaaatttacaagaaaaaaacaaacaaccccatcaaaaagtgggcaaaggacatgaacagacacttctcaaaagaatacatttatgcagccaaaagagacatgaaaaaatgctcatcatcactggccatcagagaaatgcaaatcaaaaccacaatgagataccatctcacaccagttagaatggtgatcattaaaaagtcaggaaacaacaggtgctggagaggatgtggagaaataggaacacttttacactgttggtgggactgtaaactagttcatccattgtggaagtcagtgtggcgattcctcagggatctagaactagaaataccatttgacccagccatcctattactgggtatatacccaaaggattataaatcatgctgctataaagacacatgcacacatgagaaagcagagatccagaaaagtaaaggaatcagagattatggagaaataggtactagaactgaggatatggactcccagttcagacctctttccgttgttcgggcacaaattatcccctttgaatttccctgggaaggaatacctctgggtggacccttcccccggcattcctgcagctaccctgtgggcctagcccttttgtaccacagtagctcagcagctggaccagtgagaggacacctctccctgcagtggaattccaggatgactagttga

SEQ ID NO: 124345 - DNA, 2277 bp, Homo sapiens; identical to SEQ ID NO: 119544

SEQ ID NO: 124346 - DNA, 2253 bp, Homo sapiens; identical to SEQ ID NO: 123239

SEQ ID NO: 124347 - DNA, 825 bp, Homo sapiens
atgccccacttccacctaaaagtggactcgccagccagaagacttcacatcctgcaccgctactcacgtcgatgtttccgcagactagatgctcgcccgctgcggtccttatccctcatcttaaaattggaggaaacctggtgtttagtaacttcctacagcacgagagttcgagaggactcactcacagaggcatgctgcgatttcagcccagctgcatgctgctgctattttggggtagcaagaagcataaaggcaaaactgtactggcttcgtgtctccttcctgagaccctacatctgctccaccgaggctgaccctggaaccagtgctggatctctgatgactaggaggacccggtggttaccagggtcccacagccagtctgcagacctgcccaggcatgacagtgtttccatgtcctcatcaaaacgagagaaaagacggctggaaatacaaactaccatcagagaatactataaacacctctacgcaaataaactagaaaatctagaagaaatggataaattcctggacacatacaccctcccaagactaaaccaggaagaagttgaatccctgaatagaccaataacaggctctgaaattgaggcaataattaatagcctaccaatcaaaaaaagtccaggaccagacggattcacagccaaattctaccagaggtacaaagacgagctgatcgtgagctctgtgggaacattgcccaggcttgtcttgttcaccaacgtgcttccagtgcctggcactgtgctcaacccctccacgccctcgctcaaactcaatcgatgtttgatagaaagatga

SEQ ID NO: 124348 - DNA, 3012 bp, Homo sapiens
atgaaggcagaaataaagatgttctttgaaaccaacgagaacaaagacaccacataccagaatctctgggacgcattcaaagcagtgtgtagagggaaatttatagcactaaacgcctacaagagaaagcaggaaagatccaaaattgacaccctaacatcacaattaaaagaactagaaaagcaagagcaatcacattcaaaagctggcagaaggcaagaaataactaaaatcagagcagaactgaaggaaatagagacacaaaaaacccttcaaaaaatcaatgaatccaggagctggttttttgaaaggatcaacaaaattgatagaccgctagcaagactaataaagaaaaaaagagagaagaatcaaatagacacaataaaaaatgataaaggggatatcaccaccaatcccacagaaatacaaactaccatcagagaatactacaaacacctctacgcaaataaactagaaaatctagaagaaatggatacattcctcgacacatacaccctcccaagactaaaccaggaagaagttggatctctgaatacaccaataacaggctctgaaattgtggcaataatcaatagtttaccaaccaaaaagagtccaggaccagatggattcacagccgaattctaccagaggtacaaggaggaactgccgggcagagtaccaacgaaaaaagagaattttagaccaatatccttgatgaacattgatgcaaaaatcctcaataaaatactggcaaaccgaatccagcagcacatcaaaaagcttatccaccatgatcaagtgggcttcatccctgggatgcaaggctggttcaatatacgcaaatcaataaatgtaatccagcatataaacagagccaaagacaaaaaccacatgattatctcaatagatgcagaaaaagcctttgacaaaattcaacaacccttcatgctaaaaactctcaataaattaggtattgatgggacgtatttcagaataataagagctatctatgacaaacccacagccaatatcatactgaatgggcaaaaactggaagcattccctttgaaaactggcacaagacagggatgccctctctcaccgctcctattcaacatagtgttggaagttctggccagggcaatcaggcaggagaaggaaataaagggtattcaattaggaaaagaggaagtcaaattgtccctgtttgcagacgacatgattgtttatctagaaaaccccattgtctcagcccaaaatctccttaagctgataagcaacttcagcaaagtctcaggatacaatttctatgtacaaaaatcacaagcattcttatacaccaacaacagacaaacagagagccaaatcatgagtgaactcccattcacaattgcttcaaagagaataaaatacctaggaatccaacttacaagggatgtgaaggacctcttcaaggagaactacaaaccactgctcaaggaaataaaagaggacacaaacaaatggaagaacattccgtgctcatgggtaggaagaatcaatatcgtgaaaatggccatactgcccaaggtaatttacagattcaatgccatccccatcaagctaccaatgactttcttcacagaattggaaaaaactactttaaagttcatatggaaccaaaaaagagcccgcatcgccaagtcaatcctaagccaaaagaacaaagctggaggcatcacactacctgacttcaaactatactacaaggctacagtaaccaaaacagcatggtactggtaccaaaacagagatatagatcaatggaacagaacagagccctcagaaataatgccgcatatctacaactatctgatctttgacaaacctgagaaaaacaagcaatggggaaaggattccctatttaataaatggtgctgggaaaactggctagccatatgtagaaagctgaaactggatcccttccttacaccttatacaaaaatcaattcaagatggattaaagatttaaatgttagacctaaaaccataaaaaccctagaagaaaacctaggcattaccattcaggacataggcgtgggcaaggacttcatgtccaaaacaccaaaagcaatggcaacaaaagccaaaattgacaaatgggatctaattaaactaaagagcttctgcacagcaaaagaaactaccatcagaaaactgaaaggatcagcattcccagcttttaaagtagatgcttcctgtgagacccagcgcccagaagccactcacagacccttgcgggtgtctcttcacatgctgttcagtgccattgtagagatgaggcatccagaaacgtttgaccttgtgcaagaacttggcatccacttctgtcctccttcttccctagaagggaagcgctggactgggatcattagcatgagcaggcagtgctgccagctgcccgcctgtgtcctctgggctccggctgaatggctgccatcagaaaaacaaaataacaacagcaacaacaacaaaaatcgaatgttggtgaggatgtggagaaaaggaaattcttatattacattcttgggctcagtacaaaatgaaaatgcaggccccctaagaatttcaagccagcgacaaaagccggaccgccagatggaaaaagctgagcacggtcacatagacctcagtcaggcaccgtgtatgaaatctaacaatgcgctcatcgtcatcctcggcaccgtcaccctggatgctgtaggcataggcttggttatgccggtactgccgggcctcttgcgggatatcgtccattccgacagcatcgccagtcactatggcgtgctgctagcgctatatgcgttgatgcaatttctatgcgcacccgttctcggagcactgtccgaccgctttggccgccgcccagtcctgctcgcttcgctacttggagccactatcgactacgcgatcatggcgaccacacccgtcctgtggatctacccactagtcaattcaccatcttgttga

SEQ ID NO: 124349 - DNA, 2461 bp, Homo sapiens
gatcaacaaaattgatagaccgctagcaagactaataaagaaaaaaagagagaagaatcaaatagatgcaataaaaaatgataaaggggatatcaccaccgatcccacagaaatacaaactaccatcagagaatactacaaacacctctacgcaaataaactagaaaatctagaagaaatggataaattcctcgacacatacactctcccaaggctaaaccaggaagaagttgaacctctgaatagaccaataacaggatctgaaattgtggcaataatcaatagcctaccaactaaaaagagtccaggaccagatggattcacagccgaattctaccaggggtacaaggaggaactggtaccattccttctgaaactattccaatcaatagagaaagagagaatccaccctaactcactttatgaggccagcatcatcctggtactaaagccagccagagacacaaccaaaaaagagaattttagaccaatatccttgatgaacattgatgcaaaatcctcaataaaatactggcaaaccgaatccagcagcacatcaaaaagcttatccaccatgatcaagtggcttcatccctgggatgcgaggctgcatataaacagaaccaaagacaaaaaccacatgattatctcaatagatgcagaaaaggcctttgacaaaattcaacaacccttcatgctaaaaactctcaataaattaggtattgatgggacgtatctcaaaataataagagctatctatgacaaacccacagccaatatcatactgaatgggcaaaaactggaagcattccctttgaaaactggcacaagacagggatgccttctctcaccactcctattcaacatagtgttggaagttctggccagggcaattaggcaagagaaggaaataaagggtattcaattaggaaaagaggaagtcaaattgtccctgtttgcagatgaaatgattgtatatctagaaaacccaattgtctcagcccaaaatctccttaagctgataagcaaattcagcaaagtctcaggatacaaaatcaatgtacaaaaatcacaagcactcttatacaccaaaaacagacaaacagagagccaaatcatgagtgaactcccattcacaattgcttcaaagagaataaaatacctaggaatccaacttacaagggacgtgaaggacctcttcaaggcgaactacaaaccactgctcagtgaaataaaagaggatacaaacaaatggaagaacattacatgctcatgggtaggaataatcaatatcgtgaaaatggccatactacccaagataatttacgcattcaatgccatccccatcaagctaccaatgactttcttcacagaattggaaaaaactactttaaagttcatatggaaccaaaaaagagcccgcatcgccaagtcaatcctaagccaaaagaacaaagctggaggcatcacactacctgacttcaaactatactacaaggctacagtaaccaaaacagcatggtactggtaccaaaacagagatatagaccaatggagcagaacagagccctcagaaataacgccgcatatctacaaccatctgatctttgacaacaaacctgagaaaaacaagcaatggggaaaggattccatgtttaataaatggtgctgggaaaactggctagccatatgtagaaagctaaaactggatcccttccttacaccttatacaaaaatcaattcaagatggattaaagacttaaacttcagacctaaaaccataaaaaccctagaagaaaacctaggcattaccattcaggacataggcatgggcaagggcttcatgtctaaaacaccaaaggcaatggcaacaaaagccaaaattgacaaatggaatctaattcaactaaagagcttctgcacagcaaaagaaactaccatcagagtgaacaggcaacctacaaaatgggagaaaattttcgcaacctactcatctgacaaagggctaacatccagaatctacaatgaactcaaacaaatttacaagaaaaaaacaaacaaccccatcaaaaagtgggtgaaggacatgaacagacacttctcaaaagaagacatttatgcagccaaaaaacacatgaaaaaatgctcaccatcactggccatcagagaaatgcaaatcaaaaccacaatgagataccatctcacaccagttagaatggcaatcattaaaaagtcaggaaacaacagttcactgaacaatgtgatgaaaggaaatgatgaactgggggattctgtctcccggtttcagaagcagacactgagcctcaaatctgctaagattgccctgtgtgagagtcttatctcctgtagagaaagagctaaaattgtggaaaaacagacacaagctcttatcatgagagtggctgacctgaaacaaaaggtgcatgcacagccttgccag

SEQ ID NO: 124350 - DNA, 1795 bp, Homo sapiens
atgattatctcaatagatgcagaaaaggcctttgacaaaattcaacaacccttcatgctaaaaactctcaataaattaagtattgatgggacgtatttcaaaataataagagctatctatgacaaacccacagccaatatcatactaaatgggcaaaaactggaagcattccctttgaaaactggcacaagacagggatgccctctctcaccactcctattcaacatagtgttggaagttctggccagggcaattaggcaggagaaggaaataaagggtattcaattaggaaaagaggaagtcaaattgtccctgtttgcacacgacatgattgtatatctagaaaaccccattgtctcagcccaaaatctccttaagctgataagcaacttcagcaaagtctcaggatacaaaatcaatgtacaaaaatcacaagcattcttatacaccaacaacagacaaacagagagccaaatcatgagtgaactcccattcacaattgcttcaaagagaataaaatacctaggaattcaacttacaagggatgtgaaggacctcttcaaggagaactacaaaccactgctcaaggaaataaaagaggatacaaacaaatggaagaacattccatgctcaggagtaggaagaatcaatatcgtgaaaatggccatactgcccaaggtaatttacagattcaatgccatccccatcaagctaccaatgactttcttcacagaattggaaaaaactactttaaagttcatatggaaccaaaaaggagcctgcatcaccaagacaatcctaagcccaaaagaacaaagttggaggcatcacgctacctgacttcaaactatactacaaggctacagtaaccaaaacagcatggtactggtaccaaaaacagagatatagatcaatggaacagaataaagccctcagaaataatgccacattatctacaactatctgatctttgacaaacctgagaaaaacaggcaatggggagaggattccctatttaataaatggtgctgggaaacctggctagccatatggagaaagctgaaactggatcccttccttacactttatgcaaaaattaactgaagatggattaaagacttaaacgttagacctaaaaccataaaaaccctagaagaaaacctaggcattaccatgccaggaccataggcatgggcaaggacttcatgtccaaaacaccaaaagcaatggcaacaaaagccaaaattgacaaatgggatctaattcaactaaagagctactgcacagcaaaagaaaataccatcagagtgaacaggcaacctacaaaatgggagaaaattttcgcaacctactcatctgacaaagggctaataaccagaatctacaatgaactcaaacaaatttacaagaaaaaaacaaacaaccccatcaaaaagtgggcaaaggacatgaacagacacttctcaaaagaagacatttatgcagccaaaaaacacatgaaaaaatgctcatcatcactggccatcagagaaatgcaaatcaaaaccacaatgagataccatctcacaccagttagaatggcaatcattcaaaagtcaggaaacaacagaacaaagagaactatttatagaaggaatgatgatgatgatgacaatgatgataatgatgatgatagtttgatgagcctcagccgcactgagattcctttttccagttactcagagctaaatgtagtccttcacaagccaaggcctgagccctctgccagcaccatcctccttttacacacagctag

SEQ ID NO: 124351 - DNA, 2851 bp, Homo sapiens
atgtctggctttctgatctctcctaaacataagcatggcactaactctggaattgtcagttgggcagatgtacagagtcagctcaggcacatagaagcagcatttgaccaggaggctgcggcagtgttgatggcacggcttggggtgttccgagcggagtcagaggaggggcccgatgtgctccggtggctggaccgacaactcatccgactgcactctctactgacaacgcttgatatcgtgccagctggcaaaggagaggtagtgaaagggcccatgtccatttcacagcaggcaaaggggtgtcaaaagtttggacagtataacaaagaagaccccacttcttttaggttatcagattccttttctctatatcctcagtttatgttccatctgagaagatctccatttcttcaagtgtttaacaacagtcctgatgagtcgtcatattacagacatcattttgcccggcaggacctgacccagtccctcatcatgatccagcccattctctactcttactcctttcatgggccaccagagccagtactcttggatagcagcagcattctagctgacagaattttgctgatggatactttctttcaaattgtcatttatcttggtgagaccatagcccagtggcgtaaagctggctaccaggacatgcccgagtatgaaaacttcaagcaccttctgcaggcaccactggatgatgctcaagaaattctgcaagcacgcttcccgatgccacgttacatcaacacggagcatggaggcagtcagaagaaaagagagaagaatcaaatagacgcaataaaaaatgataaaggggatatcaccaccgagcccacagaaatacaaactaccatcagagaatactataaacacctctatgcaaataaactagaaagtctagaagaaatgaataaattcctcgacacatacactctcccaagactaaaccaggaagaagttgaatctctgaatagacaaataacaggctctgaaattgaggcaataattaatagcttaccaaccaaaaaaagtccaggaccagacagattcacagccaaattctaccagagaaccaatgaccaaaaacacatgattatctcaatagatgcagaaaaagcctttgacaaaattcaacaaccctttatgctaaaaactctcaataaattaggtattgatgggacgtatttcaaaataataagagctatttatgacaaacccacagccaatatcatactgaatgggcaaaaactggaagcattccctttgaaaactggcacaagacagggatgccctctctcactgctcctattcaacataatgttggaagttctggccagggcaatcaggcaggagaaggaaataaagggtattcaatttggaaaagaggaagtcaaattgtccctgtttgcagatgacatgattgtatatctagaaaaccccattgtcttagcccaaaatctccttaagctgataagcaacttcagcaaagtctcaggatacaaaatcaatgtgcaaaaatcacaagcattcttatacaccagtaacagacaaacagagagccaaatcatgagtgaactcccattcacaattgcttcaaagagaataaaatacctaggaatccaacttacaagggatgtgaaggacctcttcaaggagaactacaaaccactgctcaatgaaataaaagaggatacaaacaaatggaagaacattccatgctcatgggtaggaagaatcaatatagtgaaaatggccatactgcccaaggtaatttacagattcaatgccatccccatcaagctatcaatgactttcttcacggaattggaaaaaactactttagagttcatatggaaccaaaaaagagcccgcattaccaagtcaatcctaagccaaaagaacaaagctgaaggcatcacgctacctgacttcaaactacagtacaaggctacagtaaccaaaacagcatggtactcgtaccaaaacagagatatagatcaatggaacagaacagagccctcagaaatagtgccatgcatctacaactatctcatctttgacaaacctgacaaaaacaagaaatggggaaaggattccctatttaataaatggtgctgggaaaactggctagccatatgtagaaagctgaaactggatcccttccttacaccttatacaaaaattaattcaagacggattaaagacttaaatgttagacctaaaaccataaaaaccctagaagaaaacctaggcaataccattcaggacataggcatgggcaaggacttcatatccaaaacaccaaaagcaatggcaacaaaagccaaaattgacaaatgggatctaattaaactaaagagcttctgcacagcaaaagaaactaccatcagagtgaacaggcaacctacaacatgggagaaaattttcacaacctactcatctgacaaagggctaatatccagaatctacaatgaactcaaacaaatttacaagaaaaaaacaaacaaccccatcaaaaagtgggtgaaggacatgaacagacacttctcaaaagaagacatttatgcagccaaaaaacacatgattaaatgctccgcatcactggccatcagagaaatgcaaatcaaaaccactatgagatatcatctcacaccagttagaatggcaatcattaaaaagtcaggaaacaacagtgttcttaagagagaaggtcaaagaatagatatttctactgtttcatttccaatctgtttgtccgttgtccattcactgaagaacaggtactctctctacaacatcactgaagctgctcttgccaacgtccccagagaag

SEQ ID NO: 124352 - DNA, 3226 bp, Homo sapiens
atgaagcgagaaggaagtttagagaaaaaaagaataaaaagaaatgaacaaagcctccaagaaatatgtgactatgtgaaaagagcaaatctacgtctgattggtggacctgaaagtgacggggaaaatggaaccaagttggaaaacactctgcaagatatgcaggagaaattccccaatctagcaaggcaggccaacattcaaattcaggagatacagagaacgccacaaagatactcctcaagaagagcaactccaagacacataattgtcagattcaccaaagttgaaatgaaggaaaaaatgttaagggcagccagagagaaaggtcaggttacccacaaagggaagtccatcagactaacagctgatctctcggcagaaactctacaagccagaagagagtgggggccaatattcaacattcttaaagaaaagaattttcaacccagaatttcatatccaggcaaactaagcttcataagtgaaggagaaataaaatcctttacagacaagcaaatgctgagagattttgtcaccaccaggcctgccctaaaagagctcctgaaggaagcactaaacatggaaaagaacaagcagtaccagccaccacaaaaacatgccaaattaactagagaagcaagagcaaacacattcaaacctagcagaaggcgagaaataacaaagatcagagcagaactgaaggaaatagagacaccaaaaaccgctcaaaaaattaatgaatccaggagctggttttctgaaaggatcaacaaaattgatagaccgctagcaagactaagaaagaagaaaagagagaagaatcaaatagacacaataaaaaatgatgaaggggatatcaccacccatcccacagaaatacatactatcatcagagaatactataaacacctctatgcaaataaactagaaaatctagaagaaatggataaattcctcgacacctacaccctcccaagaccaaaccaggaagaagttgaatctctgaatggaccaatagcaggctctgaaattcaggcaataattaatagcttaccaaccaaaaaaagtccaggaccagatggattctaccagaggtacaaggaggagctggtaccattccgtctgaaactattccaatcaatagaaaaagagggaatcctccctaactcattttatgaggccagcatcatcctgataccaaagcctggcagagacacaacaaaaaaagagaattttagaccaatatccctgttgaacatcaatgcaaaaatcctcaataaaatactggcaaaccgaatccagcagcacatcaaaaagcttatgcaccatgatcaagtgggcttcatccctggaatgcaaggctggttcaatatacgcaaatcaataaatgtaatccagcatataaacagaaccaaagacaaaaaccacatgattatctcaatagatgcagaaaaggcctttgacaaaattcaacaacccttcatgctaaaaactctcaataaattaggtattgatgggacatatcacaaaataataagagctaactatgacaaacccacagccaatatcatactgaatgggcaaaaactggaagcattccctttgaaaactggcacaagacagggatgccctctctcaccactcctattcaacatagtgttggaagttctggccagggcaatcaggcaggagaaggaaacagagggtattcaattaggaaaagaggaagtcaaattgtccctgtttgcagatgacatgattgtatatctagaaaaccccattgtctcagcccaaaatctccttaagctgataagcaacttcagcaaagtctcaggatacaaaatcaatgtgcaaaaatcacaagtattcttatacaccgataacagacaaacagagagccaaatcatcagtgaactccccattcacaattgcttcaaagagaataaaatacctaggaatccaacttacaaggtacgtgaaggacctcttcaaggagaattacaaaccactgctcaatgaaataaaagaggatacaaacaaatggaagaacattccatgctcatgggtaggaagaatcaatatcatgaaaatggccatactgcccaatgtaatttatagattcaatgccatccccatcaagctaccaatgactttcttcacagaattggaaaaaactactttaaagttcatatggaaccaaaaaggagcccacattgccaagtcaatcctaagccaaaagaacaaagctggaggcatcatgctacctgacttcaaagtatactacaaggctacagtaaccaaaatagcatggtactggtaccagaacagaggtatagatcaagggaacagaacagagccctcagaaataatgccacatatctacaaccatgtgatctttgacaaacctgacaaaaacaagcaatggggaaacgattccctagttaataaatggtgctgggaaaactggctagccatgtgtagaaagctgaaactggatcccttccttacaccttatacaaaaattaattcaagatggattaaagacttacatgttagacctaaaaccataaaaaccctagaagaaaacctaggcaatatcattcaggacataggcatgggcaaggacttcatatctaaagcaccaaaagcaacagcaacaaaagccaatattgacaaatgggatctaattaaactaaagagcttctgcacagcaaaagcaactaccatcagagtgaacaggcaacctacagaatgggagaaaatttttgcaatctactcatctgacaaagggctaatatccagaatctacaatgaactcaaacaaatttacaagaaaaaaacaaacaaccccatcaaaaagtgggcaaaggatatgaacagacacttctcaaaagaagatatttatgcagccaaaagacacatgaaaaaatgctcatcatcactggccatcagagaaatgcaaattgaaaccacaatgagataccatctcacaccagttagaatggcgatcattaaaaagtcaggaaacaacaggaatatccagactgtgctcctactcaggatcccattccagggcctggttccttcccccagcgggcagacacatccagtaggcgaccagccagcagcgcatgtagacagcatcgacgccgataccaggctcagaggacagaaccatattccagaggagctggggagaggcgttgtctccaatccagttgag

SEQ ID NO: 124353 - DNA, 2047 bp, Homo sapiens
atggagaatgactttgaggagctgagagaagaaggcttcagacgatcaaattactctgagctacgggaggacattcaaaccaaaggcaaagaagttgaaaactttgaaaaaaatttagaagaatgtataactagaataaccaatacacagaagtgcttaaaggagctgatggagctgaaaaccaaggctcgagaactacgtgaagaatgcagaagcctcaggagccgatgcgatcaactggaagaaagggtatcagcgatggaagatgaaatgaatgaaatgaagcgagaagggaagtttagagaaaaaagaatacaaagaaatgaacaaagcctccaagaaatatgggactatgtgaaaagaccaaatctacgtctgattggtgtacctgaaaccttgcatcccagggatgaagcccacttgaagaatctaatagatgcaataaaaaatgataaaggggatatcaccaccgatcccacagaaatacaaactaccatcagagaatactacaaacacctctatgcaaataaactagaaaatctagaagaaacggataaattcctcgacacatacactctcccaagactaaaccaggaagaagttgaatctctgaatagaccaataacaggatctgaaattgtggcaataatcaatagcttaccaaccaaaaagagtccaggaccagatggattcacagctgaattctaccagaggtacaaggaggaactgctgataagcaacttcagcaaagtctcaggatacaaaatcaatgtacaaaaatcacaagcattcttatacaccagcaacagacaaacagagagccaaatcatgagtgaactcccattcacaattgcttcaaagagaataaaatacctaggaatccaacttacaagggatgtgaaggacctcttcaaggagaactacaaaccaccgctcaaggaaataaaagaggatacaaacaaatggaagaacattccatgctcatgggtaggaagaatcaatatcatgaaaatggccatactgcccaaggtaatttacagattcaatgccatccccattaagctaccaatgcctttcttcacagaattggaaaaaactactttaaagttcatatggaaccaaaaaagagcccgcatcgccaagtcaatcctaagccaaaagaacaaagctggaggcatcacactacctgacttcaaactatactacaaggctacagtaaccaaaacagcatggtactggtaccaaaacagagatatagatcaatggaacagaacagagctctcagaaataacgccgcatatctacaactatctgatctttgacaaacctgagaaaaacaagaaatggggaaaggattccctatttaataaatggtgctgggaaaactggctagccatatgtagaaagctgaaactggatcccttccttacaccttatacaaaaatcaattcaagatggattaaagacttaaacgttagacctaaaaccataaaaaccctagaagaaaacctaggcattaccattcaggacataggcatgggcaaggacttcatgtctaaaacaccaaaagcaatggcaacaaaagccaaaattgacaaatgggatctaattaaactaaagagcttctgcacagcaaaaaaaaaaaaaactactaacagactgaacaggcaacctgcaaaatgggagaaaattttcacaacctactcatctgacaaagggctaatatccagaatctacaatgaactcaaacaaatttacaagaaaaaaacaaacaaccccatcaaaaagtgggcaaaggacatgaacagacacttctcaaaagaagacatttatgcagccaaaaaaacacatgaaaaaatggtcaccatcactggccatcagagaaatgcaaatcaaaaccacaatgagataccatctcatgccagttagaatggcaatcattaaaaagtcaggaaacaggtgctggagaggatgtgcagaaacaggaacacttttacactgttggtgggactgtaaactagttcaaccattgtggaagtcagtgtga

SEQ ID NO: 124354 - DNA, 2704 bp, Homo sapiens
atgtactcacatgtgatcacggtgtgccggcatgtgaagaatggggacattctgctactgaaccgacagcccacactgcacagaccctccatccaggcccaccgtgcccgcatcctgcctgaagagaaagtgctgcggctccactatgccaactgcaaggcctataatgccgactttgatggagacgagatgaatgcccatttcccccagagtgagctgggccgggccgaggcctacgtcctggcctgcactgatcagcagtaccttgttcccaaggatggccaaccattggcgggactgatccaggatcacatggtttcaggggcaagcatgactactcggggttgctttttcacccgggagcactatatggagctggtgtaccgaggactcacggacaaagtggggcgcgtgaagctcctttctccttccatcctgaagccctttccgctgtggacaggaaaacagcatataaacagaaccaaagacaaaaaccacatgattatctcaatagatgcagaaaaggcctttgataaaattcaacaacccttcatgctaaaaactctcaataaattaggtattgatgggacgtatctcaaaataataagagctatctatgacaaacccacagccagtatcatactgaatgggcaaaaactggaagcattccctttgaaaactggcacaagacagggatgccctctctcaccactcctattcaacatagtgttggaagttctggccagggcaatcaggcaggagaaggaaataaagagcattcagttaggaaaagaggaagtcaaattgtccctgtttgcagatgacatgattgtatatctagaaaaccccactgtctcagcccaaaatctccttaagctgatgagcaacttcagcaaagtctcaggatacaaaatcaatgtgcaaaaatcacaagcattcttatacaccaataacagacaaacagagagccaaatcatgagtggactcccattcacaatcacttcaaagagaataacatacctaggaatccaacttacaagggatgtgaaggacctcttcaaggagaactacaaaccactgctcaaggaaataaaagaggatacaaacaaatggaagaacattccatgctcatgggtaggaagaatcaatatcgtgaaaatggccatactgcccaaggtaatttatagattcaacaccatccccatcaagctaccaatgactttcctcacagaattggaaaaaactactttaaagttcatatggaaccaaaaaagagcccacattgccaagtcaatcttaagccaaaagaacaaagctggaggcatcatgctacctgacttcaaactatactacaaggctacagtaaccaaaacagcatggtactggtaccaaaacagagatatagaccaatggaacagaacagagccctcagaaataatgccacatatatctacaactatctaatctttgacaaacctgagaaaaacaagcaatggggaaaggataccctatttaataaatggtgctgggaaaactggctagccatatgtagaaagctgaaactggatcccttccttacaccttatacaaaaattaattcaagatggattaaagacttaaatgttagacctaaaaccataaaaaccctagaagaaaacctaggcaataccattcaggacataggcatgggcaaggacttcatgtctaaaacaccaaaagcaacggcaacaaaagccaaaattgacaaatgggatctaattcaactaaagagcttctgcacagcaaaagaaaccaccatcagagtgaacaggcaacctacagaatgggaggaaatttttgcaatctactcatcggacaaagggctaatatccagaatctacaatgaactcaaacaaatttacaagaaaaaaacaaacaaccccatcaaaaagtgggcaaaggatatgaacagacacttctcagaagaagacatttatgcagccaaaaaacacatgaaaaaatgctcatcatcactggccatcagagaaatgcaaatcaaaaccacaatgagataccatctcacaccagttagaatggtgatcattaaaaagtcaggaaacaataggtgctggagaggatgtggagaaataggaacacttttacactgttggtgggactgtaaactagttcaaccattgtggaagtcggtgtggcaattcctcagggatctagaactagaaataccatttgacccagccatcccattactgggtatatacccagaggattataaaccatgctgctataaagacacatgcacacgtatgtttattgcggcactattcacaatagcaaagacttggaaccaacccaaatgtccaacaatgatagacgggattaagaaaatgtggcacatatacaccatggaatactatgcagccataaaaaaggatgagttcatgtcctttgtagggacatggatgaagctggaaaccatcattctcagcaaactatcgcaaggacagaaaaccaaacaccgcatgttctcactcatagtcaggaccctcagctgcaggtctgttggagtttactcgaagtccactccagaccctgtttgcctgagtatcagcagcagtggctgcagaacagcagatattagtgtatcacaaatgctactgcctgattgttcctctggaagttttgtctcagaggagtacccgaaggt

SEQ ID NO: 124355 - DNA, 3726 bp, Homo sapiens
atggcgccagcatctgctcctggtgaggcctcaggaagtttacaattgtggcggaaggtgaaggaagagcagtcatgcttgttaagcaaggttgctggccccttcaggatgggagaaaggagaggaaaccagagtagacactctgacatccaccagccagtgctccccagtggagggattgctgtgttaaaggctgtggtccctcactcccatggtgcccacgcccttgaccccacaccccacctctcttctctgaggaacatagctatcaggggtagcactgtggggaaacatttgggagagatctccggctgtgacccactgttaaaagcatctccactggctattgctaaacagaaaagattgtggcttcccagcaaggctgatttcccagaaaacagccctggtaggccaaggggtaggaacgcgagaccacctgggggaaggggcggctgtgggtgcatcttcagcagacttaaacgttcctgcctgctgactctgaagagagcagtggatttcccaacacagcacttcagctctgctaagggacaggctgcctcctcaaatgggtccctgactcctatgcctcctgactgggtcaacagacacctcatacaggagagctccagctggcatctggagggtgtccctctgggacgaagcttccagaggaaggagcaagcagcaatctttgctgttctgcagcctccactggtgataccctggcaaacaggatctggagtggacctcctgcaaactccaccagacctgcagaagagggtcctgactgttagaaggaaaactaacaatcagaaagcaatagcatcaacatcaacaaaaaggacgcccacgcaaaaaccccatccgaaggtcaccaacatcaaagatcaaagaactaatgacaaaaaccagatgattatctcaatagatgcagaaaagcccttcaataaaattcaacttcccttcatgctaaaaactctcaataaattaggtattgatgggacatatttcaaaataataagagctatctatgacaaacccacagccaatatcatactgaatgggcaaaaactggaagcattccctttgaaaactggcacaagacagggatgccctctctcaccgctcctattcaacatagtgttggaagttctggccagggcaatcaggcaggagaaggaaataaaaggtattcaattaggaaaagaggaagtcaaattgtccctgtttgcagacgacatgactgtttatctagaaaaccccatcgtctcagcccaaaatctccttaagctgataagcaacttcagcaaagtctcaggatacaaaatcaatgtaaaaaaatcacaagcattcttatacaccagcaacagacaaacagagagccaaatcatgagtgaactcccattcacaattgcttcaaagagaataaaatacctaggaatccaacttacaagggatgtgaaggacctcttcaaggagaactacaaaccactactcaaggaaataaaagaggatacaaacaaatggaagaacattccatgctcatgggtaggaagaatcaatatcgtgaaaatggccatactgcccaaggtaatttacagattcaatgccatccccatcaagctaccaatgactttcttcacagaattggaaaaaactactttaaagttcatatggaaccaaaaaagagcctgcatcgccaagtcaaccctaagccaaaagaacaaagctggaggcatcacactacctgacttcaaactatactacaaggctacagtaaccaaaacagcatggtactggtaccaaaacagagatatagatcaatggaacagaacagagccctcagaaataacgccgcatacctacaactatctgatctttgacaaacctgagaaaaacaagcagtggggaaaggattccctatttaataaatggtgctgggaaaactggctagccatatgtagaaagctgaaactggatcccttccttacaccttatacaaaaatcaattcaagatggattaaagatttaaacgttagacctaaaaccataaaaaccctagaagaaaacctaggcattaccattcaggacataggcatgggcaaggacttcatgtccaaaacaccaaaagcaatggcaacaaaagacaaaattgacaaatgggatctaattaaactcaagagcttctgcacagcaaaagaaactactatcagagcgaacaggcaacctacaacatgggagaaaattttcgcaacctactcatctgacaaagggctaatatccagaatctacaatgaactcaaacaaatttacaagaaaaaaacaaacaaccccatcaaaaagtgggcgaaggacatgaacagacacttctcaaaagaagacatttatgcagccaaaaaacacatgaaaaaatgctcatcatcactggccatcagagaaatgcaaatcaaaaccactatgagatatcatctcacaccagttagaatggcaatcattaaaaagtcaggaaacaacaggtgctggagaggatgtggagaaataggaacacttttacactgttggtgggactgtaaactagttcaaccattgtggaagtcagtgtggcgattcctcagggatctagaactagaaataccatttgacccagccatcccattactgggtatatacccaaatgactataaatcatgctgctataaagacacatgcacacgaaaaatacgaacaaatgggagaaattgtgccagcaaaaaaggaaacatcaacaaagaagctagaagcctatttaaccactggcccctgcaaaggccaaggcgagtgtatagcctgcacgttctctgtggagacaccgcgttcaggcacggtttgagacctgcccaccatcatccatcattggactgcctgtcctcaacccaccatggagaacaagcttttctaagggaaggacatctgcaggataaaatgggaaaagaggaagagcatcactcttgtctggtgagtccagcgtggttcatcattgcatctggacttcagccagcagcaagtgggaacagatgtccaacagagggacgaagagtcaaaattctctgcattataagaggaattcaggagaagcaccttccaggagggaaggctctagcaacaccagaggaagctgcagctgggaaggaggcagccagggaacagttcttgtctgggcaacaaagtgagatcctgtctcaaaaaaaggaagaggaggagaagaagaagaagaagaagaagaagaagaagaagaaggaggaggaggaggaggaggaggaggaggaggaggaggaggaagagagaagaggaggaggaaaagaaagagtaaggaaagaaggaaggaaggaaagaatgaatgaaggcaggcaggcaggcagggagggaggggagaggaagagagaagaaagaaggagaagaaaagaagaagaagaaggaagaggaggaggaggaaggggagaggaggaggaaaaagaagaagacatgcttagagaactaaggaaggagctgcccttgggacctctccagctaggaaaggatggagggatgggatgtgctttaggggagctgtgctcgggacttctccacctgggcgaggacggaagggtgggatgcgctttagggggccactccatagaacaccatgcagatggtgcccccccgcacgacccccagcatcagagttgtgcactgatggcctgcagatga

SEQ ID NO: 124356 - DNA, 2623 bp, Homo sapiens
atggtggcctccagatcctctagagtcggtgtcttctatggaggtcaaaacagcgtggatggcgtctccaggcgatctgacggttcactaaacgagctctgcttatatagacctcccaccggggcgtacttggcatatgatacacttgatgtactgccaagtgggcagtttaccgtaaatactccacccattgacgtcaatggaaagtccctattggcgttactatgggaacatacgtcattattgacgtcaatgggcgggggtcgttgggcgatgcagccacttggccagctgggtcagctcgaacacctcggagaccggcgcgatcaggtcctcgaccgaagtggacgctcccgacgactcgatgctgctcagcacctgcgacatcgacctgaccgccgcccgcagggcatggttggggtgcttaccaaccaaaaagagcccaggaccagatggattcacagcagaattctaccagaggtgcaaggaggaactggtaccgttccttctgaaactattccaatcgatagaaaagagggaatccttcctaacttatttgatgaggccagcatcatcctgataccaaagcggggcagagacaccaccaaaaaagagaattttagaccaatatccttgatgaacattgatgcaaaaatcctcaataaaatactggcaaaccgaaaccagcagcacatcaaaaagcttatccaccatgatcaagtgggtttcatccctgggatgcaaggctggttcaatatatgcaaatcaataaatgtaatccagcatataaacagaaccaaagacaaaaaccacatgattatctcaatagatgcagaaaaggcctttgacaaaattcaacaacccttcatgctaaaaactcttaataaattaggtattgatgggacgtatctcaaaataataagagctatctatgacaaacccacagccaatatcatactgaatgggcaaaaactggaagcattccctttgaaaactggcacaagacagggatgccctctctcaccactcctattcaacatagtgttggaagttctggccagggcaatcaggcaggagaaggaaataaagggtattcaattaggaaaagaagaagtcaaattgtccctgtttgcagatgacatgattgtatatctagaaaaccccatcgtctcagcccaaaatctccttaagctaataagcaacttcagcaaagtctcagcatacaaaatcaatgtacaaaaatcacaagcattcttatacaccaataacagacaaacagagagccaaatcatgagtgtattcccattcacaattgcttcaaagagaataaaatacttaggaatccaacttgcaaggaatgcgaaggacctcttcaaggagaactacaaaccactgctcaatgaaataaaagaggatacaaagaaatggaagaacattccatgctcatgggtaggaagaatcaatatcgtgaaaatggccatactgcccaaggtaatttacagattcaatgccatccccatcaagctaccaatgactttcttcacagaattggaaaaaactactttaaagttcatatggaaccaaaaaagagcccgcatcgccaagtcaatcctaagccaaaagaacaaagctgggaggcatcacggctacctgacttcaaactatacctacaaggcctacagtaacccaaaacagcatggtactggtacccaaaacagagatatagaccaatggaacagaacagagccctcagaaataacaccgcatatctacaactatctgatctttgacaaacctgagaaaaacaagcaatggggaaaggattccctatttaataaatggtgctgggaaaactggctagccacatgtagaaagctgaaactggatcccttccttacaccttatacaaaaattaattcaagatggattaaagacttaaacgttagacctaaaaccataaaaaccctagaagaaaacctaggcattaccattcaggacataggcgtgggcaaggacttcatgtccaaaacaccaaaagcaatggcaacaaaagccaaaattgacaaatgggatctaattaaactaaagagcttctgcacagcaaaagaaactgccatcagagtgaacaggcaacctacaacatgggagaaaattttcgcaacctactcatctgacaaagggctaatatccagaatctacaatgaactcaaacaaatttacaagaaaaaaaacaaacaaccccatcaaaaagtgggcgaaggacatgaacagacacttctcaaaagaagacatttatgcagccaacaaacacatgaaaaaatgctcaccatcactggccatcagagaaatgcaaatcaaaaccactatgagataccatctcacaccagttagaatggcagtcattaaaaagtcaggaaacaacaggtcacatttcaacatgagatttggagaggacagacacccgaatcacagcaatgggtctcagcaagcagctccatcagctgcctcagacttgtctggaaggtggcagacgtgggcaattcctgccttgctgaagagggatacactgctgagtgaatgctctgaagcagaggagcatttggtgcaactgaagttgtctgaa

SEQ ID NO: 124357 - DNA, 2468 bp, Homo sapiens
atgggagactttaacatcccactgtcaacatcagacagatcaacgagacagaaagttaacaaggatacccaggaattgaactcagctctgcaccaagcggacctaatagacatctacagaactctccaccccaaatcaacagaatatacattcttttcagcaccacaccacacctactccaaaattgaccacatagttggaagtaaagcactcctcagcaaatgtagaagaacagaaattataacaaactgtctctcagaccacagtgcaatcaaactagaaatcaggattaagaaactcactcaaaactgctcaactacatggaaactgaacaacctgctcctgaatgactactgggtaaataatgaaatgaaggcagaaataaagatgttctttgaaatcaacgaggacaaagacacaacataccagaatcgctgggacacattcaaagcagtgtgtagagggaaatttatagcactaaatgcccacaagagaaagcaggagagatctaaaattgacaccctaacgtcacaattaaaagaactagaaaagcaagagcaaacacattcaaaagctagcagaaggcaagaaataaccgagatcagagcagaactgaaggaaatagagacacaaaaaacccttcaaaaaatgaatgaatccaggagctggttttttgaaaagatcaacaacattgatagactgctagcaagactaatcaagaagaaaagagagaagaatcaaatagacgcaataaaaaatcataaaggggatatcaccaccaatcccacagaaatacaaactaccatcagagaatatgataaacacctctacgcaaataaactagaaaatctagaagaaacggataaattcctcgacacatacatcctcccaagactaaaccaggaacaagttgaatctctgaatagaccaataacaggagctgaaattgaggcaataatcaatagcttacgaaccaaaaaaagtccaggaaccaggtggattcacagccgaattctaccagaggtacaaggagaagctgatagtgttggaagttctggccagggcaatcaggcaggagaaagaaataaagggtattcaattaggaaaagaggaactcaaattgtccctgtttgcagatgacatgattgtatatctagaaaaccccatcgtctcagcccaaaatctcctcaagctgataagcaacttcagcaaagtctcaggatacaaaatcaatgtgcaaaaatcacaagcattcttatacagtaataacagacaaacagagagccaaatcatgagtgaactcccattcacaattgcttcaaagagaataaaatacctaggaatccaacttacaagggatgtgaaggacctcttcaaggagaactacaaaccactgctcaatgaagttaaagaggatacaaacaaatggaagaacattccatgctcatggataggaagaatcaatattgtgaaaatggccatactgcccaaggtaatttatagattcagtgccatccccatcaagctaccaatgactttcttcacagaactggaaaaaactactttaaagttcatatggaaccaaaaaaggagcctgcattgccaagtcaatcctaagccaaaagaacagagctggaggcatcacgctatctgacttcaaactgtactacaaggctacagtaaccaaaacagcatggtactggtaccaaaacagagatatagatcaatggaacaaaacagagccctcagaaataatgccacatatctacaactatctgatctttgacaaacctgacaaaaacaagaaatggggaaaggattccctatttaataaatggtgctgggaaaactggttagccatatgtagaaagctgaaactggatcccttccttacaccttatacaaaaattaattcaagatggattaaagacttaaatgttagacctaaaaccataaaaaccctagaagaaaacttaggcattaccattcaggacacaggcatgggcaaggacttcatgtctgaaacaccaaaagcaatggcaacaaaagacaaaattgacaaatgggatctaattaaactaaagagcttctgcacagcaaaagaaactaccatcagagtgaacaggcaacctacagaacgggagaaaagttttgcaagctactcatctgacaaagggctaatatccagaatctacaatgaactccaacaaatttacaagaaaaaaacaaacaaccccatcaacaagtgggcaaaggatatgaacagacacttctcaaaagaagacatttatgcagccaaaagacacacgaaaaaatgctcatcatcactggccatcagaggaatacaaatcaaaaccacaaggagataccatctcaaaccagttagaatggcgatcattaaaaagtcaggaaacaacaggtgctggagaggatgtggagaaataggaacacttttacactgttggtag

SEQ ID NO: 124358 - DNA, 2482 bp, Homo sapiens
ccaggccatgaccttagagggaagatggcagcaatcccagagaagttctacaaaacagagagatgggacttcttttcccatggtagagcccacaaagactgaagagcccttcatgagctccctgccccctcatcctaaccaggccgcagagtggcaaagtggaagacctagaccaaaaacaggagctgaaattgtggcaataaccaatagcttaccaaccaaaaagagtccaggaccagatggattcacagcagaattctaccagaggtacaaggaggaactggtaccattccttctgaaactattccaatcagtagaaaaagagggaatcctccctaactcattttatgaggccagcatcatcctgctaccaaagccaggcagagacaaaaccaaaaaagagaattttagaccaatatccttgatgaacattgatgcaaaaatcctcaataaaatactggcaaaccgaattcagcagcacatcaaaaagcttatccaccatgatcaagtgggcttcgtccctgggatgcaaggctggttcaatatacgcaaatcaataaatgcaatccagcatataaacagaaccaaagacaaaaaccacatgattatctcaatagatgcagaaaaggcctttgacaaaattcaacaacccttcatgctaaaaactctcaataaattaggtattgatgggaagtatctcaaaataataagagctttctatgacaaacccacagccaatatcatactgaatgggcaaaaactggaagcattccctttgaaaactggcacaagacagggatgccctctctcaccactcctattcaacatagtgttggaagttctggacagggcaattaggcaggagaaggaaataaagggtattcaattaggaaaagaggaagtcaaattgtccctgtttgcagatgacatgattgtatatctagaaaaccccattgtctcagcccaaaatctccttaagctgataagcaacttcagcaaagtctcaggatacaaaatcaatgtacaaaaatcacaagcattcttacacaccaataacagacaaacagagagccaaatcatgagtgaactcccattcacaattgcttcaaagagaataaaatacctaggaatccaaattacaagggacgtgaaggacctcttcaaggagaactacaaaccactgctcaaggaaataaaagaggatacaaacaaatggaagaacattccatgctcatgggtaggaagaatcaatattgtgaaaatagccatactgcccaagataatttacagattaaatgccatccccatcaagctactaatgactttcttcacagaattggaaaaaactactttaaagttcatatggaaccaaaaaagagcccgcatcgccaagtcaatcctaagccaaaagaacaaagctggaggcatcacgctacctgacttcaaactatactacaagcctacagtaaccaaaacagcatggtactggcaccaaaacagagctatagagcaatggaacagaacagagccctcagaaataacgacacatatctacaactatctgacctttgacaaacctgagaaaaacaagcaatggggaaaggattccctatttaataaatggtgctgggaaaactggctagccatatgtagaaagctgaaactggatcccttccttacaccttatacaaaaatcagttcaaaatggattaaagacttaaacgttagacctaaaaccataaaaacccaagaagaaaacctaggcattaccattcaggacataggcatgggcaaggacttcatgtctaaaacacaaaaagcaatggcaacaaaagccaaaattgacaaaggggatctaattaaactaaagagcttctgcacagcaaaagaaactagcagcagtgtgaacaggcaacctacaaaatgggagaaaatttttgcaacctactcatctgacaaagggctaatatccagaatctacaatgaactcaaacaaattcacaagaaaaaaacaaacaaccccatcaaaaagtgggcaaaggatatgaacagacacttctcaaaagaagacatttatgcagccaaaaaacacatgaaaaactgttcaccatcactggccatcagagaaatgcaaatcaaaaccacaatgagataccatctcacaccacttagaatggcaatcattaaaaagtcaggaaacaacagacgcacagcaactttaagtttgctgccagctatacgtcatgaaagggaagcttttcatcaaagggaagaagaaaaggaagggggaagaatcctacttttacaaaacagagtaattctttgctcctgctccctttgcccacatctctcacctgcgtccaaaccaaaacacaggggcctagatcgctttaagtcacaaagcacgtctatgttctcaggtgtgctcagcgttcggaattctctgcatgctcctcaggttgtttcctggttgcagcgctaa

SEQ ID NO: 124359 - DNA, 4795 bp, Homo sapiens
atgggagactttaacaccccactgtcaacattagacagatcaacgagacagaaagtcaacaaggatacccaggaactgaactcagctctgcaccaagcggacctaatagacatctacagaacactccaccccaaatcaacagaatatacatttttttcagcaccacaccacacctattccaaaattgaccacatactgggaagtaaagctctcctcagcaaatgtaaaagagcagaaattataacaaactatctctcagaccacagtgcaatcaaactagaactcaggattaagaatctcactcaaagccgctcaactacatggaaactgaacaacctgctcctgaatgactactgggtaaataacgaaatgaaggcagaaataaagatgttctttgaaaccaaagagaacaaagacacaacataccagaatctctgggacgcattcaaagcagtgtgtagagggaaatttatagcactaaatgcgcacaagagaaagcaggaaagatctaaaattgacaccctaacatcacaattaaaagaactagaaaagcaagagcaaacacattcaaaagctagcagaaggcaagaaataactaaaatcagagcagaactgaaggaaatagagacacaaaaaacccttcaaaaaatcaatgaatccaggagctggttttttgaaaggatcaacaaaattgatagaccgctagcaagactaataaagaaaaaaagagagaagaatcaaatagacacaataaaaaatgataaaggggatatcaccactgatcccacagaaatacaaactaccatcagagaatactacaaacacctctacgcaaataaactagaaaatctagaacaaatggatgcattcctcgacacatacactctcccaagactaaaccaggaagaagttgagtctctgaatagaccaataacaggagctgaaattgtggcaataatcaatagtttaccaaccaaaaagagtccaggaccagatggattcacagccgaattctcccagaggtacaaggaggaactggtaccattccttctgaaactattccaatcaatagaaaaagagggaatcctccctaactcattttatgaggccagcatcattctgataccaaagccaggcagagacacaaccaaaaaagagaattttagaccaatatccttgatgaacatcgatgcaaaaatcctcaataaaatactggcaaaccgaatccagcagcacatcaaaaagcttatccaccatgatcaagtgggcgtcatccctgggatgcaaggctggttcagtatacgcaaatcaataaatgtaatccagcatataaacagagccaaagacaaaaaccatatgattatctcaatagatgcagaaaaagcctttgacaaaattcaacaacccttcatgctaaaaactctcaataaattagcccaaaatctccttaagctgataagcaacttcagcaaagtctcaggatacaaaatcaatgtacaaaaatcacaagcattcctatacaccaacaacagacaaacagagagccaaatcatgagtgaactcccattcacaattgcttcaaagagaataaaatacctaggaatccaacttacaagggatgtgaaggacctcttcaaggagaactacaaaccactgctcaaggaaataaaagaggatacaaacaaatggaagaacattccatgctcatgggtaggaagaatcaatatcgtgaaaatggccatactgccccaggtaatttacagattcaatgccatccccatcaagctaccaatgactttcttcacagaattggaaaaaactactttcaagttcatatggaaccaaaaaagagcccgcatcgccaagtcaatcctaagccaaaagaacaaagctggaggcatcacactacctgacttcaaactatactacaaggctacagtaaccaaaacagcatggtactggtaccaaaacagagatatagatcaatggaacagaacagagccctcagaaataacgccgcttacctacaactatctgatctttgacaaacctgacaaaaacaagcaatggggaaaggattccctatttaataaatggtgctgggaaaactggctagccatatgtagaaagctgaaactggatcccttccttatgccttatacaaaaattaattcaagatggattaaagatttaaacattagacctaaaaccataaaaaccctagaagaaaacctaggcattaccattcaggacataggcatgggcaaggacttcatgactaaatcagcaaaaaggaatggcaacaaaagccaaaattgataaatgggatctaattcaactaaagagcttctgcacagcaaaagaaactaccatcagagtgaataggcaacctacagaatgggagaaaatttttggaatctactcatctgacaaagggctcatatacagaatctacaaagaacttaaacaaatttacaagaaaaaaacaaacaaccccatcaaaaagtgggcgaaggacatgaacagacacttctcaaaagaagacatttatgcagccaaaaaacacatgaagaaatgctcatcatcactggccatcagagaaatgcaaatcaaaaccactatgagatatcatctcacaccagttagaatggcaatcatgaaaaagtcaggaaacaacaggtgctggagaggatgtggagaaataggaacacttttacactgttggtgggactgtaaactagttcaaccattgtggaagtcagtgtggcgattcctcagggatctagaactagaaataccatttgacccagccatcccattactgggtatatacccaaaggactataaatcatgctgctataaagatacatgcacacctctcaagaaacacatcagctttcatctttatcagtatgacactgacatgataggaaatgctgggctggtgattcagcagccatccattttacagtcagaggacaagtcgtacaatggtggaggaataggttcttcaaataggatcatggacttcttggaggagccaatccctggtgtagggacctatgatgatttcaatacaattgattgggtgagagagaagtctcgagaccgggataggcaccgagagggagcctttgcctacatagtcaattatttcatgtacgtcctctgggctctcctatttgccttccttgccgtatctcttgtcaaggtgtttgcgccttatgcctgtggctctggaatccctgagataaaaactatcttgagtggtttcattattaggggctatttgggtaagtggactctggttatcaaaaccatcaccttggtgctggcagtgtcgtctggcttgagcctgggcaaagagggccctctagtgcacgtggcttgctgctgtgggaacatcctgtgccactgcttcaacaaatacaggaagaatgaagccaagcgcagagaggtcttgtcggctgcagcagcagctggtgtatctgtagcctttggagcacctataggtggagtattattcagccttgaagaggtcagctactattttcccctcaaaacattgtggcgttcattctttgctgccttggtggcagcattcactctacgctccatcaatccatttgggaacagccgcctggtactattttatgtggagtttcacaccccatggcatctctttgagctcgtgccattcattctgctgggcatatttggtggtctgtggggagcactgtttatccgcacaaacattgcctggtgtcggaagcgaaagaccacccagttgggcaagtatcctgttatagaggtactcgtcgtgacagccatcactgccatcctggctttccccaatgaatacactcggatgagcacaagtgagctcatttctgagctgtttaatgactgtggccttctggactcctccaagctctgtgattatgagaaccgtttcaacacaagcaaagggggtgaactgcctgacagaccggctggcgtgggagtctacagtgcaatgtggcagctggctttaacactcatactgaaaattgtcattactatattcacctttggcatgaagatcccttctggcctctttatccctagcatggctgttggtgctatagcaggtcgacttctaggagtaggaatggaacagctggcttattaccaccaggaatggaccgtcttcaatagctggtgtagtcagggagctgattgcatcacccccggcctttatgcaatggttggggctgcagcctgcttagccaaagaagagtttgctcataagaccctggcaatggatgtgatgaaaccccggagaaatgatcctttgttgactgtccttactcaggacagtatgactgtggaagatgtagagaccataatcagtgaaaccacttacagtggcttcccagtggtggtatcccgggagtcccaaagacttgtgggctttgtcctccgaagagatctcattatttcaattgaaaatgctcgaaagaaacaggatggggttgttagcacttccatcatttatttcacggagcattctcctccattgccaccatacactccacccactctaaagcttcggaacatcctcgatctcagccccttcactgtgactgaccttacacccatggagatcgtagtggatattttccgaaagctgggactgcggcagtgcctggttacacacaacgggcgattgcttggaatcattaccaaaaaggatgtgttaaagcatatagcacagatggcgaaccaagatcctgattccattctcttcaactag

SEQ ID NO: 124360 - DNA, 4323 bp, Homo sapiens
atgggagactttaacaccccactgtcaacattagacagatcaatgagacagaaagtcaaaaaggatacccaggaattgaactcagctctgcaccaagcagacctaatagacatctacagaactctccaccccaaatcaacagaatatacatttttttcagcaccacaccacacctattccaaaattgaccacatacttggaagtaaagctctcctcagcaaatgtaaaagaacagaaattataacaaactatctctcagacggcagtgcaatcaaactagaactcaggattaagaatctcactcaaaaccgctcaactacatggaaactgaacaacctgctcctgaatgactactgggtacctaacgaaatgaaggcagaaataaagatgttctttgaaaccaacgagaacaaagacacaacataccagaatctctgggacgcattcaaagcagtgtgtagagggaaatttatagcactaaatgcccacaagagaaagcaggaaagatccaaaattgacaccctaacatcacaattaaaagaactagaaaagcaagagcaaacacattcaaaagctagcagaaggcaagaaataactaaaatcagagcagaactgaaggaaatagagacacaaaaaacccttcaaaaaattaatgaatccaggagctggttttttgaaaggatcaacaaaatagatagaccgctagcaagactaataaagaaaaaaagagagaagaatcaaatagatacaataaaaaatgataaaggggatatcaccaccaatcccacagaaatacaaactaccatcagagaatactacaaacacctctacgcaaataaactagaaaatctagaagaaatggataaattccttgacacatacactctcccaagactaaaccaggaagaagttgaatctctgaatagaccaataacaggatctgaaattgtggcaataatcaatagcttaccaaccaaaaagagtccaggaccagatggattcacagccgaattctaccagaggtacaaggaggaactggtaccattccttctgaaactattccaatcaatagaaaaagagggaatcctcctgttggaagttctggccagggcaattaggcaggagaaggaaataaagggtattcaattaggaaaagaggaagtcaaattttccctgtttgcagacgacatgattgtatatctagaaaaccccattgtctcagcccaaaatctccttaagctgataagcaacttcagcaaagtctcaggatacaaaatcaatgtacaaaaatcacaagcattcttatacaccaacaacagacaaacagagagccaaatcatgagtgaactcccattcacaattgcttcaaagagaataaaatacctaggaatccaacttacaagggatgtgaaggacctcttcaaggagaactacaaaccactgctcaaggaaataaaagaggatacaaacaaatgcaagaacattccatgctcatgggtaggaagaatcaatatcgtgaaaatggccatactgcccaaggtaatttacagattcaatgccatccccatcaagctaccaatgcctttcttcacagaattggaaaaaactactttaaagttcatatggaaccaaaaaagagcccgcatcgccaagtcaatcctgagccaaaagaacaaagctggaggcatcacgctacctgacttcaaaccatactacaaggctacagtaaccaaaacagcatggtactggtaccaaaagagagatatagatcagtggaacagaacagagccctcagaaataacgccgcatatctacaactatctgatctttgacaaacctgagaaaaacaagcaatggggaaaggattccctatttaataaatggtgctgggaaaactggctggccatatgtagaaagctgaaactggatcccttccttacaccttatacaaaaatcaattcaagatggattaaagacttaaacgttagacctaaaaccataaaaaccctagaagaaaacctaggcaataccattcaggacataggcatgggcaaggacttcatgtctaaaacaccaaaagcaatggcaacaaaagacaaaattgacaaatgggatctaattaaacttaagagcttctgtacagcaaaagaaactaccatcagagtgaacaggcaacctacaaaatgggagaaaattttcacaacctactcatctgacaaagggctaatatccagaatctacaatgaactcaaacaaatttacaagaaaaaaacaaacaaccccatcaaaaagtgggcgaaggacatgaacagacacttctcaaaagaagacatttatgcagccaaaaaacacatgaaaaaatgctcatcatcactggccatcagagaaatgcaaatcaaaaccacaatgagataccatctcacaccagttagaatggcgatcattaaaaagtcaggaaacaacagtcttgctagtggtctatcaattgacaaaattcaacaacccttcatgctaaaaactctcaataaattaggtattgatgggacgtatttcaaaataataagagctatctatgacaaacccacagccaatatcatactgaatgggcaaaaactggaagcattccctttgaaaactggcacaagacagggatgccctctctcaccgctcctattcaacatagtgttggaagttctggccagggcaatcaggcaggagaaggaaataaagggtattcaattaggaaaagaggaagtcaaattgtccctctttgcagacgacatgattgtttatctagaaaaccccatcgtctcagcccaaaatctccttaagctgataagcaacttcagcaaagtctcaggatacaaaatcaatgtacaaaaatcacaagcattcttatacaccaacaacagacaaacagagagccaaatcatgagtgaactcccattcacaattgcttcaaagagaataaaatacctaggaatccaacttacaagggatgtgaaggacctcttcaaggagaactacaaaccactgctcaaggaaataaaagaggatacaaacaaatggaagaacattccatgctcatgggtaggaagaatcaatatcgtgaaaatggccatactgcccaaggtaatttatagattcaatgccatccccatcaagctaccaatgactttcttcacagaattggaaaaaactactttaaagttcatatggaaccaaaaaagagcccgcattgccaagtcaatcctaagccaaaagaacaaagccggaggcatcacactacctgacttcaaactatactacaaggctacagtaaccaaaacagcatggtactggtaccaaaacagagatatagatcaatggaacagaacagagccctcagaaataacgccgcttacctacaactatctgatctttgacaaacctgagaaaaacaagcaatggggaaaggattccctatttaataaatggtgctgggaaaactggctagccatatgtagaaagctgaaactggatcccttccttacaccttatacaaaaatcaattcaagatggattaaagatttaaacgttagacctaaaaccataaaaaccctagaagaaaacctacgcattaccattcaggacatagggatgggcgaggacttcatgtccaaaacaccaaaagcaatggcaacaaaagccaaaattgacaaatgggatctaattaaactaaagagcttctgcacagcaaaagaaactaccatcagagtgaacaggcaacctacaaaatgggagaaaattttcgcaacctactcatctgacaaagggctaatatccagaatctacaatgaactcaaaccaatttacaagaaaaaaacaaacaaccccatcaaaaagtgggcgaaggacatgaacagacacttctcaaaagaagacatttatgcagccaaaaaacacatgaaaaaatgctcatcatcactggccatcagagaaatgcaaatcaaaaccacaatgagatatcatctcacaccagttagaatggcaatcattaaaaagtcaggaaacaacagaagtaaagacataaaagatagagaagatcctttggcttatggagtttttgctccagtcgtaagggtggaatcaagtttacaggaaggaagctggtgggtttcattttggacagaacgaggacgagctatgtgggagaacattcaaatagagctaggattcaggaagaagcaggacccaggatgccaccttacgtggaaatgtggatactacttctatgatggacgaagaggaggaagttgtttgcagatgcaactgactctgtag

SEQ ID NO: 124361 - DNA, 3230 bp, Homo sapiens
atgggagactttaacaccccactgtcaacattagacagatcaacgagacagaaagtcaacaaggatacccaggaattgaactcagctctgcaccaagcagacctaatagacatctacagaactctccaacccaaatcaacagaatatacatttttttcagcaccacaccacacctattccaaaattgaccacatagttggaagtaaagctctcctcagcaaatgtaaaagaacagaaattataacaaactatctctcagaccacagtgcaatcaaactagaactcaggattaagaatctcactcaaagccgctcaactacatggaaactgaacaacctgctcctgaatgactactgggtacataacgaaatgaaggcagaaataaagatgttctttgaaaccaacgagaacaaagacacaacataccagaatctcttgggacgcattcaaagcagtgtgtagagggaaatttatagcactaaatgcccacaagagaaagcaggaaagatccaaaattgacacccctaacatcacaattaaaagaactagaaaagcaagagcaaacacattcaaaagctagcagaaggcaagaaataacttaaaatcagagcagaactgaaggaaatagagacaaaaaaaaacacttcaaaaaattaatgaatccaggagctggttttttgaaaggatcaaaaaaactgatagaccgctagcaagactaataaagaaaaaaagagagaagaatcaaatagacacaataaaaaatgataaaggggatatcaccaccgatcccacagaaatacaaactaccatcagagaatactacaaacacctctacgcaaataaactagaaaatctagaagaaatggataaattcctcgacacatacactctcccaagactaaaccaggaagaagttgaatctctgaatagaccaataacaggagctgaaaatgtggcaataatcaatagcttaccaaccaaaaagggtccaggaccagatgaattcacagccgaattctaccagaggtacaaggaggaactggtaccattccgtctgaaactattccaatcaatagaaaaagagggaatcctccctaactcattttatgaggccagcatcattctgataccaaagccaggcagagacacaaccaaaaaagagaattttagaccaatatccttgatgaacattgatgcaaaaatcctcaataaaatactggcaaaacgaatccagcagcacatcgaaaagcttatccaccatgatcaagtgggcttcatccctgggatgcaaggctggttcaatatacgcaaatcaataaatgtaatccagcatattaacagagccaaagacaaaaaccacatgattatctcaatagatgcagaaaaggcctttgacaaaattcaacaacccttcatgctaaaaactctcaataaattaggtattgatgggacgtatttcaaaataataagagctatctatgacaaacccacagccaatatcatactgaatgggcaaaaactggaagcattccctttgaaaactggcacaagacagggatgccctctctcaccactcctattcaacatagtgttggaagttctggccagggcaattaggcaggagaaggaaataaaggcccaaaatctccttaagctgataagcaacttcagcaaagtctcaggatacaaaatcaatgtacaaaaatcacaagcattcttatacaccaataacagacaaacagagagccaaatcatgagtgaactcccattcataattgcttcaaagagaataaaatacctaggaatccaacttacaagggacgtgaaggacctcttcaaggagaactacaaaccactgatcaaggaaataaaagaggatacaaacaaacggaagaacattccatgctcacgggtaggaagaatcaatatcgtgaaaatggccatactgcccaaggtaatttacagattcaatgccatccccatcaagctaccaatgactttcttcacagaattggaaaaaactactttaaagttcatatggaaccaaaaaagagcccacatcgccaagtcaatcctaagccaaaagaacaaagctgggggcatcacactacctgacttcaaactatactacaaggctacagtaaccaaaacagcatggtactcgtaccaaaacagagatatagatcaatggaacagaacagagccctcagaaataacgccacatatctacaactatctgatctttgacaaacctgagaaaaacaagcaatggggaaaggattccctatttaataaatggggctgggaaaactggctagccatatggagaaagctgaaactggatcccttccttacaccttatacaaaaatcaattcaagatggattaaagacttaaacgttagacctaaaaccataaaaaccctagaagaaaacctaggcattaccattcaggacataggcatgggcaaggacttcatgtctaaaacaccaaaagcaatggcaacaaaagacaaaattgacaaatgggatctaatgaaactaaagagcttctgcacagcaaaagaaactaccatcagagtgaacaggcaacctacagagaggggagaaaattttcgcaacctactcatctgacaaagggctaatatccagaatctacaatgaactcaaactaatttacaagaaaaaaacaaacaaccccatcaaaaagtgggcgaaggacatgaacagacacttctcaaaagaagacatttatgcagccaaaaaacacatgaaaaaatgctcatcatcactggccatcagagaaatgcaaatcaaaaccacagtgagataccatctcacaccagttagaatggcgatcattaaaaagtcaggaaacaacagggacatggatgaagttggaaatcatcattctcagcaaactgtcacaaggacaaaaaaccaaacaccgcatattctcactcatacgtgggaactgaacaatgagatcacatggacacaggaaggagaatatcacactctggggactgtgacatcagaactccaggttctctggtctttggattctgggacttacagcagtgggccccttgtgttctcaggtttggggcttgagagttacacgatttgctgtcctgagtctgagaccttgggacttggactgaaccacactaccaacttccttagttctccaacttgcagacaacttaatatgggacttcttagcttctaa

SEQ ID NO: 124362 - DNA, 3394 bp, Homo sapiens
atgggagactttaacaccccactgtcaacattagacagatcaaggaggcagaaagttaacaagaatacccaggaattgaactcagctctgcaccaagtgcaactaatagacatctacagaactctccaccccaaatcaacagaatatacattattttcagcaccacaccacacctattccgaaattgaccacgtagttggaagtaaagcactcctcagcaaatgtaaaagaacagaaattataacaaactgtctctcagaccacagtgcaatcaaactagaactcaggattaagaaactcactcaaaactgctcaactacatggaaactgaacaacctgctcctgaatgactactgggtacataacgaaatgaaggcagaaatcaagatgttctttgaaaccaatgagaacaaagacacaacatacccgaatctctgggacacattcaaagcagtgtgcagagggaaatttatagcactaaatgcccacaagagaaagcaggaaagatctgaaattgacaccctaacatcacaactaaaagaactagaaaagcaagagcaaacacattcaaaagctagcagaaggcaagaaataactaagatcagagcagaactgaaggaaatagagacacaaaaaacccttcaaaaaattaatgaatccaggagctggttttttgaaaagatcaacaaaatagatagaccgctagcaagactaataaagaagaaaagagagaagaatcaaatagactcaataaaaaatgacaaaggggatatcaccaccgatcccacagaaatacaaactaccatcagagaatactataaacacctctacgcaaataaactagaaaatctagaagaaatggataaattcctcgacacatacatcctcccaagactaaaccaggaagaagttgaatctctgaatagaacaataacaggctctgaaattgaggcaataatcaatagcttaccaaccaaaaaaagtccaggaccatatggattcacagccgaattctaccagaggtacaaggaggaactgccgggcagagacacaaccaaaaaaagagaattttagaccaatatccttcatgaacattgatgcaaaaatcctcaataaaatactggcaaaccaaatccagcagcacatcaaaaagcttatccaccatgatcaagtgggcttcatccctgggatgcaaggctggttcaacatacgcaaatcaataaatgtaatccagcatacaaacagaaccaaagacaaaaaccacatgattatctcaatagatgcagaaaaggcctttgacaaaattcgacaacccttcatgctaaaaactctcaagaaattaggtattgatgggacgtatctcaaaataataagagctatctatgacagacccacagccaatatcatactgaatgggcaaaaactggaagcattccctttgaaaatgggcacaagacagggatgccctctctcaccactcctattcaacatagtgttggaagttctggccagggcaatcaggcaggagaaggaaataaagtgtattcaattaggaaaagagaaagtcaaatcgtccctgtttgcagatgacatgactgtatatctagaaaaccccatcatctcagcccaaaatctccttaaggtgataagcaacttcagcaaggtctcaggatacaaaatcaatgtacaaaaatcacaaccattcttatacaccaataacagacaaacagagagccaaatcatgagtgaactcccattcacaattgcttcaaagagaataaaatacctaggaatccaacttacaagggatgtgaaggacctcttcagggagaactacaaaccactgctcaaggaaataaaagaggatacaaacaaatggaagaacattccacgctcatgggtaggaagaatcaatatggtgaaaatggccatactgcccaaggtaatttacagattcaatgccatccccatcaagctaccaatgcctttcttcacagaattggaaaaaactactttaaagttcatatggaaccaaaaaagagcccgcatcgccaagtcaatcctaagccaaaagaacaaagctggaggcatcacaccacctgacttcaaactatactacaaggctacagtaaccaaaacagcatggtgctggtaccaaaacagagatatagaccaatggaacagaacagagccctcagaaataacgccgcatatctacaactatctgatctttgacaaacctgagaaagacaagcaatggggaaaggattccctatttaataaacggtgctgggaaaactggctagccatatgtagaaagctgaaactggatccgttccttacaccttatacaaaaatcaattcaagatggattaaagacttaaaggttagacctaaaaccataaaaaccctacaagaaaacctaggctttaccattcaggacataggcatgggcaaggacttcatgtctaaaacaccaacagcaatgggaacaaaagacaaaattgacaaatgggatctaattaaactaaagagcttctgcacagcaaaagaaactaccatcagagtgaacaggcaacctacaaaatgggagaaaattttcacaacctactcatctgacaatgggctaatatccagaatctacaatgaactcaaacaaatttacaagaaaaaaacaaacaaccccatcaaacagtgggcaaaggacatgaacagacacttctcaatagaagacatttatgcagccaaaaaacacatgaaaaaatgttcatcgtcactggccatcagagaaatgcaaatcaaaaccacaatgagataccatctcacaccagttagaatggcaatcattaaaaagtcaggaaacaacaggtgctggagaggatgtggagaaataggaacacttttacactgttggtgggactgtaaactagttcaaccattgtggaagtcagtgtggcgattcctcagggatctagaactagaaataccatttgacccagccatcccattactgggtatatacccgaatgactataaatcatgctgctataaagacacatgcacacctgggcaccctagaaagcagcccaccctgggttctataccccagaagtcacaggatcattgcgctgaagtgctaaaggacatcctgtttctagcagggactggaggagcccaggctcttctggccagtttctccttatctcaggatgttgaattcccagcaccttctgcagttattcttgagaactacaagcaaaagactgaaatgagcaccacctactggcagagcctaacagggccagccggcaaacaagaaaactgttcacagtcccagccccaagatcccaagtatacagtatggatgtgggggtttagatccaagaaacaatag

SEQ ID NO: 124363 - DNA, 4137 bp, Homo sapiens
atgggaaaaaaacagaacagaaaaactggaaactctaaaaagcagagggcctctcctcctccaaaggaacacagctcctcaccagcaacggaacaaagctggatggagaatgactttgatgagctgagagaagaaggcttcagacgatcaaattactctgagctacgggaggacattcaaaccaaaggcaaagaagttgaaaactttgaaaaaaatttagaagaatgtataactagaataactgatatagagaagtgcttaaaggagctgatggagctgaaaaccaaggctcgagaactacatgaagaatgcagaagcctcaggagccgatgtgatcaactggaagaaagggtatcagcaatggaagatgaaatgaatgaaatgaagcaagaagggaagtttagagaaaaaagaataaaaagaaatgaacaaagcctccaagaaatatgggactatgtgaaaagaccaaatctacctccgattgatgtacctgaaagtgacagggagaatggaaccaagttggaaaacactctgcaggatgttatccaggagaacttccccaacctagcaaggcaggccaacattcagattcaggaaatacagagaatgccacaaagatactcctcgagaagagcaactccaagacacataattgtcagattcaccaaagttgaaatgaaggaaaaaatgttgagggcagccagagagaaagcattcaagcaggcctcccggagagaagatgacattgccaaggtaaccagtggcatgagagttttattcaagccaggaaccacagaggtacaggagctggccctttgctatggtggaatggccaacagaaccatctcagccctcaagaccactcagaggcagctttccaagctctggaaggaggagctgctgcaggacgtgtgtgcaggactggcagaggagctgcatctgcctcccgatgcccctggtggcatggtggacttccggtgcaccctcaccctcagcttcttcttcaagttctacctgacagtccttcagaagctgggccaagagaacctggaagacaagtgtggtaaactggaccccactttcgccagtgcaactttactgtttcagaaagaccccccagccgatgtccagctcttccaagaggtgcccaagggtcagtctgaggaggacatggtgggccggcccctgccccacctggcagcggacatgcagcctctggtgaggccgtgtactgtgacgacattcctcgctacgagaatgagctgtctctccggctggtcaccagcacccgggcccacgccaagatcaagcatcgagatgaagttcaagaatatgctgtttcctatgattgtctgcccagcctggatccctgagctgaattcggtagaacatggacccgacggtatctcctttggagctgcttgccccctgagcattgtggaaaaaaccctggtggatgctgttgctaagcttcctgcccaaaagacagaggtgttcagaggggtcctggagcagctgcgctggtttgctgggaagcaagtcaagtctgtggcgtccgttggagggaacatcatcactgccagccccatctccgacctcaaccccgtgttcatggccagtggggccaagctgacacttgtgtccagaggtgagctgcctgaagcagaggtccaggaagaaggacttgggggagaaaagtctcaccagataggtcattttctggagaaacagagctcaaagttcagtgacccagctttccctgtgatttggatccagggaagcatggagaatgtacctggtttggtggacgggaaagctggatattttctctgtagagaattcacagcaggaactgctacctgcatgccttacctagtggggcaccaggagaactgtccagatggaccacaccttcttccctggctacagaaagaccctgctgagcccggaggagatactgctctccatagagatcccctacagcagggagaaatacaaactaccatcagagaatactacaaacacctctccgcaaataaactagaaaatctagaagaaatggataaattcctcgacacatacactctcccaagactaaaccagaaagaagttgaatctctgaatagaccaataacaggagctgaaattgtgccaataatcaacagcttaccaaccaaaaagagttcaggactagatggattcacagccgaattctaccagaggtacaaggaggaactgcatataaacagaaccaaagacaaaaaccacatgattatctcaatagatgcagaaaaggcctttgacaaaattcaacaacccttcatgctaaaaactctcaataaattaggtattgatgggacgtatctcaaaataataagagctatctatgacaaacccacagccaatatcatactgaatgggcaaaaactggaagcattccctttgaaaactggcacaagacagggatgccctctctcaccactcctattcaacatagtgttggaagttctggccagggcaatcaggcaggagaaggaaataaagggtattcaattaggaaaagaggaagtcaaattgtccctgtttgcagatgacatgattgtatatctagaaaaccccattgtctcagcccaaaatccccttaagctgataagcaacttcagcaaagtctcaggatacaaaatcaatgtacaaaaatcacaagcattcttatacaccaataacagacaaacagagagccaaatcatgagtgaactcccattcacaattgcttcaaagagaataaaatacctaggaatccaacttacaagggacgtgaaggacctcttcaaggagaactacaaaccactgctcaatgaaataaaagaggatacaaacaaatggaagaacattccatgctcatgggtaggaagaatcaatatcatgaaaatggccatactgcccaaggtaatgtatagattcaatgccatccccatcaagctaccaatgcctttcttcacagaattggaaaaaactactttaaagttcatatggaaccaaaaaagagcccgcatcatcaagtcaatcctaagcccaaagaacaaagctggaggcatcacgctacctgacttcaaactatactgcaaggctacagtaaccaaaacagcatggtactggtaccaaaacagaaatatagatcaatgcaacagaacagagccctcagaaataatgccacatatctacaactatctgatctttgacaaacctgacaaaaacaagcaatggggaaaggatcccctatttaataaatggtgctgggaaaactggctagccatatgtagaaagctgaaactggatcccttccttacaccttacacaaaaattaattcaagatggattaaagacttaaacattaggcctaaaaccataaaaaccctagaagaaagcctaggcattaccattcaggacataggcatgggcaaggacttcatgtctaaaacaccaaaagcaatggcaacaaaagacaaaattgacaaatgggatctaattaaactaaagagcttctgcacagcaaaagaaactaccatcagagtggacaggcaacctacagaatgggagaaaattttcacaacctactcatctgacaaagggctaatatccagaatctacaatgaactcaaacaaatttacaagaaaaaatcaaacaaccccatcaaaaagtgggcaaagcatatgaacagatgcttctcaaaagaagacatttatgcagccaaaagacacaggctgaaagacactcctcggaagcagctgcgatttgaaggggagcgtgtgacgtggatacaggcctcaaccctcaaggagctgctggacctcaaggctcagcaccctgacgccaagctggtcgtggggaacacggagattggtaagggccagggaggctgccctggggctgccagggggtctgggggtgtttctaggtcctcttgcccatcctcacctccccctgactttacttgcctctgcaccctatccctctgccccactgactacctggagcccactggaaatccctggacactccagttcctgcaaaggcccctagctgtggagtcccacaggcctgctcagccccttgctggatgtgtgacctcagaatag

SEQ ID NO: 124364 - DNA, 5195 bp, Homo sapiens
atgggagactttaacaccccactgtcaacattagacagatcaacgagacagaaagtcaacaaggatacccaggaattgaactcagctctgcaccaagcggacctaatacacatctacagaactctccaccccaaatcaacagaatatacatttttttcagcaccacaccacacctattccaaaattgaccacatagttggaagtaaagctctcctcagcaaatgtaaaagaacagaaattataacaaactatctctcagaccacagtgcaatcaaactagaactcaggattaagaatctcactcaaagccgctcaactacatggaaactgaacaacctgctcctgaatgactactgggtacataacgaaatgaaggcagaaataaagatgttctttgaaaccaatgagaacaaagacacaacataccagaatctctgggacgcattcaaagcagtgtgtagagggaaatttatagcactaaatgcccacaagagaaagcaggaaagatccaaaattgacaccctaacatcacaattaaaagaactagaaaagcaagagcaaacacattcaaaagctagcagaaggcaagaaataatgaaaatcagagcagaactgaaggaaatagagacacagaaaaccctttcaaaaaattaatgaattccaggagctggtttttttgaaaggatcaacaaaattgatagaccgctagcaagactaataaagaaaaaaagagaggagaatcaaatagacggcaataaaaaatgataaaggggatatcaccactgatcccacagaaatacaaactaccatcagagaatactacaaacacctctacgtaaataaactagaaaatctagaagaaatgaataaattcctcgacacatgcactctcccaagactaaaccaggaagaagttgaatctctgaatagaccaataacaggagctgaaattgtggcaataatcaatagcttaccaaccaaaaagagtccaggaccagatggattcacagccgaattctaccagaggtacaaggaggaactgcatataaacagaaccaaagacaaaaaccacatgattatctcaatagatgcagaaaaggcctttgacaaaattcaacaacgcttcatgctaaaaactctcaataaattaggtattgaagggacgtatttcaaaataataagagctatctatgacaaacccacagccaatatcataatgaatgggcaaaaactggaagcattccttttgaaaactggcacaagacagggatgccctctctcaccactcctattcaacatagtgttggaagttctggccagggcaattaggcaggacaaggaaataaagggtattcaattaggaaaagaggaagtcaaattgtccctgtttgcagatgacatgattttatatctagaaaaccccattgtctcagcccaaaatctccttaagctgataagcaacttcagcaaagtctcaggatacaaaatcaacgtacaaaaatcacaagcattcttatacaccaacaacagacaaacagagagccaaataatgagtgagctcccattcacaattgcttcaaagataataaaatacctaggaatccaacttacaagggatgtgaaggacctcttcaaggagaactacaaaccaatgctcaaggaaacaaaagaggatacaaacaaatggaagaacattccatgctcatgggtaggaagaatcaatattgtgaaaatggccatactgcccaaggtaatttatagattcaatgccatccccatcaagctaccaatgactttcttcacagaattggaaaaaactactttaaagttcatatggaaccaaaaaagagcccacatcgccaagtcaatcctaagccaaaagaacaaagctggaggcatcacactacctgacttcaaactatactacaaggctacagtaaccaaaacagcatcggtactggtaccaaaacagagatatagatcaatggaacagaacagagccctcagaaataatgccgcatatctacactattctgatcctttggacaaacctgagaaaaacaagcatgggggaaaggcatccctaatttataaaatggctgctggggaaaactggctagcccatatgtaggaagctgaaactggatcccttccttacatcttatacaaaaatcaattcaagatggattaaagacttaaatgttagacctaaaaccataaaaacctcagaagaaaacctaggcattaccattcaggacataggcatgggcaaggacttcatgtctaaaacaccaaaagcaatgccaacaaaagccaaaattgacaaatgggatctaattaaactaaagagcttctgcacagcaaaagaatctaccatcagagcgaacaggcaacctacaaaatgggagaaaattttcgcaacctactcatctgacaaagggctaatatccagaatctacaatgaactccaacaaatttacaagaaaaaaacaaacaaccccatcaaaaagtgggcgaaggacatgaacagacacttctcaaaagaagacatttatgcagctaaaaaacacgtgaaaaaatgctcatcatcactggccatcagagaaatgcaaatcaaaaccacaatgagataccatctcacaccagttagaatggcaatcattaaaaagtcaggaaacaacaggagctggtattttgaaaagatcaacaaaattgatagactgctagcaagactaataaagaaaaaaagagagaagaatcaaatagacgcaataaaaaatgataaaggggatatcaccactgatcccacagaaatacaaactaccaccagagaatactataaacacctctatgcaaataaactagaaaatctagaagaaatggataaattcctcgacacatacaacctcccaagactaaagcaggaagaagttgaatctctgaatagaccaataagaggctctgaaattgtggcaataatcaatagcttaccaaccaaaaaaagtccaggaccagatggattcacagccgaattctaccacaggtacaaagaggagctggtaccattgcttctgaaactattccaatcaatagaaaaagaggtaatcctccctaactcattttatgaggccagcatcatcctgataccaaagcctgacagagacacagcaaaaaaagagaattttagaccaatatccttgatgaacatcgatgcaaaaatcctcaataaaatactggcaaaccgaatccagcagcacatcaaaaagcttatccaccatgatcaagtgggcttcatccctgggatgcaaggctggttcaacatacgcaaatcagtaaatgtaatccagcatataaacagaaccaaagacaaaaaccacatgatcatctcaatagatgcagaaaagtcctttgataaaattcaacaacacttcatgctaaaaactctcaataaattaggtattgatgggtcatatctcaaaataataagagctacctatgacaaacccacagccaatatcatactgaatgggcaaaaactggaagcattccctttgaaaactggcacaagacacggatgccccctctcaccactcctattcaacatagtgttggaagttctggccagagcaatcaggcaggagaaggaaataaagggtattcaattaggaaaagaggaagtcaaattgtccctgttcatagatgacatgattgtatatctagaaaaccccatcatctcagcccaaaatctccttaagctgataagcaacttcagcaaagtctcaggatacaaaatcaatgtgcaaaaatcacaagcattcttatacaccaacaacagacaaacagagagccaaatcatgagtgaactcccattcacaattgcttcaaagagaataaaatacctaggaatccaacttacaagggatgtgaaggacctcttcaaggagaactacaaaccactgctcaaggaaataaaagaggacacaaacaaatggaagaacattccatgctcatgggtaggaagaatcaatatcgtgaaaatggccgtactgcccaaggtaatttacagattcgatgccatccccatcaagctaccaatgactttcttcacagaattggaaaaaactactttaaagttcatatggaaccaaaaaagagcccgcatcgccaagtcaatcctaagccaaaagaacaaagctggaggcatcacactacctgacttcaaactatactacaaggctacagtaaccaaaacagcatggtactggtaccaaaacagagatatagatcaatggaacagaacagagccctcagaaataatgccgcatatctacaactatctgatctttgacaaacctgagaaaaacaagcaatggggaaaggattccctatttaataaatggtgctgggaaaactggctagccatatgtagaaagctgaaactggatcccttccttacaccttatacaaaaatcaattcaagatggattaaagatttaaacgttagacctaaaaccataaaaaccctagaagaaaacctaggcattaccattcaggacataggcgtgggcaaggacttcatgtccaaaacaccaaaagtaatggcaacaaaagccaaaattgacaaatgggatctaattaaactcaagagcttctgcacagcaaaagaaactaccatcagagtgaacaggcaacctacaacatgggagaaaattttcgcaacctactcatctgacaaagggctaatatccagaatctacaatgaactcaaacaaatttacaagaaaaaaacaaacaaccccatcaaaaagtgggcgaaggacatgaacagacacttctcaaaagaagacatttatgcagccaaaaaacacatgaagaaatgctcatcatcactggccatcagagaaatgcaaatcaaaaccactatgagatatcatctcacaccagttagaatggcaatcattcaaaagtcaggaaacaacagggacaacacaaaggaagcactgctgtgtaacaacttggtggctgaagtcttggaggccaaacaggctcagaagcttcaaggcaaagcagccgtcctcagcctctcaaaaatctatgcgatcacagagacaaatgctgagacacccaacaggaagatgaaaattaaactgaagagacccatgaccaaattgcacccaagcatccaaatgttggtg

SEQ ID NO: 124365 - DNA, 4397 bp, Homo sapiens
atgaagcaagaagggaagtttagagaaaaaagaataaaaagaaatgaacaaagcctccaagaaatatgggactatgtgaaaagaccaaatctacatctgattggtgtacctgaaagtgacagggagaatggaaccaagttggaaaacactctgcaagatattatccaggaggacttccccaatctagcgaggaaggccaacattcagattcaggaaatacagagaactccacaaagatactcctcgagaagagcaactccaagacacacaattgtcagattcaccaaagttgaaatgaaggaaaaaatgttaagggcagccagagagaaaggtcgggttacccacaaagggaagcccatcagactaacagcggatctctcggcagaaactctacaagccaggagagaactaaaccaggaagaagttgaatctctgaataaaccagtaacaggctctgaagttgtggcaataatcaatagcttaccaaccaaaaagagtccaggaccagatggattcacagccgaattctaccagaagtacaaggaggaaccggtaccattccttctgaaactattccaatcaatagaaaaagagggaatcctccctaactcattttatgaggccagcatcatcctgataccaaagcctggcagagacacaacaaaaaaagagaattttagaccaatatccttgatgaacattgatgcaaaaatcctcaataaaatactggcaaaccgaatcccagcagcacatccaaaaagcttatccacccatgatccaagtgggcttcatccctgggatgcaaggctggttcaacatatgcaaatcaataaacgtaatccagcatataaacaaaaccaaagacaaaaaccacatgattatctcaatagatgcagaaaaggcctgtgacaaaaattcaacaacgcttcatgctaaaaacttttaataaatttgctattgatgggacgtatctcaaaataataagagctatctatgacaaacccacagccaatatcatcctgaatgggcaaaaactggaagcattccctttgaaaactggcacaaggacagggatgccctctctcaccactcctattcaacataggtgtttgggaagttctgggccaggggcaattaggcaggagaaggaaataaagggcattcgattaggaaaagaggaagtcaaattgtccctgtttgcagacgacatgattgtatatctagaaaaccccattgtctcagcccaaaatcttcttaagctgataagcaacttcagcaaactgaatctgcaaactcaggaatacaaaatcaatgtgcaaaaatcaccaagcattcctatacaccaacaacagacaaacagagagccaaatcatgagtgaactcccatttcacaattgcttccaagagaattaaatacctaggaatccaccttacaagggacgtgaaggacctcttcaaggagaactacaaaccactgctcaatgaaataaaagaggacataaacaaatggaagaacattttcattccatgcttatgggtaggaagaatcaatatcgtgaaaatggccatactgcccaagggaatttatagattcaatgccatccccatcaagctaccaatgactttcttcacagtactggaaaaaactactttaaagttcatatggaaccaaaaaagagcccgcattgccaagtcaatcctaagcaaaaaggaacaaagctggaggtatcacactacctgacttcaaactatactacaaggctacagtaaccaaaacagcattgtacttgtaccaaaacagagatgtagatcaatggaacagaacagagccctcagaaataatgccacttatactacaactatctgatctttgacaaacctgagaaaaacaagcaatgggggaaaggattcccttatttaataaatggtgctgggaaaaactggcttagccatatgtagaaagctgaaacttggatcccttccttacaccttatacaaaaattaattcaagatggattaaagacttaaatgttagacctaaaaccataaaaaccctagaagaaaacctaggcaataccattcaggacataggcatgggcaaggacttcaatgtttaaaacagcaaaagcaatggcaacaaaagcccaaaattgacaaatgggatctaattcaactaaagagcttctgcacagcaaaagaaactaccatcagagtgaacaggcaacctacaaaatgagagaaaatattcgcaacctactcatctgacaaagggctaatatccagaatctacaatgaactcaaacaaatttacaagaaaaaaacaaacaaccctatcaaaaagtgggcaaagcacatgaacagacacttctcaaaagaagacacttatgcagccaaaaaacacatgaaaaaatgctcatcatcactggccatcagagaaatgcaaatcaaaaccacaatgagataccatctcacaccagttagaatggcaatcattaaaaagtcaggaaacaacaggtgctgttgaggatgtggagaaataggaacacttttacactgttggtgggactgtaaactagttcaaccgttgtggaagtcagtgtggcgattcctcagggatctagaaccagaaataccatttgacccagccatcccattactgggtatatacccaaaggactctaaatcatgctgctataaagacacatgcacacgtatgtttattgcggcattattcacaatagcaaagacttggaaccaacccaaatgtccaacaatgatagactggattaagaaaatgtggcacatatacaccatggaatactatgcaagccataaaaaaatgatgagtttatgtcctctgtcgggacgtggatgaagctggaaaccatcattctcagcaaactatcgcaagaacaaaaaaaccaaacaccgcgtattctcactcataggtgggaattgaacaatgagaacacatggacacagaaaggggaacatcacactctggggactgtgtaacaagttttgtgcagattgccagtctaaaggtagcgcatcccacctggcgggccaggggtccagccgcgccggggtggtgggggtgggctgcgtgatgagccagatctgcctcagctgtggccatccgtcagcgtaaggttgctctggtggtcgtcttcagtttgtccagctcttccccttatcccccatcctccctgctgaggtgtgtgggcgcacagcgcgggactggcgggcagctccacctgcagccccagtgcgagatccactggatgaagccagctgggctcctgagtctggtggggccttggagaacctttatgtctagctcagggattgtaaatacaccagtcggcactctgtgaatctgggggtgcacatatccagggtaaagtcagttaacctcgaccagtggactcaagaacagattcaggtacttagcccaagagtgagtcagctgcttccatatatctatgtaaaaggaattccagatgaatttgtttttgagaaggtgaaaatggtaagttgggaagtatttgcactgtatggacagcctcaggtatgtgtatatttgtgaaagggaatggatttgttgggccttggtaagagttggacttttcagcttccatgttcttacaaattttgataaattctcagtgaccctggtctgttggcctctgttccatccccttcttcttccggttccagaaaggtgagtcttgtgggctcctcaggattaaagaacattctgaaatgggtgattttgatatcttaatcggagccagggagcaaatcagaagaaataggcaagaaacagctctctaaagactccattctttcactgtatggatcccagacgcctcaaatgcctactcaaggtagatttcatgggtgtcatggccatgtgccaggtagagacatgagggcttccatgcaggaattacctcctaacagcataatggggagcatgatgcctccaccagtaggcatggttgctcagccaggagcttctgggatggttgcccccatggccatgcctgcaggctatatgggtggcatgcaggcatcaatgatgggtgtgccgaatggaatgatgaccacccagcaggctggctacatggcaggcatggcagctatgccccagactgtgtatggggtccagccagctcagcagctgcaatggaaccttactcaggtaagctaccccattttacttgcagcaagagttttgagccttcctcaagtttttctcggtttgtcaatgagtggcggaaatggacaggcagcaaatcagactctcagtcctcagatgtggaaataaaaacaaaacacctgtatggctgccattctcttcagccctcgctctcccctttccacagcctcca

SEQ ID NO: 124366 - DNA, 7688 bp, Homo sapiens
aagagagcagtggttctcccagcacgcagctggagatctgagaacgggcagactgcctcctcaagtgggtccctgacccctgacccccgagcaggcctaactgggagggcaccccccagcagggggcacactgacacctcacacacggcagggtattccaacagaccttcagctgagggccctgtctgttagagggaaaactaacaaccaggaaaggacatctacaccgaaaacccatctgtacattcaccatcattcaaagacccaaaagtaaataaaacccaccaaagatggggaaaaaaaacagagcgggaaaatctggaaactcttaaaacccagagcgcctttccctcctccaaaggaacgcagttccctcaagagccaacggaaccaaagcttggagggagaatgactttgaagagctgagagaagaaggcttcagacgatcaaattacttctgagcctacgggaggacattcaaaccaaaggcaaagaagttgaaaactttgaaaaaaaatttagaagaatgtataactagaataaccaatacagagaagtgcttaaaggagctgatggagctgaaaaccaaaggctcgagaaactacgtgaaagaatgcagaacgcctcaggagccgatgcgatcaactggaagaaagggtatcagcaatggaagatgaaatgaatgaaatgaagcgagaagggaagtttagagaaaaaagaataaaaagaaatgagcaaagcctccaagaaatatgggactatgtgaaaagaccaaatctacgtctgattggtgtacctgaaagtgatgtggagaatggaaccaagttggaaaacactctgcgggatattatccaggagaacttccccaatctagcaaggcaggccaacgttcagattcaggaaatacagagaacgccacaaagatactcctcgagaagagcaactccaagacacataattgtcagattcaccaaagttgaaatgaaggaaaaaatgttaagggcagccagagagaaagacagatcaacgagacagaaagtcaacaaggatacccaggaattgaactcagctctgcaccaagcggacctaatagacatctacagaactctccaccccaaatcaacagaatatacatttttttcagcaccacaccacacctattccaaaattgaccacatagttggaagtaaaactctcctcagcaaatgtaaaagaacagaaattataacaaactatctctcagaccacagtgcaatcaaactagaactcaggattaagaatctcactcaaagccgctcaactacatggaaactgaacaacctgctcctgaatgactactgggtacataacgaaatgaaggcagaaataaagatgttctttgaaaccaacgagaacaaagacaccacataccagaatctctgggacgcattcaaagcagtgtgtagagggaaatttatagcactaaatgcctacaagagaaagcaggaaagatccaaaattgacaccctaacatctcaattaaaagaactagaaaagcaagagcaaacacattcaaaagctagcagaaggcaagaaataactaaaatcagagcagaactgaaggaaatagagacacaaaaaacccttcaaaaaatcaatgaatccaggagctggttttttgaaaggatcaacaaaattgatagaccgctagcaagactaataaagaataaaagagagaagaatcaaatagacacaataaaaaatgataaaggggatatcaccaccaatcccacagaaatacaaactaccatcagagaatactacaaacacctctatgcaaataaactagaaaatctagaagaaatggatacattcctcgacacatacactctcccaagactaaaccaggaagaagttgaatctctgaatagaccaataacaggctctgaaattgtggcaataatcaatagtttaccaaccaaaaagagtccaggaccagatggattcacagccgaattctaccagaggtacaaggaggaactggtaccattccttctgaaactattccaatcaatagaaaaagagggaatcctccctaactcattttatgaggccagcatcattctgataccaaagccgggcagagacacaaccaaaaaagagaattttagaccaatatccttgatgaacattgatgcaaaaatcctcaataaaatactggcaaaccgaatccagcagcacatcaaaaagcttatccaccatgatcaagtgggcttcatccctgggatgcaaggctggttcaatatacacaaatcaataaatgtaatccagcatataaacagagccaaagacaaaaaccacatgattatctcaatagatgaagaaaaagcctttgacaaaattcaacaacccttcatgctaaaaactctcaataaattagagaataaaatacctaggaatccaacttacaagggatgtgaaggacctcttcaaggagaactacaaaccactgctcaaggaaataaaagaggacacaaacaaatggaagaacattccatgctcatgggtaggaagaatcaatatcatgaaaatggccatactgcccaaggtaatttatagactcaatgccatccccccttcaaggttacccaatgactttcttcacagaattggaaaaaactaccttttaaaggtcattatggaaccaaaaaaggagcccgcatcgccaaggcaatcctaagccaaaagaacaaagctggaggcatcacactacctgacttcaaactatactacaaggctacagtaaccaaaacagcatggtactggtaccaaaacagagatatagatcaatggaacagaacagagccctcagaaataacgccgcatatctacaactatctgatctttgacaaaccctgggaaaaaccaagcaatgggggaaaggattccctatttaataaatggtgctgggaaaactggctagccatatgtagaaagctgaaactggatcccttccttacaccctatacaaaaatcaattcaagatggattaaagacttaaacgttagacctaagaccataaaagaccctagaagaaaacctaggcaataccattcaggacataggcacgggcaaggacttcatgtctaaaacaccaaaagcaatggcaacaaaagacaaaattgacaaatgggatctaattaaattaaagagtttctgcacagcaaaagaaactaccatcagagtgaacaggcaacctacgaaatgggagaaaattttcacaacctactcatctgacaaagggctaatatccagaatctacaatgaactcaaacaaatttacaagaaaaaaacaaacaaccccatcaaaaagtgggcgaaggatttgaacagacacttctcaaaagaagatatttatgcagccaaaagacacatgaaaaaatgctcatcatcactggccatcagagaaatgcaaatcaaaaccacaatgagataccatctcacaccagttagaatggcgatcattaaaaattcaggaaacaacagatgggacacaacagtcatgggctgtctcagctgcccaaagcctgaggcagaccacatgagagctgtggcttcttcttggattcagagagaagtaatggaaggcctgtctgatgttgcttcttttgcaactaaacttaaaaacactctcatccagtaccatagcattgaagaagataagtggcgagttgctaagaaaacgcatgtaaacagaaccaaagacaaaaaccacatgattatctcaatagatgcagaaaaggcctttgataaaattcaacagcgcttcatgctaaaaactctcaataaattaggtattgatgggacatatctcaaaataataagagctatctatgacaaacccacagccaatatcatactgaatgggcaaaaactggaagcattccctttgaaaactggcacaagacagggatgccctctctcaccactcctattcaacacagtgttggaagttctggccagggcaatcaggcaggagaaagaaataaagggtattcaactagaaaaagaggaagtcaaattgtccctgtttgcagatgacatgattgtatatctaggaaaccccatcttctcagaccaaaatctccttaagctgataagcaacttcagcaaaatctcaggatacaaaatcaatgtgcaaaaatcacaagcattcttatacaccaataacagacaaacagagagccatatcatgagtgaactcccattcacaattgcttcaaagagaataaaatacctaggaatccaacttacaagggatgtgaaggacctcttcaaagagaactacaaacacctgctcaaccgaaataaaagaggacacaaacaaatggaagaacattccatgctcatggataggaagaatcaatatcgtgaaaatggccatactgcccaaggtaatttatagattcaaggccatccccatcaagctaccacagactttcttcacagaattggaaaaaactactttaaagttcatatggaaccaaaaaagagcccgcattgccaagtcaatcttaagccaaaagagcaaagctggaggcatcacgctacctgacttcaaactatactacaaggctacagtaaccaaaacagcatggtactggtaccaaaacagagatatagaccaatggaacagaacagagccctcagaaataataccacacatctacaaccatctgatctttgacaaaactgataaaaacatgaaatgggggaaaggattccctatttaataaatggtgctgggaaaactggctagccatatgtaggagaaagctgaaactggatcccttccttacaccttatacaaaaattaattcaagatggattaaagacttaaatgttagattaaaaaccataaaaaccctagaagaaaacctaggcaataccattcaggacataggcatgggcaaggacttcatgtctaaaacaccaaaagccatggcaacaaaagccaaaattgacaaatgggatctaattaaactaaagagcttctgcacagcaaaagagaaactaccatcatagtgaacaggcaacctacagaatgggagaaaatttttaaaatctacccatctgacaaaggactaatatccagaatctacaaagaacttaaacaaatttacaagaaaaaaatcaaacaaccccatcaaaaatgtgggcaaaggatatgaacagacacttctcaaaagaagacattttatgcagccaaaagacacatgaaaaaatgttcatcatcactggccatcagagaaatgcaaatcaaaaccacataccatgctggaccagatggatttacagccgaattctaccagaggtacaaggaggaactggtaccattccttctgaaactattccaatcaatagaaaaagagggaatcctccctaactcattttatgaggccagcatcattctgataccaaagccgggcagagacacaaccaaaaaaagagaattttagaccaatatccttgatgaacattgatgcaaaaatcctcaataaaatactggcaaaacgaatccagcagcacatcaaaaagcttatccaccatgatcaagtgggcttcatccctgggatgcaaggttggttcaatatacgcaaatcaataaattgtaatccagcatataaacagagccaaagacaaaaaccacatgattatctcaatagatgcagaaaaagcctttgacaaaattcaacaacccttcatgctaaaaactctcaataaattaggtattgatgggacgtatttcaaaataataagagctatctatgacaaccccacagccaatatcatactgaatgggcaaaaactggaagcattccctttgaaaactggcacaagacagggatgccctctctcaccactcctattcaacatagtgttggaagttctggccagggcaattaggcaggagaaggaaataaagggtattcaattaggaaaagaggaagtcaaattgtccctgtttgcagacaacatgattgtatatctagaaaaccccattgtctcagcccaaaatctccttaagctgataagcaacttcagcaaagtctcaggatacaaaatcaatgtacaaaaatcacaagcattcttatacaccaacaacagacaaacagagagccaaatcatgagtcaactcccattcacaattgcttcaaagagaataaaatacctaggaatccaacttacaagggatgtgaaggacctcttcaaggagaactacaaaccactgctcaaggaaataaaagaggatacaaacaaatggaaaaacattccatgctcagggggaaggaagaatcaatatcgtgaaaatggccatactgcccaagaattggaaaaaaactactttaaagttcatatggaaccaaaaaagagcccgcattgccaagtcaatcctaagccaaaagaacaaagctggaggcatcacggtacctgacttccaactatactacaaggctacagtaaccaaaacagcatggtactggtaccaaaacagagatatagaccaatggaacagaaaagagccctcagaaataatgccacatatctatgactctctcatctttggcaaacctgacaaaaacaagcaatggggaaaggattccctatttaataaatggtgctgggaagactggctagccatatgtagaaagctgaaactggatcccttccttacaccttgtacaaaaatcaactcaagatgggttaaagacttaaatattagacctaaaaccataaaaaccctagaagaaaacctaggcaataccattcaggacataggcatggccaaggacttcatgtctaaaacaccaaaagcaatggcaacaaaagccaaaattgacaaatgggatctaattaaactaaagagcttctgcacaagaatagcaaaggaacctaccatcagagtgaacaggcaacctacaaaatgggagaaaattttcgcaacctactcatctgacaaagggctaatatccagaatctacaatgaactcaaacaaatttacaagaaaaaaacaaacaaccccatcaaaaagtgggcaaaggacatgaacagacacttctcaaaagaagacatttatgcagccaaaaaacacatgaaaaaatgctcatcatcactggccatcagagaaatgcaaatcaaaaccactatgagataccatctcacaccagttagaatggcaatcattaaaaagtcaggaaacaacaggtgctggagaggatgtggagaaacaggaacgcttttacactgttggtgggactgtaaactagctcaaccattgtggaagtcagtgtggcgattcctcagggatctagaactagaaataccatttgacccagccatcccattactgggtatatacccaaatgactataaatcatgctgctataaagacacatgcacacgtatgtttattgcggcattattcacaatagcaaagacttggaaccaacccaaatgtccaacaattatagactggattaagaaaatgtggcacatatacaccatggaatactatgcagccataaaaaatgatgagttcgtgtcctttgtagggacatggatgaaattggaaatcatcattctcagtaaactatcacaagaacaaaaaaccacacaccgcatattctcactcataggtgggaattga

SEQ ID NO: 124367 - DNA, 4526 bp, Homo sapiens
atgggagactttaacaccccactgtcaacattagacagatcaacgagacagaaagttaacaaggatacccaggaattgaactcagctctgcatcaagcagacctaatagacatctacagaactctccaccacaaatcaacagaacatacattttttgcagcaccacaccacacctattccaaaattgaccacatacttggaagtaaagctctcctcagcaaatgtaaaagaacagaaattataacaaactatctctcagaccacagtgcaatcaaactagaactcaggattaagaatctcactcaaaaccgctcaactacatggaaactgaacctgctcctgaataactactgggtacataacgaaatgaaggcagaaataaagatgttctttgaaaccaacaagaacaaagacacaacataccagaatctctgggacacattcaaagcagtgtgtagagggaaatttatagcactaaatgcccacaagagaaagcaggaaagatccaaaattgacaccctaacatcacaattaaaacaactagaaaagcaagagcaaacacattcaaaagctagcagaaggcaagaaataactaaaatcagaggagaactgaaggaaatagagacacaaaaaacccttcacaaaattaacgaatccaggagctggttttttgaaaggatcaacaaaattgatagactgctagcaagactaataaagaaaaaaagagagaagaatcaaatagatgcaataataaatgataaaggggatatcaccaccgatcccacagaaatacaaactaccttcagagaatactacaaacacctctacgcaaataaactagaaaatctagaagaaatggataaattcctcgacacatacactctcccaagactaaaccaggaagaagttgagtctctgaatagaccaataacaggagctgaaattgtggcaataatcaatagcttaccaacgaaaaagagtccaggaccagatggattcacagccaaattctaccagaggtacaaggaggaactgagaataaaatacctaggaatccaacttacaagggatgtgaaggacctcttcaaggagaactacagaccactgctcaaagaaataaaagaggatacaaacaaatggaagaacattccatgctcatgggtaggaagaatcaatataatgaaaatggccatactgcccaaggtaatttacagattcaatgccatccccatcaagctaccaatgactttcttcacagaattggaaaaagctactttaaagttcatatggaaccaaaaaagagcctgcatcgccaagtccatcctgagccaaaagaacaaagctggaggcatcacactacctgacttcaaactatactacaaggctacagtaaccaaaacagcatggtactggtaccaaaacagagatatagatcaatggaacagaacagagcccacagaaataacaccacatatctacaactatctgatctttgacaaacctgagaaaaacaagcaatggggaaaggattccctatttaataaatggtgcttggaaaactggctagccatatgtagaaagctgaaactggatcccttccttacaccttatacaaaaatcaattcaagatggattaaagacttaaacgttagacctaaaaccataaaaaccctagaagaaaacctaggcattaccattcaggacataggcatgggcaaggacttcatgtctaaaacaccaaaagcaatggcaacaaaagccaaaattgacaaatgggatctaattaaactaaagagcttctgcacagcaaaagaaactaccatcagagaatttgagcagtttaacaggaggctaaatgaagtttctaagagagttcgcatacccttgcctgtgtctaatatactttgggaacattgtatacgattggctaatcgaactattgtagaaggatatgccaatgtcaagaaatgcagtaatgagggtcgtgccctgatgcaattggattttcaacagtttttaatgaaacttgaaaaactaacagatattagacccattcctgataaagaatttgtagaaacttatattaaagcttattacctaactgagaatgacatggaacggtggatcaaagagcacaggttgaggggaagaagagagtctgtagagaagagagacccagaacttcatctgtgtgttctgctgtgcatccttgacagcacctggcacagaatctcagctaagatggatgaaatgcaagtactcaggccctttgaactagaatttttgcctaaactgaaagagttgaaatacctgagactgggcgatttacaaacgaaagaggcttataatggacttaccattccacgtggctggggaagcttcacaatcatggtggaaggcaaggaggagcaggtcatgtcttacatggatggcagcaggcaaaaagagaatgaggaagacactgcagatgacatgattatatatctagaaaaccccattgtctcagcccaaaatctccttaagctgataagcaatttcagcaaagtctcaggatacaaaatatacaaaatcgatgtgcaaaaatcacaagcattcctatacaccaataatagacaaacagagagccaaatcatgagtgaactcccagttcacaattgcttcaaagagaataaaatacctaggaatccaacttacaagggatgtgaaggacctcttcaaggagaactacaaaccactgctcaaggaaataaaagaggatacaaacaaatggaagaacattccatgctcatgggtaggaagaatcaatatcatgaaaatggccatacttgcccaaggtaatttacagattcaatgccatccccatcaagctaccaatgactttcttcacagaattggaaaaaaactactttaaagttcatatggaaccaaaaaagagcccgcatcgcccaagtccaatccctaagcccaaaagaacaaaagccgggggcatcaaccctacctgacttcaaactatactacaagggctacagtaaccaaaacagcataggtactggtaccaaaacagagatatagaccaatggaacagaacagagcccctcagaaataaggcccacataccctacaactatctgatctttggacaaacctgacaaaaacaagcaatgggggaaaggattcccctatttaataaatggtgctgggaaaactggctagccatatgtagaaagctgaaactggatcccttccttacaccttatacaaaaaatcaaattcaagatggattaaagacttaaacgttagacctaaaaccataaaaaaccctagaagaaaacctaggcatttaccattcaggacataggcatgggcaaggacttcatgtctaataaaacaccaaaagccaatggcaaccaaaagacaaaattgacaaatgggatctaatttaaactaaagagcttcctgcacagcaaaagaaactaccatcagagtaaacaggccaacctacaaaatggaagaaaattttcacaacctactcatctgagaaaagggctaatatccagaatctacaatgaactcaagcaaatttacaagaaaaaaaaaacaaacaatcccatcaaaaagtgggcgaaggatatgaacagacacttctcaaaagaagacacttatgcagccaaaaaaacacatgaaaaaatgctcaaccatcactggccatcagagtaatgcaaatcaaaaccacaatgagataccatctcacaccagttagaatggcaatcattaaaaagtcaggaaacaacaggtgctggagaggatgcggagaaataggaacacttttacactgttggttggactgtaaactagttcaaccattgtggaagtcagtgtggcgattcctcagggatctagaactagaaataccatttgacccagccatcccattactgggtatatacccaaatgagtataaatcatgctgctataaagacacatgcacacgtatgtttattgcggcattattcacaatagcaaagacttggaaccaacccaaatgtccaacaatgatagactggattaagaaaatgtggcacatatacaccatggaatactatgcagccataaaaaatgatgagttcatgtcctttgtagggacatggatgaaattggaaaccatcattctcagtaaactatcgcaagaacaaaaaaccaaacaccgcatattctcactcatagaccgtcttgaccagcgcaacttcctcctaggttccagcggggcctttccactgtcccatgacctggctgagcgggaccaggcctctgggacaggcaaggcctctcctcacaggcaactcaacccttcacatccagcccagccctcggtggactccggaccgctgaccgccaatcacaacacagcctctgctactttcagcctgccctgcctttgggctaaggctcccccagctggccacctggaacatggcacctttcgagtgaaaagttttctgggccacagtcctgccatcaatcaataa

SEQ ID NO: 124368 - DNA, 1217 bp, Homo sapiens
atggaagatataaaaaggacccaaaataaactttcagagatgaaagctacactggctgagatgaaaaatacgttggatgggattaatgaccatggaagagattccagaagaaagattcgtaaacttcaagacaatggcggagatgacccaacaggaaacacacagagaaagaagaatttaataaatggtccatcactgagtgtgcacattggagaaaagagaggaggaagaaggagttgggcagagactctcacccctctgcaaaccaaggctctgaggctgggacctactactccttctgctaggagaaaatgtggtattgtgcccaatttacagacaaggaaaactgaggcctatagatacccagacactcacccaggggagacgcctgttggcactgcagtcctcagcattcagaagccaaaattagagtctgtgattgatgtgcgagtcaatatgtcgtcctttcacccagagcctgagctgcagccaactcaaaccagtgtgcttcctgatcaggatgccacagtcgctggctccacaacgaaattcccggaagagcaggaagcaaggcaaggccgggtgagagagaggccagcaactagagagaggcctgtgcccgggggtgtttcggttccaggcctccatcacatccacttcttgcgcggtccctcacttccgcttgcctccttgactcgcatcaccgtcctggaggctgtggtgtgcttcttctctgtctggtccatcgttggcctctcaggattccacacctacttgatcagctccaaccagacaacaaatgaggacattaaaggatcctggtcaaataaaagaggtaaagaaaattacaatccctacagctacggaaatatctttaccaactgctgtgttgccctgtgtgggcccatctcaccaaggacaccagccacactggacaaaggcccaccccaattgagtgtgaacctcatcttaacttggttacatctgcagagacgctacttgcaagtaagcctgatcgacagaagagggtacatccagcccgacacgccgcagccagcagcaccctccaatggcatcaccatgtacggggccacgcagtcacagagtgacatgcacattggagaaaagagaggaggaagaaggagttgggcagagactctcacccctctgcaaaccaaggctctgaggctgggacctactactccttctgctaggag

SEQ ID NO: 124369 - DNA, 466 bp, Homo sapiens
  misc_feature (1)...(466): n = a,t,c or g
aggtccagcgggacttgtaggccaaagtcatctgcatctgtgagggcttctcggaccaggcccccccactgcttgctgatgcggcccacactgcgggattcatcccgagtcttcacctcaaagttggtgtctgtgccacagccacaggtccagcagggccccaccactcgcaagactgtctggcgatcggcatcctggatggagaacttggggaggaagggatgccaggtctgtagcacgtggccaatggtggtgcctggtggagcctgtacttccattttccactcgctcagccttctggtgaatcaaaatctgatcaatctgccatgggagaagggctggggttttcgagatgatggtgtctgggtggcttagttctggaagcggaggcaaactcggagatagccagacagacacagagcggacgcgtgggtcaatnnnnaattccggagcggtccgcaaggat

SEQ ID NO: 124370 - DNA, 2183 bp, Homo sapiens
  misc_feature (1)...(2183): n = a,t,c or g
atatccgtgaccctgggaagaagcctgtgatgctgtttctccatggcggctcctacatggaggggaccggaaacatgttcgatggctcagtcctggctgcctatggcaacgtcattgtagccacgctcaactaccgtcttggggtgctcggttttctcagcaccggggaccaggctgcaaaaggcaactatgggctcctggaccagatccaggccctgcgctggctcagtgaaaacatcgcccactttgggggcgaccccgagcgtatcaccatctttggccggtactcacagcctggcctgagctaccacatcgcctttgggcccgtggtggatggcgacgtggtccccgatgaccctgagatcctcatgcagcagggagaattcctcaactacgacatgctcatcggcgtcaaccagggagagggcnctcaagttcgtggaggactctgcagagagcgaggacgcgcctttgacttcactgtctccaactttgtggacaacctgtatggctacccggaaggcaaggatgtgcttcgggagaccatcaagtttatgtacacagactgggccgaccgggacaatggcgaaatgcgccgcaaaaccctgctggcgctctttactgaccaccaatgggtggcaccagctgtggccactgccaagctgcacgccgactaccagtctcccgtctacttttacaccttctaccaccactgccaggcggagggccggcctgagtgggcagatgcggcgcacggggatgaactgccctatgtctttggcgtgcccatggtgggtgccaccgacctcttcccctgtaacttctccaagaatgacgtcatgctcagtgccgtggtcatgacctactggaccaacttcgccaagactggggaccccaaccagccggtgccgcangataccaagttcatccacaccaagcccaatcgcttcgaggaggtggtgtggagcaaattcaacagcaaggagaagcagtatctgcacataggcctgaagccacgcctctggagccgattccgtggtgtcttataccaagtgttccatgataccatttgtgagaaagaagctcccaagtcatcattactcagaaagcagacccagccccctaagaagcagagttctcctgcagtccatcttcggtgcaccatggaccctgtgatgatgactgtgtccccgcccccagctcaccgccatcgccgtcgaggctctcccacacgctgtgctcactgcccagtagcttgggctcctgacactgatgacgagaagcctcatcagtacccagccatctgctcctaccactgggatgtccctgaggactgggaaggcttccaacacactcaggggacctgggttccctggtctcaggatgccccagagtcccctccccagaccatccgcttccagcctaccgtagaggaaaggcccctcaaaacaggcatatggtccgagctgggcctaagggcctatgtgtatcctgtgaaccccccacctcccagccctgaggctcctagccacaagaacggccgaatagtgtatgatgcccgggacatgagacggcggcttcgggaactgacccgggaggtggaggccctgtccggctgctaccccctagcctctggatccagcactgccgaggagacaagcaagaattgggtgtaccgttccctaactgggagccaaaagatgtcacaactacaccgagtgcctttctttgatcaggaggacccggattcctacctggaggaggaggacaacctgcccttcccgtatcccaagtacccacgtcgcggctggggcgggttttatcagagagcgggcctgccctccaatgtggggctgtggggccaccagggtggtatcctggccagtctgccaccaccctctctctacctgtcacctgagctgcgctgcatgcccaagcgtgtagaggccaggaagtgccaggacttaggagactcgattcttcttcttctgggcagcttcatcttgctcaacgtgtggatcaatgtggtgactctgctctggaagcatctgaagagctccttgcggattcttttccgtcattttttccccaaaggaatgcgcaggaaagctcagcaggccgcggaaaaagaaggccctggccctgcatacggggcacacacgaacgaccaccagcgcaaatga

SEQ ID NO: 124371 - DNA, 392 bp, Homo sapiens
attcggcacgagggtaacccacatcgcagccaaaagatgtcacaactacaccgagtgcctttctttgatcaggaggacccggattcctacctggaggaggaggacaacctgcccttccagtatcccaagtacccacgtcgcggctggggcgggttttatcagagagcgggcctgccccccaagtggtcccccagacaaggctcaggatgtccacattcactgcatcctggaccctgtgcaggtgaagatgtcccgacccacgcagtactcctctttctcctgccaccatttctccaaccatcacagtagcagtcttcttcgctgtgttcgtcgccgccgccgccgccaccgccgttgtcgccgtcgctgctgcaaccaccagcagcggccgc

SEQ ID NO: 124372 - DNA, 815 bp, Homo sapiens
cgtggaccaggacgtgcagcctgcccgctaccacatcgcctttgggcccgtggtggatggcgacgtggtccccgatgaccatgagatcctcatgcagcagggagaattcctcaactacgacatgctcatcggcgtcaaccagggagagggcctcaagttcgtggaggactctgcagagagcgaggacggtgtgtctgccagcgcctttgacttcactgtctccaactttgtggacaacctgtatggctacccggaaggcaaggatgtgcttcgggagaccatcaagtttatgtacacagactgggccgaccgggacaatggcgaaatgcgccgcaaaaccctgctggcgctctttactgaccacaaatgggtggcaccagctgtggccactgccaagctgcacgccgactaccagtctcccgtctacttttacaccttctaccaccactgccaggcggagggccggcctgagtgggcagatgcggcgcacggggatgaactgccctatgtctttggcgtgcccatggtgggtgccaccgacctcttcccctgtaacttctccaagaatgacgtcatgctcagtgccgtggtcatgacctactggaccaacttcgccaagactggggaccccaaccagccggtgccgcaggataccaagttcatccacaccaagcccaatcgcttcgaggaggtggtgtggagcaaattcaacagcaaggagaagcagtatctgcacataggcctgaagccacgcctctggagccgattccgtggtgtcttataccaagtgttccatgataccatttgtgagaaag

SEQ ID NO: 124373 - DNA, 943 bp, Homo sapiens
cgggcaggcggccagggagtagggtagggatggggccccccttctgtcccctgcagtgtacatggaggaaaggggctgccccagaggaggggccagggcaggtgacccatctggagttctggtcgaggtgatggtctcctcacaccatggtggcctctaactggtgatggcagagggcccagcgcttcctcgcttctcaaagaacatgtagtcaatgaggaatgtggctcccagcagcacagccttcaccttcacatccaggtccagcgggaactgtaggccaaagtcatctgcatctgtgagggcttctcggaccaggccccccccactgcttgctgatgcggcccacactgcgggattcatcccgagtcttcacctcaaagttggtgtctgtgccacagccacaggtccagcagggccccaccactcgcaagactgtctggcgatcggcatcctggatggagaacttggggaggaagggatgccaggtctgtagcacgtggccaatggtggtgcctggtggagcctgtacttccatctgggagtgggaagcagacagggtcactcctggaggccacaggggcagcagctgcagccacagtgcagcgggcggagcaaacgcagcacctcacggtccccggggtcggccaggcggacacgcagcggccggcgggcgccacagcacagacgggcgcagcagttgctctcctcggccgcctgacccaggggctgcccggccccagagcgcagttcataccgattacaggtctcccagcctaggaacgtttccactcgctcagccttttggtgaatcaaaatctgatcaatctgcaccaggaattcgaggccagaaggcacccctggcagtggcaagaagggggcagcagaccccaaggccacggggccaggcgaggggaagagggcgtggcacgaggcctcgtcc

SEQ ID NO: 124374 - DNA, 742 bp, Homo sapiens
cagagtcaccacattgatccacacgttgagcaagatgaagctgcccagaagaagaagaatcgagtctcctaagtcctggcacttcctggcctctacacgcttgggcatgcagcgcagctcaggtgacaggtagagagagggtggtggcagactggccaggataccaccctggtggccccacagccccacattggagggcaggcccgctctctgataaaacccgccccagccgcgacgtgggtacttgggatacgggaagggcaggttgtcctcctcctccaggtaggaatccgggtcctcctgatcaaagaaaggcactcggtgtagttgtgacatcttttggctcccagttagggaacggtacacccaattcttgcttgtctcctcggcagtgctggatccagaggctagggggtagcagccggacagggcctccacctcccgggtcagttcccgaagccgccgtctcatgtcccgggcatcatacactattcggcctgaggagcggtgccgggaaaattcagggatgactgctgggcccagggtgggagctgggacaggctggtactgagccgcctctgcctctggcaccgccccctccccaccgttcttgtggctaggagcctcaggggctgggagagggggggggcacaggatacacataggcccttaggcccagctcggaccatatgcctgttttgaggggcctttcctctacggtaggctgaacggatggctgggg

SEQ ID NO: 124375 - DNA, 496 bp, Homo sapiens
gcggccgccacctacgtgcagaaccagagcgaggactgcctgtacctcaacctctacgtgcccaccgaggacggtccgctcacaaaaaaacgtgacgaggcgacgctcaatccgccagacacagatatccgtgaccctgggaagaagcctgtgatgctgtttctccatggcggctcctacatggaggggaccggaaacatgttcgatggctcagtcctggctgcctatggcaacgtcattgtagccacgctcaactaccgtcttggggtgctcggttttctcagcaccggggaccaggctgcaaaaggcaactatgggctccctggaccagatccaggccctgcgctggctcagtgaaaacatcgcccactttgggggcgaccccgagcgtatcaccatctttggttccggggcaggggcctcctgcgtcaaccttctgatcctctcccaccattcagaagggctgttccagaaggccatcgcccagagtggcacc

SEQ ID NO: 124376 - DNA, 4975 bp, Homo sapiens
  misc_feature (1)...(4975): n = a,t,c or g
atgctgcctgtgtggttcaccgacaacttgggagcggccgccacctacgtgcagaaccagagcgaggactgcctgtacctcaacctctacgtgcccaccgaggacggtccgctcacaaaaaaacgtgacgaggcgacgctcaatccgccagacacagatatccgtgaccctgggaagaagcctgtgatgctgtttctccatggcggctcctacatggaggggaccggaaacatgttcgatggctcagtcctggctgcctatggcaacgtcattgtagccacgctcaactaccgtcttggggtgctcggccggtactcacagcctggcctgagctaccacatcgcctttgggcccgtggtggatggcgacgtggtccccgatgaccctgagatcctcatgcagcagggagaattcctcaactacgacatgctcatcggtgtcaaccagggagagggcctcaagttcgtggaggactctgcagagagcgaggacggtgtgtctgccagcgcctttgacttcactgtctccaactttgtggacaacctgtatggctacccggaaggcaaggatactgggccgaccgggacaatggcgaaatgcgccgcaaaacccctgctggcgctctttactgaccaccaatgggtggcaccagctgtggccactgccaagctgcacgccgactaccagtctcccgtctacttttacaccttctaccaccactgccaggcggagggccggcctgagtgggcagatgcggcgcacggggatgaactgccctatgtctttggcgtgcccatgaatgacgtcatgctcagtgccgtggtcatgacctactggaccaacttcgccaagactggggaccccaaccagccggtgccgcaggataaccaagttcatccacaccaagcccaatcgcttcgaggaggtggtgtggagcaaattcaacagcaaggagaagcagtatctgcacataggcctgaagccacgcgtgcgtgacaactaccgcgccaacaaggtggccttctggctggagctcgtgccccacctgcacaacctgcacacggagcttttcaccaccaccacgcgcctgcctccctacgccacgcgctggccgcctcgtcccccccgtggcgccccgggcacaacgccgcccccgccgcctgccaccctgcctcccgagcccgagcccgagcccccnccaagggcctatgaccgcttccccggggactcacgggactactccacggagctgagcgtcaccgtggccgtgggtgcctccctcctcttcctcaacatcctggcctttgctgccctctactacaagcgggaccggcggcaggagctgcggtgcaggcggcttagcccacctggcggctcaggctctggcgtgcctggccgaatagtgtatgatgcccgggacatgagacggcggcttcgggaactgacccgggaggtggaggccctgtccggctgctaccccctagcctctggatccagcactgccgaggagacaagcaagaattgggtgtaccgttccctaactgggagatgttgcaatcaataccaagaaagcccccacgatgccgaggacatcttactcctgctgctgggcctcatcgttcttgtcaacattggcatcaacgtggcaactatgatgtggcatggactccagaacgccttagacaagatgattgattgggctactcagaaaaatgaaattcaggccagtgaaagtcccccaagtggtcccccagacaaggctcaggatgtccacatccactgcatcctggaccctgtgcaggtgaagatgtcccgacccacgcagtactcctctttcgcctgccaccatttctccaaccatcacagtagcagtcttcttcgctgtgttcgtcgccgccgccgccgccaccgccgttgtcgccgtcgctgctgcaaccaccagcagcggccgcagaactacagacaaatcccccatagccactcagtcttccgtaacccacatcgcagccaaaagatgtcacaactacaccgagtgcctttctttgatcaggaggacccggattcctacctggaggaggaggacaacctgcccttcccgtatcccaaccggaatccagggggcaatgccaactaccaggtgtacgacagcctggagctgaagcggcagctctggaagcatctgaagagcttcttgcggattcttttccgtcattttttccccaaaggcttcctgctcaggcgcgttaaccaccttgactcctggataccagacacgaacgatgagaaggtttctgcgtgctgctgcgtgccccctaaatgtggacatgccggcgttcccagggagtctgcacggggactgtacaaggcggggatgatgggcgggggagaagcccctcaggccagagacatcttcccagttcccaaagatgagcaagttggacacggccatgacctctccactggccatgtggtctatgatgcccgcagggaaaagcagaatttcttccatatgtccagcccccagaaccctgagtattcaagaaaagacttggctaccctcttcaggccccaagagggtcaggacctggtgagttctggcatatctgagcaaacaaagcaatgcagtggggatagtgccaagcttcctgcaggatccatactgggctacctggagttgaggaatatggaatggaagaactcagatgatgccaaagataagttcccccagaccaagacttccccttactgcagcttccatccttgcagttctgagaagaacacagactcccaggctccattctaccccaaattccttgcctactcccgggatactgcatgtgccaagacttgctttcattctgcaaccactgcccagagctcagtgtgcacccttcctccaccgttcactctttccctgcctctcgttcctcccagatcctttgtccctcctcaacccaccaaccatcagaggccttccaccttaatacaaacccctactgttcttccaacctccaagtctcctcagtccatcctcacttcccaattccccatcccttccctgttcgccaccatttcccaacccctgatccaaccccaatgccctgaatgtcatgagagtctaggccttacccaagattctggccttcaaaggaccccaggcccttcaaaagactccagagttcccaggaatctggaccttgcccaaaacccagacctctacaagaacccaggccttacccaagatccaggcctccacgagaacccaggtcttgctccaaatcaaggcctacatgagttcccaggccttccccaagattcttatctctgccagaatccaagcccttctcaagactttggtcttcacaagaattcaggcattactcaagattcccacccccaaaagaacacaggtctgactcaagaagctggtatccttaggagcccatgtctcacccaatcccctggcctccacaagaaaacaccatttacccaaacttctgatcttcagaggagctcaggctttacacaagactctggaatctataggaatcttgaaccaaaccaagagactgtgatctacaaaaatcaagatctctcccaagcaactgaccaccaaaagaacctaggctcttctaaagattctggaggtcacaagaatacaggcaatgtccaagatccaggagtctgtagtaccgcaggccttactgaagattctggatcacagaagggtccgtatgttccccaagactctgaagtcaataagagctcaggagttatccaggaatcttttctccacaagagcccaggccttgtccaaacctctggcctcccaaagtgctcaggccttacccaaaactcaggagactacaagaatccaggacttatccaagattgtggtggccacaaagttaaaggccttactcaagattccaacctcccaagccttacccaagccactaaagttgaaagaagatttagccttccccaagatgttggagtttacaggagctcagaacatagccaagactctaatctccacaagtgcccaggaattaatcaagatcctggcccccataaagacccagcccttgtccaagactctggcctccccaagatttcaggccttacccaggaatctggcccctacaagagctcatgcctcatcccagatcccagcctctacaagaacccaagccctgccctaggttctgattttgtccagcttttgtccctgcttcagaccccaaagtccacactgtccctgatgaagtcatctgtgcctgagaaggctgctcagaaggagganncacagcggcacgtcctctgggctcgtgtccaactcaatgagaactcctgcccttccaaggcccaagtggtctccaatgacctgcagaccttctcagaggtacctgtattaattgagctgcagtcatcctcctggcgggcaggcagccagcacggggcgtaccgccctgtggatacagttccttcaagctaccagaactatcaactaagccacccagacaccatcatcccgaaaaccccagcccttctcccatggcagnctcccggcttcgccctcttcccctcgcctggccccgtggccttggggtctgctgcccccttcttgccactgccaggggtgccttctggcctcgaattcctggtgcagattgatcagattttgattcaccagaaggctgagcgagtggaaatgaccctgtctgcttcccactcccagatggaagtacaggctccaccaggcaccaccattggccacgtgctacagacctggcatcccttcctccccaagttctccatccaggatgccgatcgccagacagtcttgcgagtggtggggccctgctggacctgtggctgtggcacagacaccaactttgaggtatcaggaatactagaggctcttgggaccttcgtaaaccaagatgatgcttccatgaggcaggatagttaa

SEQ ID NO: 124377 - DNA, 2767 bp, Homo sapiens
atggatgttggtttttctcgtactactgttcagacactgtcaagaagccactgcaaaaacatcaaacaaaaaatttctcaatgggaaggaagggctaatggtatatctaatccagaaaagtggtgtccaaaggactttggagtgagatataactgtcaccaagagatccgtcttaagaaaaatcctatagctgagagaaagagcaaaaacttggatgtaaccagccgtgaaaatgtgggtctagatataaatgaaaataccaaaagccatgatcaaagtgagaatgaaaataagaaacatgaatatgacgatacacacttctttaaaaatgaatcagaatccaactgggtatgttctcgggtcaaagaaattgaaagctgtaaagaagatgtcttagatccagagacttcattacctccaggaaacttctatacctcacaaatactgtggaagaaaatagaagcacttcccccagataaactcttaaatttggctttagaacattgtgactcttcagaaaaagaactgaacttcagagttctggatagttcatacggaataaccaagagcttagaaaatatttactctgaacctgaggggcaagaatgtggaccttccataaatcctttgccaaaacctcgtaggacattcagatatttatccgaatctggtgttacgccgtataaagaaagaaactgtgacaaaaaatactgtgaaaataactcttgtgcacaatcttctttggcctcttctcaggaacctgaaccaaagaaatatggtggaaaaatcagaggaagatctaaaaggaaatcctttgaatttgaggatattcagcactttcgaaatcggaactcacagacgattcgtgaagaacttggaagaaattctgggtcagcactttattacacacagtctgaggacaatatctatgaagatatcatatatcccaccaaagaaaatccatatgaagatattccagtgcagcctttacctatgtggagatccccttcagcatggaagctaccacccgctaaaagtgcttttaaagcacccaagctccctccaaaacctcagttccttcaccggaagactatggaagtaaagaactcacaggcttatttgcggtcaaagcttacaaaagatacaactttgccggtcactttaacggaatggaagcttttccgagctggtgaagttgcaaacacgaaaaggaaaaatcttccaaggcttgtattgaaaatagatgacatatttgaatctaaaagagggaagaagaaggtaaagttacattcttacactggaaaggaattacctccgacaaaaggtgaaaccagtgggaacgaaagtgatgccgagtatctgccaaagaatcgccataaacgcttagcacaactgcaaccgtcttccaagaggaatcctcactaccagaccttggagcgggatcttattgaattacaggagcaagcagctgtttgaacatttttgtggtggtgtctctacaaggaagaaaccatcaggaataagctatattccccaggtcatacaacaattccctggcaaggatgatcatggctataagcagtccaaagacatggaagagagacttaaagttattccaaaattttgttttcctgattcaaaggactggatgccaacctcagaactcaagagtgaaacattctcctttgtcttgactggtgaagatggaagccggtggtttggttactgtaagaagctcttgccagtaggcaaaggaaagcgactccctgaggtatactgcatggttagtcgcctaggctgcttcaatcttttttcaaagattctggatgaagtagagaagagaagagaaatgtctccagcccttgtttacccattcatgcgaagtgtcatggaagctcctttcccagctcctggacgcaccatcacagttaagagttacctccctggggctggagatgagtccattgaactctgccgaccactagattcccgattggaacatgttgattttaaatgtctctttaagtgcctgagtgtgtgtcatctcatccgggtctgtgcctctctccttttggagcgtagggtaatctttgttgccaacagcctaagcaccctgtcaaaatgtggccatgctgtggtagctacactgtatccgttcacctggcagcatacctatatcccagtcctgccagcatctatgattgacatcgtgtgctcacctacaccattccttattggaatcctgtcttgctccttaccacagctccaggacctacccattgaagaggtgctgatagttgatctctgtgcagacaagttcttacaggaggtatctgatgaggatgaaattctaccaccaaaacttcaagctgccctgatgcagattttggaagaacgaaatgaaatcttgactcaggagcagaatttttcacaagcagatgtgacactcaactctctggtgtccgaagcatttgtcaggttttttgtggagttggtaggacattattctttgaacatgactgtcactgagcgtggggagcgtgttttccaaagggaaccattccgtaagtcccacacctcccgaagtgtacgccacttcctggatctcttcatggaaactcagatgtttgcaggattcatccaggaccgagagcttcggaaaagtggagttaaaggtttgtttgagatccgggccatccagtatttggaaacaattcctgagtcggagcccagtgggatgaatagaattttgcggagtcttggttag

SEQ ID NO: 124378 - DNA, 697 bp, Homo sapiens
tcgctggcttatcccaaaggtcatgaggatttatgatacccagaagaaaatggacagagaggcctcccaggctgctctgcagaaaatgttaacgctgctgatgttgcctcctacatttggtgacctgctgagggaggagtacattggggacaatggggatccccagaccctccaagcgcagttccaggagatgatggcggactccatgtttgtgatccctgcactccaagtagcacattttcagtgttcccgggcccctgtgtacttctacgagttccagcatcagcccagctggctcaagaacatcaggccaccgcacatgaaggcagaccatgttaaattcactgaggaagaggagcagctaagcaggaagatgatgaagtactgggccaactttgcgagaaatgggaaccccaatggcgagggtctgccacactggccgctgttcgaccaggaggagcaatacctgcagctgaacctacagcctgcggtgggccgggctctgaaggcccacaggctccagttatggaacgaaggcgctgccccaaaagatccaggagctcgaggagcctgaagagagacacacagagctgtagctccctgtgccggggaggagggggtgggttcgctgacaggcgagggtcagcctgctgtgcccacacacacccactaaggagaaagaagttgattccttcaa

SEQ ID NO: 124379 - DNA, 2202 bp, Homo sapiens
  misc_feature (1)...(2202): n = a,t,c or g
cccggggcagcctctgggtgaacagcagcgtgtccgccggcagcgaaccgagaccagcgagccgaccatgcggctgcacagacttcgtgcgcggctgagcgcggtggcctgtgggcttctgctgcttcttgtccggggccagggccaggactcagccagtcccatccggaccacacacacggggcaggtgctggggagtcttgtccatgtgaagggcgccaatgccggggtccaaaccttcctgggaattccatttgccaagccacctctaggtccgctgcgatttgcaccccctgagccccctgaatcttggagtggtgtgagggatggaaccacccatccggccatgtgtctacaggacctcaccgcagtggagtcagagtttcttagccagttcaacatgaccttcccttccgactccatgtctgaggactgcctgtacctcagcatctacacgccggcccatagccatgaaggctctaacctgccggtgatggtatggatccacggtggtgcgcttgtttttggcatggcttccttgtatgatggttccatgctggctgccttggagaacgtggtggtggtcatcatccagtaccgcctgggtgtcctgggcttcttcagcactggagacaagcacgcaaccggcaactggggctacctggaccaagtggctgcactacgctgggtccagcagaatatcgcccactttggaggcaaccctgaccgtgtcaccatttttggcgagtctgcgggtggcacgagtgtgtcttcgcttgttgtgtcccccatatcccaaggactcttccacggagccatcatggagagtggcgtggccctcctgcccggcctcattgccagctcagctgatgtcatctccacggtggtggccaacctgtctgcctgtgaccaagttgactctgaggccctggtgggctgcctgcggggcaagagtaaagaggagattcttgcaattaacaagcctttcaagatgatccccggagtggtggatggggtcttcctgcccaggcacccccaggagctgctggcctctgccgactttcagcctgtccctagcattgttggtgtcaacaacaatgaattcggctggctcatccccaaggtcatgaggatctatgatacccagaaggaaatggacagagaggcctcccaggctgctctgcagaaaatgttaacgctgctgatgttgcctcctacatttggtgacctgctgagggaggagtacattggggacaatggggatccccaagacccttccaaagcgaaagttcccagaagatgatggcggactcccatgtttgtgatccctgcactccaagtagcacattttcaagtgttccccgggcccctgtgtaccttcctacgagttcccagcattcagcccagctggctcaagaacatcaggccaccgcacatgaaggcagaccatggtgatgagcttccttttgttttcagaagtttctttcgggggcaactacattaaattcactgaggaagaggagcagctaagcaggaagatgatgaagtactgggccaactttgcgagaaaatgggaaccccaatggcgagggtctgcccacactggccgcctgttcgaccaggaggagcaatacctgcagctgaacctacagcttgcggtgggcccgggctctgaaggcccacaggctnccagttctggaagaaggcgctgccccaaaagatccagggagctcgaggagcctgaagagagacacacagagctgtagctccctgtgccggggaggagggggtgggttcgctgacaggcgaagggtcagactgctgtgcccacacaacacccactaaggaggaaagaagttgattccttcattcacttcgccattcattcatacttccgtccagaagttgattccttcattcacttcgccattcattcatacttccgtccatccattcagaaaccggratttattaagaatttactcaggcatgatggcccatacttgtaatcccagctattgggaaggatgagatgggaggatggcttgaggccagaggtttgagaccgaccagccagggcaacacagtgagaccccttctcaaaaaaaaaaaaaaaaaaagagagagtgtgtgattagaagctaaataggaaagttttgagcttcaagtcagtgaggagtaaaaaagatttttaaaaagcaa

SEQ ID NO: 124380 - DNA, 435 bp, Homo sapiens
catcttggcggagtttggatccctgcacttggaattcttacacctcactgaactctctggcaaccaggtcttcgctgaaaaggtcaggaacatccgcaaggtcctcaggaagatcgaaaagccctttggcctctaccccaacttcctcagcccagtgagtgggaactgggtgcaacaccatgtctcagttggaggactcggggacagtttttatgaatatttgatcaaatcctggttgatgtcgggcaagacagatatggaggctaaaaatatgtactacgaagccttggagacaccaaacttgggcctgaggccttctggtttaactccggcagagaggccgtggccacccagctgagcgagagctactacatcctccggccagaggtggtggagagctacatgtacctgtggcgacagacccacaacacgaaa

SEQ ID NO: 124381 - DNA, 584 bp, Homo sapiens
tacccattccaggttcggtggctgctggcgagatgcccgcttcctacccgtacaggcaccgggcccctgaggtcaggcgggtgtgcgaggccctgccccaccatgtctcagttggaggactcggggacagtttttatgaatatttgatcaaatcctggttgatgtcgggcaagacagatatggaggctaaaaatatgtactacgaagccttggaggtatttattcgcgataagctcatggagcggcgtaaccgtcgcacaggaaggacagagaaagcgcggatctgggaagtgacggacagaacggtcaggacctggattggggaggcggttgccgccgctgctgctgacggtgtgacgttctctgttccggtcacaccacatacgttccgccattcctatgcgatgcacatgctgtatgccggtataccgctgaaagttctgcaaagcctgatgggacataagtccatcagttcaacggaagtctacacgaaggtttttgcgctggatgtggctgcccggcaccgggtgcagtttgcgatgccggagtctgatgcggttgcgatgctgaaacaattatcctga

SEQ ID NO: 124382 - DNA, 1302 bp, Homo sapiens
atgcatctgaaccagctgcctcccatcctcagcaggctgggtgcagtcggcttcttcggaagcatgaaggctcacctggtgtccgtctctcggcaggtcaggaacatccgcaaggtcctcaggaagatcgaaaagccctttggcctctaccccaacttcctcagcccagtgagtgggaactgggtgcaactacccattccaggttcggtggctgctggcgagatgcccgcttcctacccgtacaggcaccgggcccctgaggtcaggcgggtgtgcgaggccctgccccaccatgtctcagttggaggactcggggacagtttttatgaatatttgatcaaatcctggttgatgtcgggcaagacagatatggaggctaaaaatatgtactacgaagccttggaggcgatagagacctacttgctgaatgtctctcccggggggctgacctacattgccgagtggcgaggggggattctggaccacaagatggggcacctggcctgtttctccgggggcatgatcgcccttggcgccgaggatgccaaggaagaaaagagggcccactaccgagagctcgcagtccagatcaccaagacgtgttacgagtcatacgcccgcttcagacaccaaacttgggcctgaggccttctggtttaactccggcagagaggccgtggccacccagctgagcgaagagttacttacatcctccggccagaggtggtggagagctacatgtacctgtgggcgacagacccacaaccccatcttacaggggagtggggctgggaggtggtgctggccttggagaaatactgtcggacagaagccggtttttctggggattccaagacgtgttacagtaggcacccccaaccacggacaacaagcaggcagagcttctttctagcggagacactaaacagatgcttggtgagtgcctgcaacggaccagacactgggctagaggccagggacaccgctgagagtgagacagtcataagccctgcagtcaaggggtcaagaggggagaaagcgatggtaagggaaactgacaaaccagccaaatgcattgggaagaaaagcaaaaatggaaaatctgatttaaaggcagcatccaagatggatgctcagttccgttccctctgctttgaggaggtgaccccactgtggtttgagaaagtgctagagatgaatgggccagcttcccccagcgtttcccctgggggcctgtccttggaagtatggtcattggtcatgtggcacaaagatgctcggccctctgtgactaatgcttaa

SEQ ID NO: 124383 - DNA, 502 bp, Homo sapiens
cagccctttagagcgcctggcacagggcttcctagcagattgttgacatttctggctccactgcccaatatcaggcccaagatcgggtgggcaggttccacgtcctctctgtccttgggttgcagcgcccagcaggaggcagcaatggagaactgggtgcaggagggacaggcccacccaggctcatgcctggacttggccttggctgccctccagctcccctacccgacacccgtcaacccggtctagattccattccagagaatgagcattcagctgttctcccaacccaccctccagcccgcatcgctgcctgcccccagggaagggaacccacagggaatggggatctcccctcacatgtgtattcagcagccctatggccttggctctgggcctgatgggacaggggtagagggaaggtgagcatagcacattttcctagagcgagaattgggggaaagctgttatttttatattaaaatacattcagatgtaaaaa

SEQ ID NO: 124384 - DNA, 482 bp, Homo sapiens
ggcctggcttgtaagtggcccggtgggtgtcggagctgctctggactcagcctcacagtggacactgctccattcagattctttaaacactggcaagggggcgatggccacaatcctattgtacagataaggaagtcaaggccacttggggacagctgctctccagcctccactcagggtgcctaagtggtgagctggacctagggcagtgcccgagcctccccacagggtcctggaaagccactggttcgtgtggatcacacagatgaaccacatccccaaggagatcggccacgagaagcaccgggactgggtcagctctcagctggcagccacctgcaacgtggagccctcacttttcaccaactgggtcagcgggcacctcaacttccagatcgagcaccacctcttccccaggatgccgagacacaactacagccgggtggccccgctggtcaagtcgctgtgtgccaagacggcct

SEQ ID NO: 124385 - DNA, 495 bp, Homo sapiens
agacccctagtccagtgtggcggaattcgtgagggtgtcttcccaggaggagttgctgggccgactctgccaggcatctgtgtccctggcagggtcttccccaacacaccctgcatgacaccttcgtcactaaaatcagcctcgtgagctggcagggcaaggaccctgttcctttactcagctgagaaaaccagagagggtggtggcctgtcctgggctctgaggcaaatcaggcagaagggttggatgcctgaggtcctcctcccacccaccaggcctccagacctccgggcacctggagacctctcggtatcgcctctgccctcctctgcaggatttgctctgggccgccagcttctatgcccgcttcttcttatcctacctccccttctacggcgtccctggggtgctgctcttctttgttgctgtcaggtatggcagggagtggcgaggtcacacacaggcgacaggtgacccccactgcagccccccacc

SEQ ID NO: 124386 - DNA, 1810 bp, Homo sapiens
agcggccgcggcggcagggcggggccggagcagcgggcggcggcggaggcggcgcccgggagcgctcttcgcttccctcggggtcttgctcggacctcggccaccgcctgggaatccccaggactcgtgcgtgcagcatgggcggcgtcggggagccgggaccgcggaagggacccgcgcagccgggggcaccgctgcccaccttctgctgggagcagatccgcgcgcacgaccagcccggcgacaagtggctggtcatcgagcgccgcgtctacgacatcagccgctgggcacagcggcacccagggggcagccgcctcatcggccaccacggcgctgaggacgccacggatgccttccgtgccttccatcaggatctccaattttgtgcgcaagttcctacagcccctgttgattggagagctggctccggaagaacccagccaggatggacccctgaatgcgcagctggtcgaggacttccgagccctgcaccaggcagccgaggacatgaagctgtttgatgccagtcccaccttctttgctttcctactgggccacatcctggccatggaggtgctggcctggctccttatctacctcctggggtcctgggtgggtgcccagtgccctgggccgcctttcatcctgggccatcttttcaaggcttcagtcctggtgtctgcagcatgacctgggccatgcctccatcttcaagaagtcctggtggaaccacgtggcccagaagttcgtgatggggcagctaaagggcttctccgcccactggtggaacttccgccacttccagcaccacgccaagcccaacatcttccacaaagacccagacgtgacggtggcgcccgtcttcctcctgggggagtcatccgtcgagaatctagagttgcctttgacccttggccccagccagccccgtgaccttgcccgggagaaggaggtggcctggagagctgctgtctccagccgccgcctgtctccacagtatggcaagaagaaacgcagatacctaccctacaaccagcagcacctgtacttcttcctgatcggcccgccgctgctcaccctggtgaactttgaagtggaaaatctggcgtacatgctggtgtgcatgcagtgggcggatttgctctgggccgccagcttctatgcccgcttcttcttatcctacctccccttctacggcgtccctggggtgctgctcttctttgttgctgtcagggtcctggaaagccactggttcgtgtggatcacacagatgaaccacatccccaaggagatcggccacgagaagcaccgggactgggtcagctctcagctggcagccacctgcaacgtggagccctcacttttcaccaactggttcagcgggcacctcaacttccagatcgagcaccagatgccgagacacaactacagccgggtggccccgctggtcaagtcgctgtgtgccaagcacggcctcagctacgaagtgaagcccttcctcaccgcgctggtggacatcgtcagccttcacgcacacagtgagaatttctggagcacctactgcagactcacaaacagcagtgcctgcgtgccacgcgggcgccctgagccagcgcaggctccgaatggcattccctccgtccacaccctggtagagatcgctgtgcgctggctccgaggcgctcgccagggagatgctaacaccgaggatccacgacagctgagcctgcagcgccacccaggggcgcccggagcatctgcgccagtgtggggcgggccgtgctccctactgtccctggtctcctag

SEQ ID NO: 124387 - DNA, 1663 bp, Homo sapiens
atgggcggcgtcggggagccgggaccgcgggagggacccgcgcagccgggggcaccgctgcccaccttctgctgggagcagatccgcgcgcacgaccagcccggcgacaagtggctggtcatcgagcgccgcgtctacgacatcagccgctgggcacagcggcacccagggggcagccgcctcatcggccaccacggcgctgaggacgccacggatgccttccgtgccttccatcaagatctcaattttgtgcgcaagttcctacagcccctgttgattggagagctggctccggaagaacccagccaggatggacccctgaatgcgcagctggtcgaggacttccgagccctgcaccaggcagccgaggacatgaagctgtttgatgccagtcccaccttctttgctttcctactgggccacatcctggccatggaggtgctggcctggctccttatctacctccctgggtccctggctgggtgcccagtgccctggccgccttcatcctggccatctctcaggctcagtcctggtgtctgcagcatgacctgggccatgcctccatcttcaagaagtcctggtggaaccacgtggcccagaagttcgtgatggggcagctaaagggcttctccgcccactggtggaacttccgccactttccagcaccacgccaagcccaacatcttccacaaagacccagacgtgacggtggcgcccgtcttcctcctgggggagtcatccgtcgagtatggcaagaagaaacgcagatacctaccctacaaccagcagcacctgtacttcttcctgatcggcccgccgctgctcaccctggtgaactttgaagtggaaaatctggcgtacatgctggtgtgcatgcagtgggcggatttgctctgggccgccagcttctatgcccgctttctttctttatcctacctccccttctacggcgtccctggggtgctgctcttctttgttgctgtcagggtcctgggaaagtccactggttcgtgtggatcacacagatgaaccacatccccaaggagatcggccacgagaagcaccgggactgggtcagctctcagctggcagccacctgcaacgtggagccctcacgttttcaccaactggttcagcgggcacctcaacttccagatcgagcaccacctcttccccaggatgccgagacacaacctacagcccggttgccccgcttgttcaagtcgctgtgtgccaaagcacggcctcagctacgaaagtgaagcccttccttcaccgcgctggtggacatcgtcaggtccctgaagaaagtctggtgacatcgtgctggacgcctacctccatcagtgaaggcaacacccaggcgggcagagaagggctcagggcaccagcaaccaagccgagcccccggcgggatcgaataccccccacccctccactgaccagcctgggggtgccctgcctgccctcctggtactgttgtcttcccctcggccccctcacatgtgtattcagcagccctatggccttggctctgggcctgatgggacaggggtagagggaaggtgagcatagacacattttcctagagcgagaattgggggaaagctgttatttttatattaaaatacattcagatgtaaaaaaaaaaaaaaaaaaa

SEQ ID NO: 124388 - DNA, 399 bp, Homo sapiens
ggactacagcgtgtgggaccacattgaggtgtctgatgatgaagacgagacgcaccccaacatcgacacggccagtctcttccgctggcggcatcaggcccgggtggaacgcatggagcagttccagataggaggagaaggaggagagactcacggagctcagagagagaagaaagtcaaagcagaaacaaagacaaatacagaaaccaagagagtaagagctcacacagaaaagaaaattctgagagtgagaaaagaatgtactctaaaagtcgtgatcataatagctcaaataacagcagggaaaaaaaggctgatagagatcaaagtcccttctcaaaaataaaacaaagcagtcaggacaatgaattaaagtcctccatgttgaaaaataaggag

SEQ ID NO: 124389 - DNA, 2460 bp, Homo sapiens
tttctgaaggtgtgcccccaaaacaatgcggagaccttcggttgtcttggtacagggtgaaaagggggaccgggggaatcaaactcagaaacccattacattataagagttggtctctttttcacagaagttgtccaagggatttttatggttccaaggtgggtgacttccaaggtaaggaaaatggacgaggaaggggaatctaatctatggaggattttttgaagacgaaggagtttcgcttgttaaagaccaccaaagaatttctcttgtcaatggccaacagagggaaggatacaaatggttcacagttcttcataacaacggaaaccaactcctcatttagatgggcatcatgttgtttttggacaagtaatcctctggtcaagaagttgtaagagagattgaaaaccagaaaacagatgcagctagcaaaccgtttgcggaggtacggatactcagttgttggagagctgattcccaaatctaaagttaagaaagaagaaaagaaaaggcataaatcatcatcatcttcctcctcctcatctagtgactcagatagctcaaggtattcctcagtcctcttctgattcctctgattccgaaagtgctactgaagagaaatcaaagaaaagaaaaaagaaacatcggaaaaattcccgaaaacacaagaaagaaaagaaaaagcgaaagaaaagcaagaagagtgcatctagtgagagtgaagctgaaaatccttggaagcacaacccccagttttactgttccgtccagaagagattccccttcctatacctgaaaatagatttctaatgaggaaaaagtcctcctaaagctgatgagaaggaaaggaaaaacagagagagagaaagggaaagagagtgtaatccacctaactcccagcctgcttcataccagagacgacttttagttactagatctggcaggaaatttaaagggaagaggaccaaggcgttatcgaactccttccagatccagatcaagggatcttttcagacgtagtggagactccctccacattggaggcaagagatgcagagagcctcaaagaatgagggtatcaagtggtgaaagaatggatcaagggggataagagtgagttgaatgaaataaaagaaaatcagagaagtccagttagagtaaaagagagaaaaataacagatcacaggaatgtatctgagagtccaaacagaaaaaatgaaaaggagaagaaagttaaagaccataaatctaacagcaaagagagagacatcagaagaaattcagaaaaagaagacaagtataaaaacaaagtgaagaaaagggccaaatctaaaagtaggagtaagagcaaagagaaatcaaagagtaaagaaagagattccaaaacataatatgaaatgaagaaaagaggatgaggttcaaggagttaaagggaagggatcatgaaaatgttaaagaaaaagaaaagcagtctgattctaaaggaaaagatcaggaaaggagtagaagtaaagagaagtctaaacagttagaatcaaagagtaatgagcatgatcacagtaaaagtaaggaaaaggatagacgcgcacaatccaggagtagagaatgtgatataactaaaggtaaacacagttataatagcagaacaagagaaccgaagcagacgtagggacagcagcagtagagtgcgatcaagaccccatgacagagatcgcagcatgagcaaggcagtaccatagatacagagaccaggtatacagcagaagagtacggtcacgaagccgagagagaagaacaccaccaggaagatcaagaagtagagataggaggagaaggaggagagactcacggagctcagagagagaagacagtcaaagcagaaacaaagacaaatacagaaaccaagagagtaagagctcacacagaaaagagaattctgagagtgagaaaagaatgtactctaaaagtcgtgatcataatagctcaaataacagcagggaaaaaaaggctgatagagatcaaagtcccttctcaaaaataaaacaaagcagtcaggacgatgaattaaagtcctccatgttgaaaaataaggaggatgagaagatcagatcctcagtggaaaaagaaaaccaaaaatcaaaaggtcaagaaaatgtccatgtacatgaaaaaaataaaaaatttgatcatgaatcaagccctggaacagatgaagacaaaagcggatgagtgagttatataaacttacttccattctgtttcggattttaagtttgagagacttgctaatgaatctcctttatgttgttttccttttcattgtttttggattgttttatgtttgtccttttttttcttaatgtggatttcattgagttgattttttgataatctgcaatctggataatttgtactgctaaagttttaataaactcgacaagagaaaaaaaaaaaaaa

SEQ ID NO: 124390 - DNA, 3580 bp, Homo sapiens
tcgagggtgcgatggcgcggacgcgggaccgcgtacgcctgctgcttctcctgatctgctttaacgttggaagtggacttcacttacaggtcttaagcacaagaaatgaaaataagctgcttcctaaacatcctcatttagtgcggcaaaagcgcgcctggatcaccgcccccgtggctcttcgggagggagaggatctgtccaagaagaatccaattgccaagatacattctgatcttgcagaagaaagaggactcaaaattacttacaaatacactggaaaagggattacagagccaccttttggtatatttgtctttaacaaagatactggagaactgaatgttaccagcattcttgatcgagaagaaacaccattttttctgctaacaggttacgctttggatgcaagaggaaacaatgtagagaaacccttagagctacgcattaaggttcttgatatcaatgacaacgaaccagtgttcacacaggatgtctttgttgggtctgttgaagagttgagtgcagcacatactcttgtgatgaaaatcaatgcaacagatgcagatgagcccaataccctgaattcgaaaatttcctatagaatcgtatctctggagcctgcttatcctccagtgttctacctaaataaagatacaggagagatttatacaaccagtgttaccttggacagagaggaacacagcagctacactttgacagtagaagcaagagatggcaatggagaagttacagacaaacctgtaaaacaagctcaagttcagattcgtattttggatgtcaatgacaatatacctgtagtagaaaataaagtgcttgaagggatggttgaagaaaatcaagtcaatgtagaagttacgcgcataaaagtgttcgatgcagatgaaataggttctgataattggctggcaaattttacatttgcatcaggaaatgaaggaggttatttccacatagaaacagatgctcaaactaacgaaggaattgtgacccttattaaggaagtagattatgaagaaatgaagaatcttgacttcagtgttattgtcgctaataaagcagcttttcacaagtcgattaggagtaaatacaagcctacacccattcccatcaaggtcaaagtgaaaaatgtgaaagaaggcattcattttaaaagcagcgtcatctcaatttatgttagcgagagcatggatagatcaagcaaaggccaaataattggaaattttcaagcttttgatgaggacactggactaccagcccatgcaagatatgtaaaattagaagatagagataattggatctctgtggattctgtcacatctgaaattaaacttgcaaaacttcctgattttgaatctagatatgttcaaaatggcacatacactgtaaagattgtggccatatcagaagattatcctagaaaaaccatcactggcacagtccttatcaatgttgaagacatcaacgacaactgtcccacactgatagagcctgtgcagacaatctgtcacgatgcagagtatgtgaatgttactgcagaggacctggatggacacccaaacagtggccctttcagtttctccgtcattgacaaaccacctggcatggcagaaaaatggaaaatagcacgccaagaaagtaccagtgtgctgctgcaacaaagtgagaaaaagcttgggagaagtgaaattcagttcctgatttcagacaatcagggttttagttgtcctgaaaagcaggtccttacactcacagtttgtgaggttctgcatggcagcggctgcagggaagcacagcatgactcctatgtgggcctgggacccgcagcaattgcgctcatgattttggcctttctgctcctgctattggtaccacttttactgctgatgtgccattgcggaaagggcgccaaagcgtttacccccatacctggcaccatagagatgctgcatccttggaataatgaaggagcaccacctgaagacaaggtggtgccatcatttctgccagtggatcaagggggcagtctagtaggaagaaatggagtaggaggtatggccaaggaagccacgatgaaaggaagtagctctgcttccattgtcaaagggcaacatgagatgtccgagatggatggaaggtgggaagaacacagaagcctgctttctggtagagctacccagtttacaggggccacaggcgctatcatgaccactgaaaccacgaagaccgcaagggccacaggggcttccagagacatggccggagctcaggcagctgctgttgcactgaacgaagaattcttaagaaattatttcactgataaagcggcctcttacactgaggaagatgaaaatcacacagccaaagattgccttctggtttattctcaggaagaaactgaatcgctgaatgcttctattggttgttgcagttttattgaaggagagctagatgaccgcttcttagatgatttgggacttaaattcaagacgctagctgaagtttgcctgggtcaaaaaatagatataaataaggaaattgagcagagacaaaaacctgccacagaaacaagtatgaacacagcttcacattcactctgtgagcaaactatggttaattcagagaatacctactcctctggcagtagcttcccagttccaaaatctttgcaagaagccaatgcagagaaagtaactcaggaaatagtcactgaaagatctgtgtcttctaggcaggcgcaaaaggtagctacacctcttcctgacccaatggcttctagaaatgtgatagcaacagaaacttcctatgtcacagggtccactatgccaccaaccactgtgatcctgggtcctagccagccacagagccttattgtgacagagagggtgtatgctccagcttctaccttggtagatcagccttatgctaatgaaggtacagttgtggtcactgaaagagtaatacagcctcatgggggtggatcgaatcctctggaaggcactcagcatcttcaagatgtaccttacgtcatggtgagggaaagagagagcttccttgcccccagctcaggtgtgcagcctactctggccatgcctaatatagcagtaggacagaatgtgacagtgacagaaagagttctagcacctgcttccactctgcaatccagttaccagattcccactgaaaattctatgacggctaggaacaccacggtgtctggagctggagtccctggccctctgccagattttggtttagaggaatctggtcattctaattctaccataaccacatcttccaccagagtcaccaagcatagcactgtacagcattcttactcctaaacagcagtcagccacaaactgacccagagtttaattagcagtgactaatttcatgtttccaatgtacctgatttttcatgagccttacagacacacagagacacatacacattgatcttaaaatttttctcagtcactgatatgcaaaggaccacactgtctctgcttccaggagtattttagaaatgttccacaatttactgaagacatagaga

SEQ ID NO: 124391 - DNA, 2432 bp, Homo sapiens
agggctgcctgcaagagttatctgtgctgtttgcacgaggtgagcccagaggaccatgccacaacctgcttcactatatgttggccttgattggtgttcctgaagtcttttgggcatttctcttccactgctcccttggtttagaggaggaaaaactggctcctttgattaaaggagaagaaaaaattgtttggctgaggagctccttttacttccaacactgtttggtggataaatctaccctcctaccctccagctctgtcagtcttggcatcttccatgaagaaaaaaactccggggaatttcctatctttgccaaagctgtgcgtctagcccttgtgcctcttagatatgtaaaattagaagatagagataattggatctctgtggattctgtcacatctgaaattaaacttgcaaaacttcctgattttgaatctagatatgttcaaaatggcacatacactgtaaagattgtggccatatcagaagattatcctagaaaaaccatcactggcacagtccttatcaatgttgaagacatcaacgacaactgtcccacactgatagagcctgtgcagacaatctgtcacgatgcagagtatgtgaatgttactgcagaggacctggatggacacccaaacagtggccctttcagtttctccgtcattgacaaaccacctggcatggcagaaaaatggaaaatagcacgccaagaaagtaccagtgtgctgctgcaacaaagtgagaaaaagcttgggagaagtgaaattcagttcctgatttcagacaatcagggttttagttgtcctgaaaagcaggtccttacactcacagtttgtgagtgtctgcatggcagccggctgcagggaagcacagcatgactcctatgtgggcctgggacccgcagcaattgcgctcatgattttggcctttctgctcctgctattggtaccacttttactgctgatgtgccattgcggaaagggcgccaaaggctttacccccatacctggcaccatagagatgctgcatccttggaataatgaaggagcaccacctgaagacaaggtggtgccatcatttctgccaagtggatcaagggggcagtctagtaggaagaaatggagtaggaggtatggccaaggaagccacgatgaaaaggaaagttagctctgcttccattgtcaaagggcaacatgagatgtccgagatggatggaaggtgggaagaacacagaagcctgctttctggtagagctacccagtttacaggggccacaggcgctattcatgaccactgaaaccacgattaccgcaagggccacaggggcttccagagacgtggccggagctcaggcagctgctgttgcactgaacgaagaattcttaaaaaattatttcactgataaagcggcctcttacactgaggaagatgaaaatcacacagccaaagattgccttctggtttattctcaggaagaaactgaatcgctgaatgcttctattggttgttgcagctttattgaaggagagctagatgaccgcttcttagatgatttgggacttaaattcaagacactagctgaagtttgcctgggtcaaaaaatagatataaataaggaaattgagcagagacaaaaacctgccacagaaacaagtatgaacacagcttcacattcactctgtgagcaaactatggttaattcagagaatacctactcctctggcagtagcttcccagttccaaaatctttgcaagaagccaatgcagagaaagtaactcaggaaatagtcactgaaagatctgtgtcttctaggcaggcgcaaaaggtagctacacctcttcctgacccaatggcttctagaaatgtgatagcaacagaaacttcctatgtcacagggtccactatgccaccaaccactgtgatcctgggtcctagccagccacagagccttattgtgacagagagggtgtatgctccagcttctaccttggtagatcagccttatgctaatgaaggtacagttgtggtcactgaaagagtaatacagcctcatgggggtggatcgaatcctttggaaggcactcagcatcttcaagatgtaccttacgtcatggagagggaaagagagagctttcttgcccccagctcaagtgtgcagcctactctggccatgcctaatatagcagtaggacagaatgtgacagtgacagaaagagttctagcacctgcttccactctgcaatccagttaccagattcccactgaaaattctatgacggctaggaacaccacggtgtctggagctggagtccctggccctctgccagattttggtttagaggaatctggtcattctaattctaccataaccacatcttccaccagagttaccaagcatagcactgtacagcattcttactcctaa

SEQ ID NO: 124392 - DNA, 357 bp, Homo sapiens
atgacgaccgcgtcttacctcgcaggatatcaagaaaccagactgtgcggggaggatgcgattgggagaggttttgaatgcgatggattacatttggaaaaaattgtgcattttgcattacatttggaaaaaaatgtgaatcagtcactactggaactgcacaaactggccactgacaaaaatgacccccatttgtgtgacttcattgagacacattacctgaatgaacaagtgaaggccatcaaagaattgggtgaccacgtgaccaacatgcacgagatgggagcgcccgattctggcgtggcagaatacctctttgacaagcacaccctgggagacagtgataatgaaagctaa

SEQ ID NO: 124393 - DNA, 2024 bp, Homo sapiens
ggcgaggccctcatgtaccacacgcacttctcagaacttctggatgagttttcccagaacgtcttgggtcagctcctgaatgatcctttcctctcagagaagagtgtgtcaatggaggtggaaccttccccgacgtccccggcgcctctcatccaggctgagcacagctactccctgtgcgaggagcctcgggcccagtcgcccttcacccacattaccaccagtgacagcttcaatgacgatgaggtggaaagtgagaaatggtacctgtctacagacttcccttcaacatccatcaagacagagccaattacagacgaaccacccccaggactcgttccgtctgtcactctgaccatcacagccatctccaccccgttggaaaaggaggaacctcctctggaaattgaacaatgggggttgattcctcgtgccagaccattattccctaaaattaagctggagcctcatgaagtggatcagtttctaaacttctctccctaaagaagccaagcacctgcatattttcccttcctgggctgcctgcacctgtggcagtagtgggaatagcgcgattaggattattttagcatattctttagctttaagagtgcccacagagactaaaaagcccagggacctctttggcaagactggcagagaaaaagggaaagaggaaacatctagagaaaagctgtatgtggcagaaagagaaagaaaggccccagtggaccacctgcatttgccgcccacccctccgagcagtcacggcagtgactcagagggcagcctgagtcccaacccacgcctgcaccccttcagcctgcctcagacccacagcccctccagagctgcaccccgggccccctccgccctctccagctcccctctcctcacggctcctcataaactgcagggatcaggccctctggtcctgacagaggaggagaagaggaccctgatcgctgagggctatcccatccccaccaaattgcccctgtcaaaatcagaggagaaggccctgaagaaaattcggaggaagatcaagaataagatttctgctcaggaaagtaggagaaagaagaaagaatacatggacagcctggagaaaaaagtggagtcttgttcaactgagaacttggagcttcggaagaaggtagaggttctagagaacactaatagagccagccatggggagctggtgattggggtgctgggcaagggaagacgttgggaccctttactcacatcaccccatgcaggtgaccagtgtttgggcagtgtgcagggctgggctggggaatgcacacctaggcagctggatggaagtagaacaactttgataagtgaagaggatcctgggtcaccagaaatggggggtggagaggccttgggggccattgtttcatatgcatggcgtggcagggaagcccttcatgcaagtagggtgggggctgtcatccaagctcccattgctgcaggcagtgacatctgtctcagtgacatcagagaaagtgccacatcatctcaaaccaacatatcagttacgaggactctccttcagcaactccagaagcttcagactttggtgatgggcaaggtttctcgaacctgcaagttagctggcacgcagactggcacctgcctcatggttgtggtgctgtgctttgccgttgcattcggcagcttctttcaaggctacgggccctatccttctgccaccaagatggctctgcccagccagcattccctgcaggagccctacacagcctccgtggtgagatccagaaacctgctgatctacgaggaacattctcccccagaggagtcatccagcccgggctcggctggggagctggggggctgggatagaggttcctccctgctcagggtgtcagggctggagtccaggccggatgtggatcttccccatttcattatctcgaatgagaccagcctggagaagtcagtgcttttggagctgcagcagcacctggtcagcgccaaactggaggggaatgaaa

SEQ ID NO: 124394 - DNA, 492 bp, Homo sapiens
atgttaactataaaacagcctcaggcaggtttttcaggaggtatttcagaagaaggtactgttatcatagaagatgacagctctatgcatattattgcccctgaagacctttcagtagggcaagaggtggaggtagaagacagtgatgttgatgatcttgaccccatacccaggttttataccatgtattttgaagaacctgattcctctggacatgcaggtggaccagtcagtgccagagtaattaaagccttacaggtagtagatcatgcttttgggatgttgatggaaggcctgaagcagcggaatttgcacaactgtgtcaatatcatccttctggctgaccatgaaattaccacagccaccccagccttcagcaaccaccattttgatcagtcagcagccatcaacattgaagcaaggccctctacgatcaaaaaagatgacaactcactgaacgctcagaggatcattggcattttaagcaattaa

SEQ ID NO: 124395 - DNA, 3119 bp, Homo sapiens
atggaatctacgttgactttagcaacggaacaacctgttaagaagaacactcttaagaaatataaaatagcttgcattgttcttcttgctttgctggtgatcatgtcacttggattaggcctggggcttggactcaggaaactggaaaagcaaggcagctgcaggaagaagtgctttgatgcatcatttagaggactggagaactgccggtgtgatgtggcatgtaaagaccgaggtgattgctgctgggattttgaagacacctgtgtggaatcaactcgaatatggatgtgcaataaatttcgttgtggagagaccagattagaggccagcctttgctcttgttcagatgactgtttgcagaagaaagattgctgtgctgactataagagtgtttgccaaggagaaacctcatggctggaagaaaactgtgacacagcccagcagtctcagtgcccagaagggtttgacctgccaccagttatcttgttttctatggatggatttagagctgaatatttatacacatgggatactttaatgccaaatatcaataaactgaaaacatgtggaattcattcaaaatacatgagagctatgtatcctaccaaaaccttcccaaatcattacaccattgtcacgggcttgtatccagagtcacatggcatcattgacaataatatgtatgatgtaaatctcaacaagaatttttcactttcttcaaaggaacaaaataatccagcctggtggcatgggcaaccaatgtggctgacagcaatgtatcaaggtttaaaagccgctacctacttttggcccggatcagaagtggctataaatggctcctttccttccatatacatgccttacaacggaagtgtcccatttgaagagaggatttctacactgttaaaatggctggacctgcccaaagctgaaagacccaggttttataccatgtattttgaagaacctgattcctctggacatgcaggtggaccagtcagtgccagagtaattaaagccttacaggtagtagatcatgcttttgggatgttgatggaaggcctgaagcagcggaatttgcacaactgtgtcaatatcatccttctggctgaccatggaatggaccagacttattgtaacaagatggaatacatgactgattattttcccagaataaacttcttctacatgtacgaagggcctgccccccgcatccgagctcataatatacctcatgacttttttagttttaattctgaggaaattgttagaaacctcagttgccgaaaacctgatcagcatttcaagccctatttgactcctgatttgccaaagcgactgcactatgccaagaacgtcagaatcgacaaagttcatctctttgtggatcaacagtggctggctgttaggagtaaatcaaatacaaattgtggaggaggcaaccatggttataacaatgagtttaggagcatggaggctatctttctggcacatggacccagttttaaagagaagactgaagttgaaccatttgaaaatattgaagtctataacctaatgtgtgatcttctacgcattcaaccagcaccaaacaatggaacccatggtagtttaaaccatcttctgaaggtgcctttttatgagccatcccatgcagaggaggtgtcaaagttttctgtttgtggctttgctaatccattgcccacagagtctcttgactgtttctgccctcacctacaaaatagtactcagctggaacaagtgaatcagatgctaaatctcacccaagaagaaataacagcaacagtgaaagtaaatttgccatttgggaggcctagggtactgcagaagaacgtggaccactgtctcctttaccacagggaatatgtcagtggatttggaaaagctatgaggatgcccatgtggagttcatacacagtcccccagttgggagacacatcgcctctgcctcccactgtcccagactgtctgcgggctgatgtcagggttcctccttctgagagccaaaaatgttccttctatttagcagacaagaatatcacccacggcttcctctatcctcctgccagcaatagaacatcagatagccaatatgatgctttaattactagcaatttggtacctatgtatgaagaattcagaaaaatgtgggactacttccacagtgttcttcttataaaacatgccacagaaagaaatggagtaaatgtggttagtggaccaatatttgattataattatgatggccattttgatgctccagatgaaattaccaaacatttagcccaacactgatgttcccatcccaacacactactttgtggtgctgaccagtttgtataaacaagaagccacacacccggaaactgccctgggtggctggatgtcctaccctttatcatccctcaccgacactaccaaccgtggaagaagctgtcctgaaggtaaaccagaaagctctttgggttgaagaaagatttacagctcacattgccccgggtccgtgatgtagaacttctccactgggctttgacttctatcaggataaagttgcagcctgtctctgaaatttttgcaactaaaagacatatttaccaacatttgaaacccactatttaagcttaattaatggtctaccttaatatataatttactgtataaggtaattttgggcaaaatataagtgatttttttctggagaattgtaaaataaagttttctatttttccttaagtcccctaaaagccataattttttattattccctttttctctattttcaattcctatgaatatgtattattttaaagttatatttgtcacacagagatgatgctatattacaccttcccttttttgttggtttcttaaactctaatctcatgacagattataccttccttattacttgttttatcttactcagaatctttgaatatatttttctgcccagaattatctaaacaaaagggagaacaaaagaagtatgtctcacttgggaactgaatcaactttaaatcagttttgtcacaaaactttttgtatttgactggcaatgctgattaaaattaaaaatgcactgaaaaaaaaaaaaa

SEQ ID NO: 124396 - DNA, 900 bp, Homo sapiens
tcagatccggaaaggggtgtctgcctcagctgtgcccttcactccctcctccccgctgctgtcctgctcccaggagggaagccgccacacggtaatgtttccatgcccagtgccacagggtggctttgactgttcctcatccattgaagattcttctgatgcatggggagtattactcaaagagctgcttctctggtcatcagctgtcactttggaaggggctacttctaccactgacagtcgacagctctcattccttcctccacccagttcctccatcctgtcagccatctgtgggatgatgtaatgcccattcttgtgatctccgtcgtttgtcaggttttgttgccccgtaagtttaaccggaatagccagtgtagaaaaaacgcatttttccctccagatgtaaaaggttgcagaaccggaccattctggcgtcttatcttcagggatcggatcgttggcgtcgaacttatcgctgtcttttaaagacacggcccgcgttttttccagcttttgataaaacatgtagattgatgtgtcatcagcgtctttcgggcttcccgcaagagcaaacacaacgtgatagccgttgtattcagctactgttccgtcagcgttttgcagcggccagctgtcccacacatcaagtccttttgcagactcaatatttttaatcgttgattgatcgaattgaggcacttggtatttttcgttttgctgctgtttagggatctgcagcatatcatggcgtgtaatatgagagacgccgtacgtttctttgtatgctttttggttattttctttcgcgaaggcttgagtcgctcctcctgccagaagtgcagtcgtaaaagtcagaactgtggcttgttttacaatttttttgatgttcatgttcat

SEQ ID NO: 124397 - DNA, 807 bp, Homo sapiens
atgaacatgaacatcaaaaaaattgtaaaacaagccacagttctgacttttacgactgcacttctggcaggaggagcgactcaagccttcgcgaaagaaaataaccaaaaagcatacaaagaaacgtacggcgtctctcatattacacgccatgatatgctgcagatccctaaacagcagcaaaacgaaaaataccaagtgcctcaattcgatcaatcaacgattaaaaatattgagtctgcaaaaggacttgatgtgtgggacagctggccgctgcaaaacgctgacggaacagtagctgaatacaacggctatcacgttgtgtttgctcttgcgggaagcccgaaagacgctgatgacacatcaatctacatgttttatcaaaaggtcggcgacaactcaatcgacagctggaaaaacgcgggccgtgtctttaaagacagcgataagttcgacgccaacgatccgatcctgaaagatcagacgcaagaatggtccggttctgcaacctttacatctgacggaaaaatccgtttattctacactgactattccggtaaacattacggcaaacaaagcctgacaacagcgcagaccccccacatacgtattcgccattcctatgcgatgcacatgctgtatgccggtataccgctgaaagttctgcaaagcctgatgggacataagtccatcagttcaacggaagtctacacgaaggtttttgcgctggatgtggctgcccggcaccgggtgcagtttgcgatgccggagtctgatgcggttgcgatgctgaaacaattatcctga

SEQ ID NO: 124398 - DNA, 948 bp, Homo sapiens
ctatcctgtcgtcatggaagtgatatcgcggaaggaaaatacgatatgagtcgtctggcggcctttctttttctcaatgtatgagaggcgcattggagttctgctgttgatctcattaacacagacgatactgacacagggattcgtataaacgcatggcatacggattggtgatttcttctgttcactaagccgaaactgcgtaaaccggttctccaagtcatttggctgctggtcttcctgttcccttaaaaatccctgtgccatggtcccattcagaccatatttcccaaagatgatagttgccaagatgccccaaggtgagtgcccagtgttacccgcaacctccctgcctgtgagaatcactacaaatggagttaagtcaggaaattgtaccacatcgggactggggacggtctgatttatctgtctgatgattggccatgtgttacagcgtgaataggaaggcaagaaagcttttccatattggaaagaatagttcttacaatttctgatgttctgcaatagcccagctcggtcaccaagagtgatttggtaatatctttgaataaaacaggtagattgatgtgtcacagggtctttcgggcttcccgcaagagcaaacacaacgtgatagccgttgtattcagctactgttccgtcagcgttttgcagcggccagctgtcccacacatcaagtccttttgcagactcaatatttttaatcgttgattgatcgaattgaggcacttggtatttttcgttttgctgctgtttagggatctgcagcatatcatggcgtgtaatatgagagacgccgtacgtttctttgtatgctttttggttattttctttcgcgaaggcttgagtcgctcctcctgccagaagtgcagtcgtaaaagtcagaactgtggcttgttttacaatttttttgatgttcatgttcat

SEQ ID NO: 124399 - DNA, 1242 bp, Homo sapiens
atgaacatgaacatcaaaaaaattgtaaaacaagccacagttctgacttttacgactgcacttctggcaggaggagcgactcaagccttcgcgaaagaaaataaccaaaaagcatacaaagaaacgtacggcgtctctcatattacacgccatgatatgctgcagatccctaaacagcagcaaaacgaaaaataccaagtgcctcaattcgatcaatcaacgattaaaaatattgagtctgcaaaaggacttgatgtgtgggacagctggccgctgcaaaacgctgacggaacagtagctgaatacaacggctatcacgttgtgtttgctcttgcgggaagcccgaaagacgctgatgacacatcaatctacatgttttatcaaaaggtcggcgacaactcaatcgacagctggaaaaacgcgggccgtgtctttaaagacagcgataagttcgacgccaacgatccgatcctgaaagacagacgcaagatgaaccggtttacgcagtttcggcttagtgaaacaaaagaaatcaccaatccgtatgccatgcgtttatacgaatccctgtgtcagtatcgtaagccggatggctcaggcatcgtctctctgaaaatcgactggatcatagagcgttaccagctgcctcaaagttaccagcgtatgcctgacttccgccgccgcttcctgcagaaggggattgatagcaacagtggcctgtgtggggcagccactgagaagatgccagctgcgatgagggaagtacagccagggctgtacactccatggagccagcaggagctaggaacaggcaaaagccccaccccttccaagttagaggggcagagcctcaccctccttggtaaagatgcagccacccagctgtggctgtggaccctggcatccatgcactctctgggaagcctctctgctcttggaggcttggaagtgaccttcccactgtctggcctctccccacacctgacccccctgtgtcagtatcgtaagccggatggctcaggcatcgtctctctgaagatcgactggatcataaagcgttaccagctgcctcaaagttaccagcgtatgcctgacttccgccgccgcttcctgcaggtctgtgttaatgagatcaacagcagaactccaatgcgcctctcatacattgagaaaaagaaaggccgccagacgactcatatcgtattttccttccgcgatatcacttccatgacgacaggatag

SEQ ID NO: 124400 - DNA, 987 bp, Homo sapiens
  misc_feature (1)...(987): n = a,t,c or g
ttatgcttccggctcgtatgtgttgtggaattgtgagcggataacaatttcacacaggaaacagctatgaccatgattacgaattcgagctcggtacccgatcttaagcttaattaaaacttttattttcctgaactctgcctgactgacagttacctgcaggaagcggggaaggaccctatcatctggaggggcagctttcttattgccacagagggggagagaaagcccttgctgcacttttgtcatctcccacgagcaaaacacgtagcccttcagagccagatcctgagcaagatgaacagaaactgaggttttgtaaacgccacctttatgggcagcaaccccgatcaccggtggaaatacgtcttcagcacgtcgcaatcgcgtaccaaacacatcacgcatatgattaatttgttcaattgtataaccaacacgttgctcaacccgtcctcgaatttccatatccgggtgcggtagtcgccctgctttctcggcatctctgatagcctgagaagaaaccccaactaaatccgctgcttcacctattctccagcgccgggttattttcctcgcttccgggctgtcatcattaaacttntgataaaacatgtagattgatgtgtcatcagcgtctttcgggcttcccgcaagagcaaacacaacgtgatagccgttgtattcagctactgttccgtcagcgttttgcagcggccagctgtcccacacatcaagtccttttgcagactcaatatttttaatcgttgattgatcgaattgaggcacttggtatttttcgttttgctgctgtttagggatctgcagcatatcatggcgtgtaatatgagagacgccgtacgtttctttgtatgctttttggttattttctttcgcgaaggcttgagtcgctcctcctgccagaagtgcagtcgtaaaagtcagaactgtggcttgttttacaatttttttgatgttcatgttcat

SEQ ID NO: 124401 - DNA, 1053 bp, Homo sapiens
ttaatctgtaaaggctttttgaagtgcatcacctgaccgggcagatagttcaccggggtgagaaaaaagagcaacaactgatttaggcaatttggcggtgttgatacagcgggtaataatcttacgtgaaatattttccgcatcagccagcgcagaaatatttccagcaaattcattctgcaatcggcttgcataacgctgaccacgttcataagcacttgttgggcgataatcgttacccaatctggataatgcagccatctgctcatcatccagctcgccaaccagaacacgataatcactttcggtaagtgcagcagctttacgacggcgactcccatcggcaatttctatgacaccagatactcttcgaccgaacgccggtgtctgttgaccagtcagtagaaaagaagggatgagatcatccagtgcgtcctcagtaagcagctcctggtcacgttcattacctgaccatacccgagaggtcttctcaacactatcaccccggagcacttcaagagtaaacttcacatcccgaccacatacaggcaaggggatccattcttgcgtctgttctttcaggatcggatcgttggcgtcgaacttatcgctgtctttaaagacacggcccgcgtttttccagctgtcgattgagttgtcgccgaccttttgataaaacatgtagattgatgtgtcatcagcgtctttcgggcttcccgcaagagcaaacacaacgtgatagccgttgtattcagctactgttccgtcagcgttttgcagcggccagctgtcccacacatcaagtccttttgcagactcaatatttttaatcgttgattgatcgaattgaggcacttggtatttttcgttttgctgctgtttagggatctgcagcatatcatggcgtgtaatatgagagacgccgtacgtttctttgtatgctttttggttattttctttcgcgaaggcttgagtcgctcctcctgccagaagtgcagtcgtaaaagtcagaactgtggcttgttttacaatttttttgatgttcatgttcat

SEQ ID NO: 124402 - DNA, 1188 bp, Homo sapiens; identical to SEQ ID NO: 118378

SEQ ID NO: 124403 - DNA, 975 bp, Homo sapiens; identical to SEQ ID NO: 118380
  misc_feature (1)...(975): n = a,t,c or g

SEQ ID NO: 124404 - DNA, 1083 bp, Homo sapiens
atgaacatgaacatcaaaaaaattgtaaaacaagccacagttctgacttttacgactgcacttctggcaggaggagcgactcaagccttcgcgaaagaaaataaccaaaaagcatacaaagaaacgtacggcgtctctcatattacacgccatgatatgctgcagatccctaaacagcagcaaaacgaaaaataccaagtgcctcaattcgatcaatcaacgattaaaaatattgagtctgcaaaaggacttgatgtgtgggacagctggccgctgcaaaacgctgacggaacagtagctgaatacaacggctatcacgttgtgtttgctcttgcgggaagcccgaaagacgctgatgacacatcaatctacatgttttatcaaaaggtcggcgacaactcaatcgacagctgggaaaaacgcgggcccgtgtctttaaagacagcgataagccacacgggaacagaaaacggataccaaggcgaagaatctttatttaacaaagcgaactacggcggcggcacgaacttcttccgtaaagaaagccagaagcttcagcagagcgctaaaaaacgcgatgctgagttagcgaacggcgccctcggtatcatagagttaaataatgattacacattgaaaaaagtaatgaagccgctgatcacttcaaacacggtaactgatgaaatcgagcgcgcgaatgttttcaaaatgaacggcaaatggtacttgttcactgattcacgcggttcaaaaatgacgatcgatggtattaactcaaacgatatttacatgcttggttatgtatcaaactctttaaccggcccttacaagccgctgaacaaaacagggcttgtgctgcaaatgggtcttgatccaaacgatgtgacattcacttactctcacttcgcagtgccgcaagccaaaggcaacaatgtggttatcacaagctacatgacaaacagaggcttcttcgaggataaaaaggcaacatttgcgccaagcttcttaatgaacatcaaaggcaataaaacatccgttgtcaaaaacagcatcctggagcaaggacagctgacagtcaactaa

SEQ ID NO: 124405 - DNA, 1167 bp, Homo sapiens
tcaattcgggaggatcgaaacggcagatcgcaaaaaacagtacatacagaaggagacatgaacatgaacatcaaaaaaattgtaaaacaagccacagttctgacttttacgactgcacttctggcaggaggagcgactcaagccttcgcgaaagaaaataaccaaaaagcatacaaagaaacgtacggcgtctctcatattacacgccatgatatgctgcagatccctaaacagcagcaaaacgaaaaataccaagtgcctcaattcgatcaatcaacgattaaaaatattgagtctgcaaaaggacttgatgtgtgggacagctggccgctgcaaaacgctgacggaacagtagctgaatacaacggctatcacgttgtgtttgctcttgcgggaagcccgaaagacgctgatgacacatcaatctacatgttttatcaaaaggtcggggacaactcaatcgacagctggaaaaacgcgggccgtgtctttaaagacagcgataagttcgacgccaacgatccgatcctgaaagatcagacgcaagaatggtccggttctgcaacctttacatctgacggaaaaatccgtttattttaccctgactattccggtaaacattctgacaaccagagcgtgacaacagcgcaggtaaatgtgtcaaaatctgatgacacactcaaaatcaacggagtggaagatcacaaaacgatttttgacggagacggaaaaacatatcagaacgttcagcagtttatcgatgaaggcaattatacatccggcgacaaccatacgctgagagaccctcactacgttgaagacaaaggccataaataccttgtattcgaagccaacacgggaacagaaaacggataccaaggcgaagaatctttatttaacaaagcgtactacggcggcggcacgaacttcttccgtaaagaaagccagaagcttcagcagagcgctaaaaaacgcgatgctgagttagcgaacggcgccctcgtgccgcaagccaaaggcaacaatgtggttatcacaagctacatgacaaacagaggcttcttcgaggataaaaaggcaacatttgcgccaagcttcttaatgaacatcaaaggcaataaaacatccgttgtcaaaaacagcatcctggagcaaggacagctgaca

SEQ ID NO: 124406 - DNA, 1029 bp, Homo sapiens; identical to SEQ ID NO: 118388

SEQ ID NO: 124407 - DNA, 945 bp, Homo sapiens
tcaggataattgtttcagcatcgcaaccgcatcagactccggcatcgcaaactgcacccggtgccgggcagccacatccagcgcaaaaaccttcgtgtagacttccgttgaactgatggacttatgtcccatcaggctttgcagaactctcagcggtataccggcatacagcatgtgcatcgcataggaatggcggaacgtatgtggtgtgaccggaacagagaacgtcacaccgtcagcagcagcggcggcaaccgcctccccaatccaggtcctgaccgttctgtccgtctcttcccagatccgcgctttctctgtccttcctgtgcgacggttacgccgctccatgagctgcgctgttgtcaggctttgtttgccgtaatgtttaccggaatagtcagtgtagaataaccggatttttccgtcagatgtaaaggttgcagaaccggaccattcttgcgtctgatctttcaggatcggatcgttggcgtcgaacttatcgctgtctttaaagacacggcccgcgtttttccagctgtcgattgagttgtcgccgaccttttgataaaacatgtagattgatgtgtcatcagcgtctttcgggcttcccgcaagagcaaacacaacgtgatagccgttgtattcagctactgttccgtcagcgttttgcagcggccagctgtcccacacatcaagtccttttgcagactcaatatttttaatcgttgattgatcgaattgaggcacttggtatttttcgttttgctgctgtttagggatctgcagcatatcatggcgtgtaatatgagagacgccgtacgtttctttgtatgctttttggttattttctttcgcgaaggcttgagtcgctcctcctgccagaagtgcagtcgtaaaagtcagaactgtggcttgttttacaatttttttgatgttcatgttcat

SEQ ID NO: 124408 - DNA, 4517 bp, Homo sapiens
gcggagccaaggcacacgggtctgacccttgggccggcccggagcaagtgacacggaccggtcgcctatcctgaccacagcaaagcggcccggagcccgcggaggggacctgacgggggcgtaggcgccggaaggctgggggccccggagccgggccggcgtggcccgagttccggtgagcggacggcggcgcgcgcagatttgataatgggctgcattaaaagtaaagaaaacaaaagtccagccattaaatacagacctgaaaatactccagagcctgtcagtacaagtgtgagccattatggagcagaacccactacagtgtcaccatgtccgtcatcttcagcaaagggaacagcagttaatttcagcagtctttccatgacaccatttggaggatcctcaggggtaacgccttttggaggtgcatcttcctcattttcagtggtgccaagttcatatcctgctggtttaacaggtggtgttactatatttgtggccttatatgattatgaagctagaactacagaagacctttcatttaagaagggtgaaagatttcaaataattaacaatacggaaggagattggtgggaagcaagatcaatcgctacaggaaagaatggttatatcccgagcaattatgtagcgcctgcagattccattcaggcagaagaatggtattttggcaaaatggggagaaaagatgctgaaagattacttttgaatcctggaaatcaacgaggtattttcttagtaagagagagtgaaacaactaaaggtgcttattccctttctattcgtgattgggatgagataaggggtgacaatgtgaaacactacaaaattaggaaacttgacaatggtggatactatatcacaaccagagcacaatttgatactctgcagaaattggtgaaacactacacagaacatgctgatggtttatgccacaagttgacaactgtgtgtccaactgtgaaacctcagactcaaggtctagcaaaagatgcttgggaaatccctcgagaatctttgcgactagaggttaaactaggacaaggatgtttcggcgaagtgtggatgggaacatggaatggaaccacgaaagtagcaatcaaaacactaaaaccaggtacaatgatgccagaagctttccttcaagaagctcagataatgaaaaaattaagacatgataaacttgttccactatatgctgttgtttctgaagaaccaatttacattgtcactgaatttatgtcaaaaggaagcttattagatttccttaaggaaggagatggaaagtatttgaagcttccacagctggttgatatggctgctcagattgctgatggtatggcatatattgaaagaatgaactatattcaccgagatcttcgggctgctaatattcttgtaggagaaaatcttgtgtgcaaaatagcagactttggtttagcaaggttaattgaagacaatgaatacacagcaagacaaggtgcaaaatttccaatcaaatggacagctcctgaagctgcactgtatggtcggtttacaataaagtctgatgtctggtcatttggaattctgcaaacagaactagtaacaaagggccgagtgccatatccaggtatggtgaaccgtgaagtactagaacaagtggagcgaggatacaggatgccgtgccctcagggctgtccagaatccctccatgaattgatgaatctgtgttggaagaaggaccctgatgaaagaccaacatttgaatatattcagtccttcttggaagactacttcactgctacagagccacagtaccagccaggagaaaatttataattcaagtagcctattttatatgcacaaatctgccaaaatataaagaacttgtgtagattttctacaggaatcaaaagaagaaaatcttctttactctgcatgtttttaatggtaaactggaatcccagatatggttgcacaaaaccacttttttttccccaagtattaaactctaatgtaccaatgatgaatttatcagcgtatttcagggtccaaacaaaatagagctaagatactgatgacagtgtgggtgacagcatggtaatgaaggacagtgaggctcctgcttatttataaatcatttcctttctttttttccccaaagtcagaattgctcaaagaaaattatttattgttacagataaaacttgagagataaaaagctataccataataaaatctaaaattaaggaatatcatgggaccaaataattccattccagttttttaaagtttcttgcatttattattctcaaaagttttttctaagttaaacagtcagtatgcaatcttaatatatgctttcttttgcatggacatgggccaggtttttcaaaaggaatataaacaggatctcaaacttgattaaatgttagaccacagaagtggaatttgaaagtataatgcagtacattaatattcatgttcatggaactgaaagaataagaactttttcacttcagtccttttctgaagagtttgacttagaataatgaaggtaactagaaagtgagttaatcttgtatgaggttgcattgattttttaaggcaatatataattgaaactactgtccaatcaaaggggaaatgttttgatctttagatagcatgcaaagtaagacccagcattttaaaagcccttttttaaaaactagacttcgtactgtgagtattgcttatatgtccttatggggatgggtgccacaaatagaaaatatgaccagatcagggacttgaatgcacttttgctcatggtgaatatagatgaacagagaggaaaatgtatttaaaagaaatacgagaaaagaaaatgtgaaagttttacaagttagagggatggaaggtaatgtttaatgttgatgtcatggagtgacagaatggctttgctggcactcagagctcctcacttagctatattctgagactttgaagagttataaagtataactataaaactaatttttcttacacactaaatgggtatttgttcaaaataatgaagttatggcttcacattcattgcagtgggatatggtttttatgtaaaacatttttagaactccagttttcaaatcatgtttgaatctacattcacttttttttgttttcttttttgagacggagtctcgctctgccgcccaggctggagtgcagtggcgcgatctcggctcactgcaagctctgcctcccaggttcacaccattctcctgcctcagcctcccgagtagctgggactacaggtgcccaccaccacgcctggctagttttttgtatttttagtagagacgcagtttcaccgtgttagccaggatggtctcgatctcctgaccttgtgatctgcccgcctcggcctcccaaagtgctgggattacaggtgtgagccaccgcgcccagcctacattcacttctaaagtctatgtaatggtggtcattttttcccttttagaatacattaaatggttgatttggggaggaaaacttattctgaatattaacggtggtgaaaaggggacagtttttaccctaaagtgcaaaagtgaaacatacaaaataagactaatttttaagagtaactcagtaatttcaaaatacagatttgaatagcagcattagtggtttgagtgtctagcaaaggaaaaattgatgaataaaatgaaggtctggtgtatatgttttaaaatactctcatatagtcacactttaaattaagccttatattaggcccctctattttcaggatataattcttaactatcattatttacctgattttaatcatcagattcgaaattctgtgccatggcgtatatgttcaaattcaaaccatttttaaaatgtgaagatggacttcatgcaagttggcagtggttctggtactaaaaattgtggttgttttttctgtttacgtaacctgcttagtattgacactctctaccaagagggtcttcctaagaagagtgctgtcattatttcctcttatcaacaacttgtgacatgagattttttaagggctttatgtgaactatgatattgtaatttttctaagcatattcaaaagggtgacaaaattacgtttatgtactaaatctaatcaggaaagtaaggcaggaaaagttgatggtattcattaggttttaactgaatggagcagttccttatataataacaattgtatagtagggataaaacactaacaatgtgtattcattttaaattgttctgtatttttaaattgccaagaaaaacaactttgtaaatttggagatattttccaacagcttttcgtcttcagtgtcttaatgtggaagttaacccttaccaaaaaaggaagttggcaaaaacagccttctagcacacttttttaaatgaataatggtagcctaaacttaatatttttataaagtattgtaatattgttttgtggataattgaaataaaaagttctcattgaatgcacc

SEQ ID NO: 124409 - DNA, 1153 bp, Homo sapiens
atgaacatgaacatcaaaaaaattgtaaaacaagccacagttctgacttttacgactgcacttctggcaggaggagcgactcaagccttcgcgaaagaaaataaccaaaaagcatacaaagaaacgtacggcgtctctcatattacacgccatgatatgctgcagatccctaaacagcagcaaaacgaaaaataccaagtgcctcaattcgatcaatcaacgattaaaaatattgagtctgcaaaaggacttgatgtgtgggacagctggccgctgcaaaacgctgacggaacagtagctgaatacaacggctatcacgttgtgtttgctcttgcgggaagcccgaaagacgctgatgacacatcaatctacatgttttatcaaaaggtcggcgacaactcaatcgacagctggaaaaacgcgggccgtgtctttaaagacagcgataagttcgacgccaacgatccgatcctgaaagatcagacgcaagaatggtccggttctgcaacctttacatctgacggaaaaatccgtttgtggtgcataaacgctggtcatgaaatgacgaaggctatcgccattgcacagtttaatgatgacagcccggaagcgaggaaaataacccggcgctggagaataggtgaagcagcggatttagttggggtttcttctcaggctatcagagatgccgagaaagcagggcgactaccgcacccggatatggaaattcgaggacgggttgagcaacgtgttggttatacaattgaacaaattaatcatatgcgtgatgtgtttggtacgcgattgcgacgtgctgaagacgtatttccaccggtgatcggggttgctgcccataaaggtggcgtttacaaaacctcagtttctgttcatcttgctcaggatctggctctgaaggggctacgtgttttgctcgtggaaggtaacgacccccagggaacagcctcaatgtatcacggatgggtaccagatcttcatattcatgcagaagacactctcctgcctttctatcttggggaaaaggacgatgtcacttatgcaataaagcccacttgctggccggggcttgacattattccttcctgtctggctctgcaccgtattgaaactgagttaatgggcaaatttgatgaag

SEQ ID NO: 124410 - DNA, 1284 bp, Homo sapiens; identical to SEQ ID NO: 115665

SEQ ID NO: 124411 - DNA, 1131 bp, Homo sapiens
atgtacatgaacatcaaaaaaattgtaaaacaagccacagttctgacttttacgactgcacttctggcaggaggagcgactcaagccttcgcgaaagaaaataaccaaaaagcatacaaagaaacgtacggcgtctctcatattacacgccatgatatgctgcagatccctaaacagcagcaaaacgaaaaataccaagtgcgtcaattcgatcaatcaacgattacaaatattgagtctgcaaaaggacttgatgtgtgggacagctggccgctgcaaaacgctgacggaacagtagctgaatacaacggctatcacgttgtgtttgctcttgcgggaagcccgaaagacgctgatgacacatcaatctacatgttttatcaaaaggaacaccaaacttacggcaaacaaagcctgacaacagcgcaggtaaatgtgtcaaaatctgatgacacactcaaaatcaacggagtggaagatcacaaaacgatttttgacggagacggaaaaacatatcagaacgttcagcagtttatcgatgaaggcaattatacatccggcgacaaccatacgctgagagaccctcactacgttgaagacaaaggccataaataccttgtattcgaagccaacacgggaacagaaaacggataccaaggcgaagaatctttatttaacaaagcgtactacggcggcggcacgaacttcttccgtaaagaaagccagaagcttcagcagagcgctaaaaaacgcgatgctgagttagcgaacggcgccctcggtatcatagagttaaataatgattacacattgaaaaaagtaatgaagccgctgatcacttcaaacacggtaactgatgaaatcgagcgcgcgaatgttttcaaaatgaacggcaaatggtacttgttcactgattcacgcggttcaaaaatgacgatcgatggtattaactcaaacgatatttacatgcttggttatgtatcaaactctttaaccggcccttacaagccgctgaacaaaacagggcttgtgctgcaaatgggtcttgatccaaacgatgtgacattcacttactctcacttcgcagtgccgcaagccaaaagcaacaatgtggtgaactacggtgcatga

SEQ ID NO: 124412 - DNA, 1203 bp, Homo sapiens
ctatcctgtcgtcatggaagtgatatcgcggaaggaaaatacgatatgagtcgtctggcggcctttctttttctcaatgtatgagaggcgcattggagttctgctgttgatctcattaacacagaccccagcttttttttgctcagaagggttagatgcctgcggcttaagtaattcctctttatctgtaaaggctttttgaagtgcatcacctgaccgggcagatagttcaccggggtgagaaaaaagagcaacaactgatttaggcaatttggcggtgttgatacagcgggtaataatcttacgtgaaatattttccgcatcagccagcgcagaaatatttccagcaaattcattctgcaatcggcttgcataacgctgaccacgttcataagcacttgttgggcgataatcgttacccaatctggataatgcagccatctgctcatcatccagctcgccaaccagaacacgataatcactttcggtaagtgcagcagctttacgacggcgactcccatcggcaatttctatgacaccagatactcttcgaccgaacgccggtgtctgttgaccagtcagtagaaaagaagggatgagatcatccagtgcgtcctcagtaagcagctcctggtcacgttcattaccggaatagtcagtgtagaataaacggatttttccgtcagatgtaaaggttgcagaaccggaccattcttgcgtctgatctttcaggatcggatcgttggcgtcgaacttatcgctgtctttaaagacacggcccgcgtttttccagctgtcgattgagttgtcgccgaccttttgataaaacatgtagattgatgtgtcatcagcgtctttcgggcttcccgcaagagcaaacacaacgtgatagccgttgtattcagctactgttccgtcagcgttgtgcagcggccagctgtcccacacatcaagtccttttgcagactcaatatttttaatcgttgattgatcgaagtgaggcacttggtatttttcgttttgctgctgtttagggatctgcagcatatcatggcgtgtaatatgagagacgccgtacgtttctttgtatgctttttggttattttctttcgcgaaggcttgagtcgctcctcctgccagaagtgcagtcgtaaaagtcagaactgtggcttgttttacaatttttttgatgttcatgttcat

SEQ ID NO: 124413 - DNA, 1226 bp, Homo sapiens
atgaacatgaacatcaaaaaaattgtaaaacaagccacagttctgacttttacgactgcacttctggcaggaggagcgactcaagccttcgcgaaagaaaataaccaaaaagcatacaaagaaacgtacggcgtctctcatattacacgccatgatatgctgcagatccctaaacagcagcaaaacgaaaaataccaagtgcctcaattcgatcaatcaacgattaaaaatattgagtctgcaaaaggacttgatgtgtgggacagctggccgctgcaaaacgctgacggaacagtagctgaatacaacggctatcacgttgtgtttgctcttgcgggaagcccgaaagacgctgatgacacatcaatctacatgttttatcaaaaggtcggcgacaactcaatcgacagctggaaaaacgcgggccgtgtctttaaagacagcgataagttcgacgccaacgatccgatcctgaaagatcagacgcaagaatggtccggttctgcaacctttacatctgacggaaaaatccgtttattctacactgactatccgggattttgccgatttcggaaccaccatcaaacaggattttcgcctgctggggcaaacccagcgtggacgctttgctgcatctctctcagggccaggcggtgatgggcaatcagctgttggcgttctcactggtgaaaagaaaaaccaccctggcgcgcaatacgcaaaccgcatctccccgcgcgttggcccgattcattaatgcagctggcacgacaggtttcccgactggaaagcgggcagtgagcgcaacgcaattaatggattttgccgatttcggaaccaccatcaaacaggattttcgcctgctggggcaaaccagcgtggaccgcttgctgcaactctctcagggccaggcggtgaagggcaatcagctgttgcccgtctcactggtgaaaagaaaaaccaccctggcgcccaatacgcaaaccgcctctcccccgcgcgttggccgattcattaatgcagctggcacgacaggtttcccgactggaaagcgggcagtgagcgcaacgcaattaatgggcactgcccgggatccccagattgaaacttctcacttcttcaccctccagtcctcgagctgcagagaagcggtcctccagtggcggttacagcagaccataaaggagcaggcactgctgaacgcacacgtgacacagacacagtaa

SEQ ID NO: 124414 - DNA, 1548 bp, Homo sapiens
ttagttgactgtcagctgtccttgctccaggatgctgtttttgacaacggatgttttattgcctttgatgttcattaagaagcttggcgcaaatgttgcctttttatcctcgaagaagcctctgtttgtcatgtagcttgtgataaccacattgttgcctttggcttgcggcactgcgaagtgagagtaagtgaatgtcacatcgtttggatcaagacccatttgcagcacaagccctgttttgttcagcggcttgtaagggccggttaaagagtttgatacataaccaagcatgtaaatatcgtttgagttaataccatcgatcgtcatttttgaaccgcgtgaatcagtgaacaagtaccatttgccgttcattttgaaaacattcgcgcgctcgatttcatcagttaccgtgtttgaagtgatcagcggcttcattacttttttcaatgtgtaatcattatttaactctatgataccgagggcgccgttcgctaactcagcatcgcgttttttagcgctctgctgaagcttctggctttctttacggaagaagttcgtgccgccgccgtagtacgctttgttaaataaagattcttcgccttggtatccgttttctgttcccgtgttggcttcgaatacaaggtatttatggcctttgtcttcaacgtagcgagggtctctcagcgtatggttgtcgccggatgtataattgccctgcgctgttgtcaggctttgtttgccgtaatgtttaccggaatagtcagtgtagaataaacggatttttccgtcagatgtaaaggttgcagaaccggaccattcttgcgtctgatctttcaggatcggatcgttggcgtcgaacttatcgctgtctttaaagacacggcccgcgtttttccagctgtcgattgagttgtcgccgaccttttgataaaacatgtagattgatgtgtcatcagcgtctttcgggcttcccgcaagagcaaacacaacgtgatagccgttgtattcagctactgttccgtcagcgttttgcagcggccagctgtcccacacatcaagtccttttgcagactcaatatttttaatcgttgattgatcgaattgaggcacttggtatttttcgttttgctgctgtttagggatctgcagcatatcatggcgtgtaatatgagagacgccgtacgtttctttgtatgctttttggttattttctttcgcgaaggcttgagtcgctcctcctgccagaagtgcagtcgtaaaagtcagaactgtggcttgttttacaatttttttgatgttcatgttcatgtctccttctgtatgtactggtttttggcatctgccgtttcgatacctccgaattgactgtgcctcttcctgttgcttcttaagttgctccaacattgctttaaattcagcctctttttgttctgcctcctccagtgttgcctgattctgttcttcataagccatggccaccacagccaagatcaagttcaccagatagaaagaacccacaaagatgaccaagacgaagaagatcat

SEQ ID NO: 124415 - DNA, 1368 bp, Homo sapiens
atgaacatgaacatcaaaaaaattgtaaaacaagccacagttctgacttttacgactgcacttctggcaggaggagcgactcaagccttcgcgaaagaaaataaccaaaaagcatacaaagaaacgtacggcgtctctcatattacacgccatgatatgctgcagatccctaaacagcagcaaaacgaaaaataccaagtgcctcaattcgatcaatcaacgattaaaaatattgagtctgcaaaaggacttgatgtgtgggacagctggccgctgcaaaacgctgacggaacagtagctgaatacaacggctatcacgttgtgtttgctcttgcgggaagcccgaaagacgctgatgacacatcaatctacatgttttatcaaaagcccgactatcgtgcatgcctcgcagttgactctagaggatcccccaccacaccgctcattgtcagtgatgctggctttaaagtgccatggtataaatccgttgagaagctaggttggtactggttaagtcgagtaagaggaaaagtacaatatgcagacctaggagcggaaaactggaaacctatcagcaacttacatgatatgtcatctagtcactcaaagactttaggctataagaggctgactaaaagcaatccaatctcatgccaaattctattgtataaatctcgctctaaaggccgaaaaaatcagcgctcgacacggactcattgtcaccacccgtcacctaaaatctactcagcgtcggcaaaggagccatgggttctagcaactaacttacctgttgaaattcgaacacccaaacaacttgttaatatctattcgaagcgaatgcagattgaagaaaccttccgagacttgaaaagtcctgcctacggactaggcctacgccatagccgaacgagcagctcagagcgttttgatatcatgctgctaatcgccctgatgcttcaactaacatgttggcttgcgggcgttcatgctcagaaacaagttgactctagaggatcccgcattgaaatccgtggctgcctgacccagatgggcgacattccgctggatatcaaagactggtcgcaggtcgagcaaaatccgtttttttgcccggaccccgacaaaatcgacgcgttagacgagttgatgcgtgcgctgaaaaaagagggcgactccatcggcgctaaagtcaccgttgttgccagtggcgttcctgccggacttggcgagccggtctttgaccgcctggatgctgacatcgcccatgcggggtaccgagctcgaattcgtaatcatggtcatagctgtttcctgtgtgaaattgttatccgctcacaattccacacaacatacgagccggaagcataa

SEQ ID NO: 124416 - DNA, 2386 bp, Homo sapiens
atgaacatgaacatcaaaaaaattgtaaaacaagccacagttctgacttttacgactgcacttctggcaggaggagcgactcaagccttcgcgaaagaaaataaccaaaaagcatacaaagaaacgtacggcgtctctcatattacacgccatgatatgctgcagatccctaaacagcagcaaaacgaaaaataccaagtgcctcaattcgatcaatcaacgattaaaaatattgagtctgcaaaaggacttgatgtgtgtgacagctggccgctgcaaaacgctgacggaacagtagctgaatacaacggctatcaccccctgaaaaacaccattctatattctgtttctatgactgtgatttctcaactatatcatgctatcagagatgccgagaaagcagggcgactaccgcacccggatatggaaattcgaggacgggttgagcaacgtgttggttatacaattgaacaaattaatcatatgcgtgatgtgtttggtacgcgattgcgacgtgctgaagacgtatttccaccggtgatcggggttgctgcccataaaggtggcgtttacaaaacctcagtttctgttcatcttgctcaggatctggctctgaaggggctacgtgttttgctcgtggaagtgacagaacctccaaatttagctcagcacaaaggcctcacagatgagactgcctatcccagcctcttgtttacctacgtatggccatgggaccatccatgttttagccaactggatggattttgccgatttcggaaccaccatcaaacaggattttcgcctgctggggcaaaccagcgtggaccgcttgctgcaactctctcagggccaggcggtgaagggcaatcagctgttgcccgtctcactggtgaaaagaaaaaccaccctggcgcccaatacgcaaaccgcctctccccgcgcgttggccgattcattaatgcagctggcacgacaggtttcccgactggaaagcgggcagtgagcgcaacgcaattaatatcgcaaaaaacagtacatacagaaggagacatgaacatgaacatcaaaaaaattgtaaaacaagccacagttctgacttttacgactgcacttctggcaggaggagcgactcaagccttcgcgaaagaaaataaccaaaaagcatacaaagaaacgtacggcgtctctcatattacacgccatgatatgctgcagatccctaaacagcagcaaaacgaaaaataccaagtgcctcaattcgatcaatcaacgattaaaaatattgagtctgcaaaaggacttgatgtgtgggacagctggccgctgcaaaacgctgacggaacagtagctgaatacaacggctatcacgttgtgtttgctcttgcgggaagcccgaaagacgctgatgacacatcaatctacatgttttatcaaaagatcagacgcaagaatggtccaggttctgcaacctttacatctgacggaaaaatccggtttattctacactgactattccggtaagcattacggcaaacaaagcctgacaacagcgcaggtaaatgtgtcaaattctgatgacacactcaaaatcaacggagtggattatcacaaaacgatttttgacggagacggaaaaacatatcagaacgttcagcagtttatcgatgaaggcaattatacatccggcgacaaccatacgctgagagaccctcactacgttgaagacaaaggccataaataccttgtattcgaagccaacacgggaacagaaaacggataccaaggcgaagaatctttatttaacaaagcgtactacggcggcggcacgaacttcttccgtaaagaaagccagaagcttcagcagagcgctaaaaaacgcgatgctgagttagcgaacggcgccctcggtatcatagagttaaataatgattacacattgaaaaaagtaatgaagccgctgatcacttcaaacacggtaactgatgaaatcgagcgcgcgaatgttttcaaaatgaacggcaaatggtacttgttcactgattcacgcggttcaaaaatgacgatcgatggtattaactcaaacgatatttacatgcttggttatgtatcaaactctttaaccggcccttacaagccgctgaacaaaacagggcttgtgctgcaaatgggtcttgatccaaacgatgtgacattcacttactctcacttcgcagtgccgcaagccaaaggcaacaatgtggttatcacaagctacatgacaaccagaggcttcttcgaggataaaaaggcaacaaaagcgccaagcttcttaatgaacatcaaaggcaataaagcatccgttgtcaaaaacagcatcctggagcaaggacagctggcagtcaactaa

SEQ ID NO: 124417 - DNA, 2758 bp, Homo sapiens
ctacagcatctctgtaacaggaggtccgctgggtcctctggaaacccattcagacttctggtgggagcaggccgccgtggttcttccacgtagaggtgttctctctccctctggatcagggctggcagtatgggtgccttcaggcagcactgtaagggtggtcccctcagcagaatctggtgcctcctgctcttgaccattggggatgctgccagcctccaaggtcaggctgggtgcagaaggggtgagagaaaggttcttctctgacacaggcaggatctccacagcaactggcaacagatccgcctgctcgttggccgccagattctgctcaaactcgatgcgcagcatctcatactccttgcgtacctgggccagcgtgtcctccagctgaatgacctctgtgcgtagcttcttctgcagccccagctcgtcgctggcctcatcctcagttatagcagcagagtctccctcctcttcagggcccatgatgggaaaaggcccagggggccggtgctgaaagagagccgcccggttctgctgctcccctttctttacccagtgcccgtagagccggaaggcacagttgtcgatgaggtgccgcactgaccgcagcgcataagggtccctcaacagtgcattcttggtcagtggccgtacacgatgggtgcttagggccactcgtccagcagccagcactgtccacactgccacttcagttcttctccttttcgaattagggcttgaatgctctgactgtgcgactctaaaagaaccccccgtctgatctttcaggatcggatcgttggcgtcgaacttatcgctgtctttaaagacacggcccgcgtttttcccagctgtcgattgagttgtcgccgaccttttgataaaacatgtagattgatgtgtcatcagcgtctttcgggcttcccgcaagagcaaacacaacgtgatagccgttgtattcagctactgttccgtcagcgttttgcagcggccagctgtcccacacatcaagtccttttgcagactcaatatttttaatcgttgattgatcgaattgaggcacttggtatttttcgttttgctgctgtttagggatctgcagcatatcatggcgtgtaatatgagagacgccgtacgtttctttgtatgctttttggttattttctttcgcgaaggcttgagtcgctcctcctgccagaagtgcagtcgtaaaagtcagaactgtggcttgttttacaatttttttgatgttcatgttcatgtctccttctgtatgtactgttttttgcgatctgccgtttcgatcctcccgaattgactcagatatcctttgcaggaagggattcgcgaagaaaatccgatatagtctctgccggccttcttttctcaatgtataagaggcgcatggagttctgctgttgatctcattaacacagacctgcaggaagcggcggcggaagtcaggcatacgttggtaactttgaggcagctggtaacgctctatgatccagtcgattttcagagagacaatgcttgagccatccggcttacgatactgacacagggattcgtataaacgcatggcatacggattggtgatgtcttttgtttcactaagccgaaactgcgtaaaccggttctgtaacccgataaagaagggaatgagatatgggttgatatgtacactgtaaagccctctggatggactgtgcgcacgtttgataaaccaaggaaaagattcatagcctttttcatcgccggcatcctcttcagggcgataaaaaaccacttccttccccgcgaaactcttcaatgcctcccgcatatccttactggcttccgcagaggtcaatccgaatatttcagcatatttagcaacatggatctcgcagataccgtcatgttcctgtagggtgccatcagattttctgatctcatccatcgaataataattttcttccccaaagtacctattatttgtcaggctttgtggtgagcagtttatatctgccacacacttcgaagagacccggccaaagctccttttcgttcctttagtcttgccttccctccttgttttgttccctctcttccttcgttgttctatcgttcgttctttcgtcgatcggtcgtgcatgcggtcagtcgttgtttctctcgttctttgtctctctcgatcagtgtggtcatctctcaggatgaccgctggttcgcagatgacccatggaagagagtccgtgtccccactcctgcctggtgtcgaggcttgtttgccgtaatgtttaccggaatagtcagtgtagaataaacggattttcggtccagatgtaaaggttgcagaaccggcaccattcttgcgtctgatcttttgataaaacatgtagattgatgtgtcatcagcgtctttcgggcttcccgcaagagcaaacacaacgtgatagccgttgtattcagctactgttccgtcagcgttttgcagcggccagctgtcccacacatcaagtccttttgcagactcaatatttttaatcgttgattgatcgaattgaggcacttggtatttttcgttttgctgctgtttagggatctgcagcatatcatggcgtgtaatatgagagacgccgtacgtttctttgtatgctttttggttattttctttcgcgaaggcttgagtcgctcctcctgccagaagtgcagtcgtaaaagtcagaactgtggcttgttttacaatttttttgatgttcatgttcat

SEQ ID NO: 124418 - DNA, 1362 bp, Homo sapiens
atgaacatgaacatcaaaaaaattgtaaaacaagccacagttctgacttttacgactgcacttctggcaggaggagcgactcaagccttcgcgaaagaaaataaccaaaaagcatacaaagaaacgtacggcgtctctcatattacacgccatgatatgctgcagatccctaaacagcagcaaaacgaaaaataccaagtgcctcaattcgatcaatcaacgattaaaaatattgagtctgcaaaaggacttgatgtgtgggacagctggccgctgcaaaacgctgacggaacagtagctgaatacaacggctatcacgttgtgtttgctcttgcgggaagcccgaaagacgctgatgacacatcaatctacatgttttatcaaaaggtcggcgacaactcaatcgacagctggaaaaacgcgggccgtgtctttaaagacagcgataagttcgacgccaacgatccgatcctgaaagatcagacgcaagaatggtccggttctgcaacctttacatctgacggaaaaaatccggttatttctacacttgactatttccggttaaacattacggccaaacaaagcctgacaacagcgcagggaaaatgtgttaaaaatctgatgacacactgggcggttatcaatcacaagaaacgtaaaaatagcccgcgaatcgtccagtcaaacgacctcactgaggcggcatatagtctctcccgggatcaaaaacgtatgctgtatctgttcgttgaccagatcagaaaatctgatggcaccctacaggaacatgacggtatctgcgagatccatgttgctaaatatgctgaaatattcggattgacctctgcggaagccagtaaggatatacggcaggcattgaagagtttcgcggggaaggaagtggttttttatcgccctgaagaggatgccggcgatgaaaaaggctatgaatcttttccttggtttatcaaacgtgcgcacagtccatccagagggctttacagtgtacatatcaacccatatctcattcccttctttatcgggttacagaaccggtttacgcagtttcggcttagtgaaacaaaagaaatcaccaatccgtatgccatgcgtttatacgaatccctgtgtcagtatcggaaagccggatggctcaggcatcgtctctctgaaaatgactggatcataaagcgttcccagctgcctcaaagtgccttctaccaaccctttatggggctgcggagggagagtttttatttccgctgggaaagacggaccttgggtcccctaaaaagttttagtgttaaaaggggaacggaagccggaaaattcagacttgcagcccttttggtgcgactctaa

SEQ ID NO: 124419 - DNA, 2466 bp, Homo sapiens
  misc_feature (1)...(2466): n = a,t,c or g
ttagttgactgtcagctgtccttgctccaggatgctgtttttgacaacggatgttttattgcctttgatgttcattaagaagcttggcgcaaatgttgcctttttatcctcgaagaagcctctgtttgtcatgtagcttgtgataaccacattgttgcctttggcttgcggcactgcgaagtgagagtaagtgaatgtcacatcgtttggatcaagacccatttgcagcacaagccctgttgttgttcagcggcttgtaagggccggttaaagagtttgatacataaccaagcatgtaaatatccgttgagtttaaatcccatcgatcggtcatttttgaaccgccgtgaatcagtgaacaagtaccatttgccgttcattttgaaaacattcgcgcgctcgatttcatcagttaccgtgtttgaagtgatcagcggcttcattacttttttcaatgtgtaatcattatttaactctatgataccgagggcgccgttcgctaactcagcatcgcgttttttagcgctctgctgaagcttctggctttctttacggaagaagttcgtgccgccgccgtagtacgctttgttaaataaagattcttcgccttggtatccgttttctgttcccgtgttggcttcgaatacaaggtatttatggcctttgtcttcaacgtagtgagggtctctcagcgtatggttgtcgccggatgtataaattgccttcatcgataaactgctgaacgttctgatatgtttttccgtctccgtcaaaaatcgttttgtgatcttccactccgttgattttgagtgtgtcatcagattttgacacatttacctgcgctgttgtcaggctttgtttgccgtaatgtttaccggatatagtcagtgtagaataaactggatttttccgtcagatgtaaaggttgcagaaaccggacctttctttgcgtctgatctttcaggatcgggatcgttggcgtcgaactattcgctgtcttaaaaaacacggccccgcgtttttccagctgtcgattgagttgtcgccgaccttttgataaaacatgtagattgatgtgtcatcagcgtctttcgggcttcccgcaagagcaaacacaacgtgatagccgttgtattcagctactgttccgtcagcgttttgcagcggccagctgtcccacacatcaagtccttttgcagactcaatatttttaatcgttgattgatcgatatgaggcacttggtatttttccgttttgctgctgtttagggatctgcagcatatcatggcgtgtaatatgagagacgccgtacgtttctttgtatgctttttggttattttctttcgcgaaggcttgagtcgctcctcctgccagaagtgcagtcgtaaaagtcagaactgtggcttgttttacaatttttttgatgttcatgttcatgtctccttctgtatgtactgttttttgcgatctgccgtttcgatccttcccgaatgatagggtttttcctngtgaaaattttccgcatcagccagcgcagaaatatttccagcaaattcattctgcaatcggcttgcataacgctgaccacgttcataagcacttgttgggcgataatcgttacccaatctggataatgcagccatctgctcatcatccagctcgccaaccagaacacgataatcactttcggtaagtgcagcagctttacgacggcgactcccatcggcaatttctatgacaccagatactcttcgaccgaacgccggtgtctgttgaccagtcagtagaaaagaagggatgagatcatccagtgcgtcctcagtaagcagctcctggtcacgttcattacctgaccatacccgagaggtcttctcaacactatcaccccggagcacttcaagagtaaacttcacatcccgaccacatacaggcaaagtaatggcattaccgcgagccattactcctacgcgcgcaattaacgaatccaccatcggggcagctggtgtcgataacgaagtatcttcaaccggttgagtattgagcgtatgttttggaataacaggcgcacgcttcattatcttntgataaaacatgtagattgatgtgtcatcagcgtctttcgggcttcccgcaagagcaaacacaacgtgatagccgttgtattcagctactgttccgtcagcgttttgcagcggccagctgtcccacacatcaagtccttttgcagactcaatatttttaatcgttgatcgatcgaattgaggcacttggtatttttcgttttgctgctgtttagggatctgcagcatatcatggcgtgtaatatgagagacgccgtacgtttctttgtatgctttttggttattttctttcgcgaaggcttgagtcgctcctcctgccagaagtgcagtcgtaaaagtcagaactgtggcttgttttacaatttttttgatgttcatgttcat

SEQ ID NO: 124420 - DNA, 479 bp, Homo sapiens
tcaccaataggggactgaataagctgcgtatttcttcctttgagcgcagctggtgcaataaacaggagctcgcagagtcccgtggccgcggaggggcgccagactccggggaagagccagagcgaggtccgacgaatcgggctctgctggcgaccagcccccttcctttcctccctggtggggctggcggtgggtgaccacggccgcatctccagcaaatctgtggcccagcgtggcccgatcaacaatggtagaccgagccatcaacctgttttcctaaaaatgaaaggtgatctggccctgactgaagacaaacgggaacaagcccaaaatgaacagagtgcctggaagtttacgcctggtaggtaaactctccagtcatattctcagtcaaggcttccctgacagtcccactactagaaagtcactgggggggacagccaaggactcgtttctacaccaacactcagactttttga

SEQ ID NO: 124421 - DNA, 347 bp, Homo sapiens
atgcaccatcaacaatcccaagagcttcctggagtgggcttcaagcagcatgcccctcaggcactcacagagatccagaaatttgccatgaaagagatgggaactccagatgtgcgcattgataccaggctcatcaaagctgtctgggccaaaggaataaggaatgtgccataccgaatccgtgtgcggctgtccagaaaacgtaatgaggatgaagattcaccaaataagctatatactttggttacctatgtacctgttaccactttcaaaaatctacagacagtcaatgtggatgagaactaatcgctgatcgtcagatcaaataaagttataaaattgccttc

SEQ ID NO: 124422 - DNA, 356 bp, Homo sapiens
cattatctaatgaacaaaggattttctcaaaatcctttcatatcttgttattctcaagtataaattgaagcttttaacttgtctttataatgtaacctcaatctcaaccctctaacccttctccatagcacttaatactgttattcctgaaacataaatattgctttgccagagaagaagaagaaaaatgaagaggagtaggaggagaagaggaagaagaggaggaagaagaagaggaaggagaggaggaagaagaagaaatctttaagtccatagtttattaaattggtaggaatcaggacataatttgtatctatgtaacatattcctaggattcatttctatagttattcagc

SEQ ID NO: 124423 - DNA, 1758 bp, Homo sapiens
atggctgtgatattagtttttcacttcatcataagtgtggatgccaagactgaaacttgttacccaccagcgctgctgcacagccagctgctggctcagaggcctggcctatggctgctcaagagaagtacaacggtgccctatttcctcatatcctattgccccataaaagcccctcattcctcacagcagcatccccaagtctcttatatgatccgtgatctttacattttgcccacagtcggcagggctggcaggcaccagctgtctgagccaccctgccgtgggaacgccaaccagccctcctcccccaacaaatcctaccccacaaattgtcaaaaaggcatcatgacagatagagctcccgcatgccacagaaggtgtcagatctcagttcaaaggttacaggaagacaagacccatttactcattttccagtatggcgggatgctgcatgcacaggatgctgtggccaagcatctcatgctgtcatcctttcctgaagactcccaggcatccctctggggaaggaggcagatttttaatgcatgtcagcatctcaacctctctcaagtccacggccacaaagaaagttttgctcagcctttttcaaagcattttgattcagagacttgtaactggaccacgtggcaggacattggagtctcaggattactggccacagttttggaatactgggccaagggaagataccgaaacatggagcagaccctccaggtaaaccagggtttgcaagcatatcaggacttagctgagacatatgggaccagacagagcaccagtcctcaggcccatggtcctatgggacttcaacagatcctgaactctacctcagatctggcagtcatagtctttgagaaaagaggaggaggagaagaagaagaagagaaggaagaagaagaagggaggaggagaagaagaagagaaggaagaagaggaggaggaggagaagagaagaagagaaggaagaagaagaagaggaggaggaggagaagaagagcacaggaagaggaggaggagaaaaaggaggaggaagaggaggaggaagaggagtggtgtctaggcgaggaggaatctcagcctggacatgctgaagaagtcccctcaccccacaagatgggggctctcactctgagagtggagggagtcaaggagcaagaagccaagctgctgagatcatcagaccttatgaagggagacttcagcagcacatcacagcatccaccacagtgcagcaaaagaactaactcggagagtaacgccgatgcaaaaagcaagaagaaggaaagaccgataatgaccttccgccaaaggaaaacattccgcattcgcatactccccctgccccagggccgcattgctgggagcaacaagctgagtgctaagctgtgcacagatgggaggggggctggtgatgtaggagtcctgacaaatgtcatgcttaaacgtcttcactttacgattgaccattttctgttcaagatcatccagatgtctccttccgccagttggaacctgtggagcttgctggatcaggattctctaaaatgccaaatatgtctggaaggatatgcccaaggaggaaagccagatgtccagctcttgcctccaagactcactgctgattggaagggacatcgatgggggcagatgatgggtttggatgagaaactcactcccagctcggtcatggtcacatcagtggcccttttctggttcgaggtcagcgctcaataa

SEQ ID NO: 124424 - DNA, 447 bp, Homo sapiens; identical to SEQ ID NO: 118719

SEQ ID NO: 124425 - DNA, 3800 bp, Homo sapiens
atgaatagacaattatcaaaagaagatatacaaatggccaacaaacatgaaaaaatgctcaacatcactaatgatcagggaaatgcaaatcaaaaccacaatgcaatacaaccttactcctgcaagaacggccataatcgaaaaatagatgttagcatgaacatggtgaacagggaacacttctacactgctgtccacaaagcctcagacctctctttcaaacctacatctgaaaaggatttggacacaaagttacaggctaactttccaaaccttgtcaaggcacctgacaaggcaaggatttgtttctgtgggaagccctatcagccctatgtccaggggagccctaattcccctgttgaaattgtggagaatgagccaagccaactcctacatttcctttgtgttggaagctcaaaagaagaaatagatctggggaaccccaaaggtagtcagcacacagggctggggcacagcatgggtaaatgcaactatttctacctgccaatcctcctagtccatggctggaagtcacacttgcatccgtgtgtggcatctatgaaggttgctgggacccagaggacacaggatcaggatgaagcccaggaaaaagagaagagagataagagaaaggcagaggctctagtggctgctcttcagacctataaaacacagaatccccaaggtgcacctgccaattgctacaagtgtggcaaactagggcactttaagaaggattgccacagcagcaagaggaagccacttgaccctgtccagcctgtggtggggacaactggaaggcagattgtccatggaggcataggaccagatggatttacagtcaaattctaccagaggtacaaaagggagctggtactactccttctgaagctattgcaaagaattgaaaagaagggactcctccctaactcattttatgaagccagcatcatcctaacactgaaacttggcagaaacacaacagtaaaaacaacaaaacttcaggccaatatccctgacgaagattggtgcaaaaatcctcaacaaagtactggcaaatcaaatgcagcagcacatcaaaaaacttatccaccacagtcaagtcagcttcatccctgggatgcaagactggttcaacatacacaagtcggaacatggatgaagctggaagccatcatcctcagcaaactaacacaggaagaagaaaaccaaacaccacacgttctcactcagacacaaccaaaaaagagaattttagaccaatatccttgatgaacattgatgcaaaaatcctcaataaaatactggcaaaacgaatccagcagcacatcaaaaagcttatccaccatgatcaagtgggcttcatccctgggatgcaaggctggttcaatatatgcaaatcaataaatgtaatccagcatataaacagagccaaagacaaaaaccacatgattatctcaatagatgcagaaaaggcctttgacaaaattcaacaacccttcctgctaaaaactctcaataaattaggtattgatgggtcgtatttcaaaataataagagctatctatgacaaacccacagccaatatcatactgaatgggcaaaaactggaagcattccctttgaaaactggcacaagacagagatgccctctctcaccactcctattcaacatagtgttggaagttctggccagggcaatcaggcaggagaaggaaataaagggtattcaattaggaaaagaggaagtcaaattgtccctgtttgcagacgacatgattgtatatctagaaaaccccactgtctcagcccaaaatctccttaagctgataagcaacttcagcaaagtctcaggatacaaaatcaatgtacaaaaatcacaagaattcttatacaccaacaacatacaaacagagagtcaaatcatgagtgaactcccattcacaattgcttcaaagagaataaaatacctaggaatccaacttacaagggatgtgaagaacctcttcaaggagaactacaaaccactgctcaatgaaataaaagaggatacaaacaaatggaagaacattccatgctcatgggtaggaagaatcaatatcgtgaaaatggccatactgcccaaggtaatttacagattcaatgccatccccatcaagctaccaatgcctttcttcacagaattggaaaaagctactttaaagttcatatggaaccaaaaaagagcccgcattgccaagtcaatcctaagccaaaagaacaaagctggaggcatcacactacctgacttcaaactatactacaaggctacagtaaccaaaacagcatggcttcagcacgcagtgccggctaatgatggcaccacaagatccccatcaatagacagcattcagaaggaccccagcgagtttgcctggcgtgatcctgagttgcctgaggtcattcacatccttcagcaccagttcccatctgttcaggcaaatgcagcagcctacctgcagcacctgtggtttggtgacaacaacgtgaagatgaaggtgtgtaggttatggggaatcaagcttctggtttaccttttgggccacagagttttggaagttcagaagaatgcttgtgatgcccttcgaaatctctttttcggcaagtctacaggtgaaaataaaataacaatgaaggatgttgccacattggatctgagtttcattctcagcaaactaacacaggaacagaaaaccaaatacctcattgttctcactcataagtgggagttgaacaatgagaacacagggacacggggaggggaacgtcacacacttgggcctgtcagggggtgggggcctaggggagggatggcattcggagaaatacctattgtagatgacaggttgatggatgtatcccagaacttaaagtataattttaaaaaaaaagagggagaagagggagaaggggaagaagaaggagaagaagaggaagaagaagagaagaaggagggggaggaggaggaggaagcttctggaggacccatcacaccaagcccaaggaccagcacaaaaaagacacaatgggccactttagaagctgtgctttccaagagggctttgtcgtccatgttcctctgctgtcttctgaaaagtaaagataagtgggaagaaaggtgggagctcctccagggagagctgccaaattcagctccagatacttttccagcccctttcacatttgcatggggccctgcaggatctgacctgctcgtggctacgaagcagcctcctccactctgcccctctgcctctccagacccagacctggctcctgctttgttcttattcagtaattgcaagctttctttggggcataggaaagagaagagggacgctgtggcttgccggggaagaaaacctttaaaagtcatccttgtgaattttggacagctgacttcttataaagagcttccctcctacgcgttgggcctaaagcccagtccctgggacagcactcatgcacctctggccctcccctatcactcccctgtctttcaagaaggcaaaagcaccagccttgcaatgggaatcttccagccagggcactttccttcagtaaaaaccctttgtgcccctgcaggcacttcctgtgaatcattgtccggccccggagctaccggctttgcaaactgcaggtttctgcaggaagccacagatgaggtgtgccaatctgcccaatctgctcagagacctggctccggaaaacccaatagtatgtgctgggaaaaaagtcaggccatctgggccccggtctga

SEQ ID NO: 124426 - DNA, 1537 bp, Homo sapiens
atgacgcaaaagaaaaaccaaacagagcagaaagagcaaaaaaacgaacaaaaaaaacaacacaacgaacgaaaagaacacaagaagaaacaaacagaatacaaaacacacgagacaaacagacccaggaaaacagaaagagcggagcacgacgaacaaaaaagagagaacgagggaaaaaggagacgacacaagaaacggacagtgagaggaaaaaaacgaacgaagagacagagacacggaaaggaagggagaagccagaacaagcaagacaagccagaaaagagaaacaaaagagacaacggggggaaagacaaaacagaagagaaaaaaagaaaaaacaacagacaagaaaacgaagaggaagaagcgaacgagcaagacagaagagaacaaaaagaggaaacaagaaaaagaggaccgagaaagagacgagagcacaaagaggaggaaggaaggagagagagaaagaagaggaaacgcaagacgaaggaaaaagggcggagagcacagcaaaaagagaggagagaggaggaacaacagcaaaggagaaggagaagaagaggaaagaggaagaaaaacgaaagcgaagacgaggaggacaaggcaagcaacaaacacagacagcaagaacgagaaaggcagaaaaggaaaggggcagacgcgggcgcgcagaccagcagaaacagggaggaggagaagaaaaagaaagagacagaggaaagcaggcgaaacaacgccaggagagacagggagatggtgtgcttccgtgcgctccgtggacggctcacccacgacagccttcacagtgctggagtgcgagggctcccggcggctcggctcatcggccccggcgctacctgctcactggccaggccaacggcagcttggccatgtgggacctaaccaccgccattggacggcctcggccaggcccctgcaggtggcctgacggagcaagagctgatggaacagctggaacactgtgagctggccccgccggctggcttcaagctccctcaatggggctgtctccccaagcccctcaccccgcatctccctcaccaagcctccactcaagcctccagcaacacctcctttgtctggccaaccgtggggagccccaaagcccccccggcaggcttgaggccccggcggccgtgggtggggggaagctttgtggaacgcttgccaggaactggtgcggagtgggccagacctccgacggccacccacaccaagccccgtggccctccaagcggtctcgggactcccctcacaccttccaagaatgaagctcaatgaaacttccttttgaacaacgcagctgccatgatgccttgggatgccctggtcctgggggaatcaggtgcctccctgattcctgtgggaaccccgggttcagggccagggcctccttggaataaatggttattgttactaggtccccaccttccctcttttttggaagccaaagtcagcctccccaataaagtcctcactgccaaaaaaaaaaaaaaaaaaaaaaaaaaagggc

SEQ ID NO: 124427 - DNA, 1368 bp, Homo sapiens
atggagacgtggggagactggaggccgaggcttggggacccgactgtcatcagggtcttccgccagaccctgggcgctgcgccctcagaggccgatgaaaagaagcagaagggagagccctcgcgaggctcctgggtcccagcgaggagaggtttgcggcccacgaggggatgaggcccatgcgggccgtcttcacgcgccagggccatatcttcaccacgggcttcacccgcatgagccagcgagagctgggcctgtgggacccgaacaacttcgaggagccagtggcactgcaggagatggacacaagcaacggggtcctattgcccttttacgatcccgactccagcatcgtctacctgtgtggcaaggtgctcacggccgggcagggagaacagggcactggatggagatgtggagggccttgtccgggcgcgcccctgaaccgactgattttgcagggcgacagcagcattcggtactttgagattaccgacgagccgcctttcgtgcactacctgaacacgttcagcagcaaagagccgcagcgaggcatcgggtttcatgcccaaaaggggactggatgtcagcaagtgtgagatcgcccggttctacaagctacacgaaagaaagtgtgaacctatcatcatgactgtgcacccgcaaggtgagggcctgggatcgagacctcggtcgcaggagcgatgctgtaccccggatacgccagggcccggagccggccctagaagcggacgaatggctatccggccagggacgccgaaacccgtgctcattttcgctgaggggacggctattgttgccccccaacgcaccgcgacgctccgggtcacgaagcgcaacatcctggacgtgcgcccgccctccggcccccgccgcaagccaagtcggccagcgacgcccccttgtcgcagcagcacacccttggagacgctgctggaagagatcaagcccctccgcgagcgggtgcaggcccaggagcagcgcatcacggctctggagaacatgctgtgcgagctggtggacggcccgcactacccccgtgcgccaggcagggcgagcgggctacctactgatcctttcggtggagctgtgcgccgtgcctgcccggtgccacctcctctcgtgcccctggcccgtgctgtgcgaaccttgcccctccgctacgcttcgtcgatagccgcactagtggaacggatgaaggcgcacatgtgggccaaaggacgagcaacccgagatgcaacagcaaagcggtgctccccgatggcgcagaccactacacagcacctgcacgtcccctgcgatcgcgaagatgagagccgctggaactacatctgctgtagtagttaa

SEQ ID NO: 124428 - DNA, 399 bp, Homo sapiens
atgattaatccaaatccagagcgttctgacgatttggttttctggggcctcttccgtgccggtggtatgtggagcgccatcattgcgccggtgatgatcctgctggtgggtattctgctgccactggggttgtttccgggtgatgcgctgagctacgagcgcgttctggcgttcgcgcagagcttcattggtcgcgtattcctgttcctgatgatcgttctgccgctgtggtgtggattacaccgtatgcaccacgcgatgcacgatctgaaaatccacgtacctgcgggcaaatgggttattttacggtctggctgctatcctgacagttgtcacgctgattggtgtcgttacaatctaacacaacgccaatgtaaatccgacgaaatcgtcggcgcg

SEQ ID NO: 124429 - DNA, 582 bp, Homo sapiens
  misc_feature (1)...(582): n = a,t,c or g
gacgntgntgctgacggggtgacgttctctgttccggtcacaccacatacgttccgctattactatgcgatgcacatgctgtatgccggtataccgctgaaagttctgcaaagcctgatgggacataagtccatcagctcaacggaaggctacacgaaggtttttgcgctggatgtggctgcccggcaccgggtgcagattgcgatgccggagtctgatgcggctgcgatgctgaaacaattatcctgataataaatgccttggcctttatatggaaatggggaactgataggatatgctgtttttgtctgttacacaaagaagccggcctgtaatccactgataacgctaaccaaacaggtcggcaaaaatgtcccaatattcggggagaaaccgcgttaactaaccccaggggctgtgggtgcggtacttgtgcacgaattgtatttccatgaatcttgcccccggtatgcaggaactaatttaattgtctctttgctacatataagttctccagtgttttagtcaattagttacaattttgcccaatttatggctacaattttgggacctatgcctgcg

SEQ ID NO: 124430 - DNA, 665 bp, Homo sapiens
atagggcgaattcgagctcggtacccggggatcctctagagtcgacctgcaggcatgcaagcttgagtattctatagtgagtcgtattagagcttggcgtaatcatggtcatagctgtttcctgtgtgaaattgttatccgctcacaattccacacaacatacgagccggaagcataaagtgtaaagcctggggtgcctaatgagtgagctaactcacattaattgcgttggcgctcactgcccgctttccagtcgggaaacctgtcggtgccagctgcattaatgaatcgggccaacgcgcggggagaggcggtttgcgtattggggcgctcttcccgcttcctcgctcactgactcgctgcgctcggtcgttcggctgcggcgagcggtatcagctcactcaaaggcgggtaatacggttatccacagaatcaggggataacgcaggaaagaacatgtgagcaaaaggccagcaaaaggccaggaaccgtaaaaaggccgcgttgctggcgtttttccataggctccgcccccctgacgagcatcacaaaaatcgacgctcaagtcaagaggtggcgaaacccgacaggactataaagataccaggcgtttccccctggaagctccctcgtgcgctctcctgttcccgaaccctgccgcctta

SEQ ID NO: 124431 - DNA, 793 bp, Homo sapiens
  misc_feature (1)...(793): n = a,t,c or g
tggtcgcattgggtcacccagcaaatcgcgctgttagcgggcccattaagttctgtctcggcgcgtctgcgtctggctggctggcataaatatctcactcgcaatcaaattcagccgatagcgggaacggggaaggcgactggagtgccatgtccggttttcaacaaaccatgcaaatgctgaatgagggcatcgttcccactgcgatgctggttgcccaacgatccagaatggcgctgggcgcaatgcgcgcccattaccgaagtccgggctgcgcgttggtgccggatatcctccgggtagtgggataccgacgataccgaagacagctcatgttatatccccgcgctttaaccacccatcaaacaggattttcgcctgctggggcaaacccagcgtggaccgcttgcttgcaactctctcagggccaggcggtgaagggcaatcagctgttgcccgtctcacttggtgaaaagaaaaaccaccctggcgcccaatacgcaaaccgcctctccccgcgcgttggccgattcattaatgcagctggcacgacaggtttcccgactggaaagcgggcagtgagcgcaacgcaattaatgtgagttagctcactcattaggcaccccaggctttacactttatgcttccggctcgtatgttgtgtggaattgtgagcggataacaatttcacacaggaaacagctatgaccatgattacgccaagctntaatacgactcactatagggaaagctggtacgcctgcaggtaccggtccggaattcccgggtcgac

SEQ ID NO: 124432 - DNA, 869 bp, Homo sapiens
ttcagttcagggaccgtacccggagatcgtccggaccgggaatttattggcgataccctcatggagcggcgtaaccgtcgcacaggaaggacagagaaagcgcggatctgggagacggcgaacacactggcgataaccatgcttatgtcgacttgcgatgccagccgctgctgctgacggtgtgacgttctctgttccggtcacaccacatacgttccgccattcctatgcgatgcacatgctgtatgcccggtataccgctgaaaggtctgcaaagcctgatgggacataagtgcatcaggtcaacgggaaggctaccccaaaggtttttgggcctggaatggggcttgcccgggcacccggggggcaggttggcaatggccgaagtctgatgcggttgggaatgcctaaaacaataaccttgggataaatggccttggcctttatatggaaatgtggaactgagtggataatgctgttttttggctgctaaaaaaagaagctgggctgttgtcctgcaaggagatataagttgcgggtcgggcaggtctcccattattggggaagatccggattatttaatctaaggaccctggggtacgcttataggaagtagtgttctgtcatgatgcctgcaagcggtaacgaaaacgatttgaatatgccttcaggaacaatagaaatcttcgtgcggtgttacgttgaagtggagcggattatgtcagcaatggacagaacaacctaatgaacacagaaccatgatgtggtctgtccttttacagccagtagtgctcgccgcagtccagcgacagggcgaagccctcgagtgagcgagggagcacccaggaacagcacttatatattctggg

SEQ ID NO: 124433 - DNA, 891 bp, Homo sapiens
tatttcttgatgtctctgaccagacacccatccaacagtattattttctcccatgaagacggtacgcgactgggcgtggagcatctggtcgcattgggtcacccagcaaatcggcgctgttagcgggcccattaagttctgtctcgggcgcgtctgcgtctggctggcttggcataattttctcactggcaattcaaattcagccgatagcgggaacggggaaggcgactggagtgccatgtccggttttcaacaaacccctgcaaatgctgaatgagggcatcgttccccactggcgattgctggttgcccaacgatccagaatggcgctgggccgcaatgcgccgccattacccgagtccgggctgcgcgttggtgcggatatcctccgggtagtgggataccgacgatacccgaagacagcttcatgttatatccccgcgctttaaccacccatcaaacaggattttcgcctgcttggggcaaacccagcgtggaccgcttgcttgcaactctctcagggccaggcggtgaagggcaatacagctgttgcccgtctcacttggtgaaaaaaaaaaccaccctggcgcccaatacgcaaaccgcctctccccgcgcgttggccgattcattaatgcagctggcacgacaggtttcccgactggaaagcgggcagtgagcgcaacgcaattaatgtgagttagctcactcattaggcaccccaggctttacactttatgcttccggctcagtatgttgtgtggaattgtgagcggataacaatttcacacaggaaacagctatgaccatgattacgccaagctcttaatacgactcactatagggaaagcgtggtacgcctgcaggtaccggtccaggattcccggctct

SEQ ID NO: 124434 - DNA, 849 bp, Homo sapiens
ttccgtacaggtatttattcgcgataagctcatggagcggcgtaaccgtcgcacaggaaggacagagaaagcgcggatttggggaagtgacggacagaacggtcaggacctgcgattgtggaggcgggttgccagccgctgctgctgacggtgtgacgtttttttgttcggctccccccaacatacggttccgcccattcctatgcgaatgcacatgctgtatgcccggtaatacccgctgaaaggtctgctaagcccgatcggcacataagtgcatcaggtcaacgggaaggctaccccaaaggtttttgggcctggaatggggcttgcccgggcacccggggggcaggttggcaatggccgaagtctgatgcggttgggaatgcctaaaacaataaccttgggataaatggccttggccttatattggaaatgggaaaccggaggggatatgctgcttttgtctgttaaacagaagaagctgggctgttatccccttgagaagcgaccgaaacagtcggggaaaatttgccattattgcgaagaatcccgtttattattcttaggagcctgtgtagcgtttataggaaagaatggttctgtcatgatgcctgcaagccggtaacgaaaacgatttgaatatgccttcaggaacaatagaaatcttcgtgcggtgttacgttgaagtggagcggattatgtcagcaatggacagaacaacctaatgaacacagaaccatgatgtggtctgtccttttacagccagtagtgctcgccgcagtccagcgacagggcgaagccctcgagtgagcgagggagcacccaggaacagcacttatatattctggg

SEQ ID NO: 124435 - DNA, 508 bp, Homo sapiens
ggacaggatgcccaggcccaccttggggtgtttgtggggcacacatcgcacctctgttcaggtcccttgaggttgcccccagaggggaggctacccgtttcccaagtcagccgtatgaggggcgtgtcacacccaggaggtggggcagcagcgaatgcttgcaggcagatgtaccctaacccttgtaggagttaggggtgtcattggaggctggctgctggctctgccctcgctgttccccctgggtgtcctggaattccacttggtcaccctgacccatgtcccccacagccagcagcgatgacatgaccctcaccagccccagcatggacaactccagcgcagagctacttcccagcggggactcgccactgaaccagaggatgacggagaacctgctggccagcctgtcggagcatgaacgcgcagccatcctcagtgtacccgcagcccagaaccctgaggacctccgcatgtttgccaggctccttcactacttccgcggccg

SEQ ID NO: 124436 - DNA, 1716 bp, Homo sapiens
ttagttgccgctccgtagccccctcatgacagactgccggcccttcccccgtcttggaggttccccagccccactttccgcgttatgagccaatagtcctttgatcgcagcagcgtccacctggtctctgttgtccgtgggcggcgggcgcttggggaaggcggacgggaagaaggcgcccccgctgtcttggggccactgcttggccccaaggatccttgcaccgaccccagggtctagggcggcttcacggtgatgtaacaggctggcaagcccgttgagtaacagagcattaaacgtttcgggatcggtcacgttgcaggcgtgtccgccatagggcatcaccattttctggctatcgggcagggcggcatgaagttcactggaacatgctgttggcaccagcagatcatcactggcgcagatgatttgcaccggacagcggatgcgatccgcatggtgactagagcactctgtatatggtccactgttagttgcttccttggcctttaacaaccagcttttgttcaggcttgtggcaaagtcagaagttaattcccagcagtgcttcttcaacaaaggcctgaagagatttatgtacaacgagaacacgcggcgctccaagctgctcatgctgtttgacaagttccgcagcgtgttggtggtgaccacccacgaggaccctgtcattgccgtcttcaaggctttgctcccttgggccccaggcggagggcggaaggctgcacgccccggtaaccactgataccccgcctccagcgaggcgataatccccgacgagtggtaatgatctgtgccatcttcttgttcggaaacatcattgctaaaccacgcgtattgcagccagctatccagccaggccccttgcttctgattaccgtgctgaaaccagcttgatgtcagcccaacggcataaccgtggttctggttatcggcgcgagttccggtcatattcgagcggctgtcgccctggttatcgctgtagccaccaacaatcccaagcatccactcgccatccgtgccccagcgcccgctaaacagatcgccgctaagttgcaccgtagaagtgtcttcatgttgagccagttgccccgctgctgtgtaatgataatctccgccgataacacgtaaattcagcgtctgaccatccaacccctcccctttgaaggggttaaaggaaaacattccggggggcgggattttccccggggggggcaaatctttaacggttgttgggggaattgaaaaaagcttaccggtacgggtcgcgggcaagggtgtatatccggcgcttggcgcaaaaagtgaaagttgacgcccaaaaccggtcgtgaaaccattatcgtccacgaaattccgtatcaggtaacaaaagcgcgcctgatcgagaagattgcggaactggtaaaagaaaaacgcgtgaaaggcatcagcgcgctgcgtgacgagtctgacaaagacggtatgcgcatcgtgattgaagtgaaacgcgatgcggtcggtgaagttgtgctcaacaacctctactcccagacccagttgcaggtttctttcggtatcaacatggtggcattgcaccatggtcagccgaagatcatgaacctgaaagacatcatcgcggcgtttgttcgtcaccgccgtgaagtggtgacccgtcgtactattttcgaactgcgtaaagctcgcgatcgtgctcat

SEQ ID NO: 124437 - DNA, 1545 bp, Homo sapiens
atgcagcacctgtctcacggttcccgaaggcacattctcatctctgaaaacttccgtggatgtcaagaccaggcagtttcccagacattactcacccgtccgccactcgtcagcaaagaagcaagcttcttcctgttaccgttcgacttgcatgtgttaggcctgccgccagcgttcaatctgagccatgatcaaactcttcaatttaaaagtttgacgctggtgacctccgtgcgagtccccctggaagtagctcgccctggattgtccatgctggggctgctgaggttcatgtcatcgctgctggctgtgggggacatgggtcagggtgaccaagtggaattccaggacaccaaggggaacagcgagggcagagccagcagccagcctccaatgacacccctaactcctacaagggttaggcggtgccctgggggtcctacttggggagccaaagctgagggcgttgggcgtgctgaggctgcgaccgccgacccgggcagtgaaggggacgtcgtcctctcgcggacggggctcctcctcgctgggctccttcactacttccgcggccgccaccacctggaggagattatgtacaacgagaacacgcggcgctcccagctgctcatgctgtttgacaagttccgcagcgtgctggttggtgaccacccacgaggaccctgtcattgccgtcttccaggctctgctcccctgagcccaggcggagggcggaaggctgctggggtgcgcaggtgggcgctcgcgtctccccaccccagggctccccccgtgctgaggctgagccctcttggccctgaggcctggcattgggtggatgcgggctggccgtggcccactgaagcctgcagagccccggctgtccttgcccctggtggttccgctgtggggctgctgcctgctgtgttcctacgcttccctccagtccttgccgcacgcgtaggcatctccacgctggaggggggcctgccaggactcctgtctctggggtgaaggcccgcatcccttcaaggccccatgtgggctgtgcgtttcctcagacccctcccttctgtccctacacctgctccttggacccccccagtctgtggccaccctgaagaatgtgcagaaacacttgtgtgggcctgtccctgtctctctgacagccttccacagtccacagaagccacaaacaggctcatagccaagctgtgacctggtcctgaccatctggggcacgaaggccttgggctgccctggtagggcttgaaaaccccttgacccttgcacacacttgttggggggaggcttggcccattgtgcaggaaccccaccctcggggggctttgggtttccacactgattgattctccccaggatccacaccgggcctggcgcttcgtactcaggcccccagctcttgtgttcctggagaagagctagctccagacatgggttgtcacctagaagactctggcttagggcccagtttctagaaataaacatttaattcgtttttaacaattaaaaaaacttgtctgggca

SEQ ID NO: 124438 - DNA, 765 bp, Homo sapiens
tgctcccctgccctagtgcgggtgatcagaccacatctgctgtgaaagaacctgcaggcagctagcccaagatgcggacctggccttgctgcaggttttccagcttgcagctcatctgggtgtactggggcaggcccatcatcatctacgcgctgtgtgagaacaacggtctacatgctgtctcccaatgccagcgtatgtctgtactcccccgctggccgagcagttctcccaccagtttccattctcatgacctgccgtccgttcttgccaatttctccttgccggttttcctttgtcagaattttaggaatcccctggccccccgctgtgccaggagaccccagctcatcccagatggtggtgtggaatgctgcagcgccgggcttctcatccagctgcaacacctatgtcctgcctgatggcctcacccagcgaaggaggagccccgtccgccgagaggacgacgtccccttcacatgcccgggtcggcggtcgcagcctcagcacgccccaacgccctcagctttggctccccaaccagcagcgatgacatgaccctcacccagcccccagcatggacaactccagcgcagagctacttcccagcggggactcgccactgaaccagaggatgacggagaacctgtttggcctagcctgtcggagcatgaacgcgcaaccatcctcacgcgtacccgcagcccagaaccctgaggacctccgcatgtttgcccaggctccttcactacttccgcggccgct

SEQ ID NO: 124439 - DNA, 2334 bp, Homo sapiens
atggtggagtggttgcatcaccgcgggttgacgctggcgacggcgcaaagtgacgatttgcaggcattactggcagaacggctggagggcgggtataaagccaccagctcagcgcgtttgctgagtgcagtgcgccgattgttccagtatctttatcgcgaaaagtttcgtgaagacgatcccagtgcgcatctcgcttcaccgaaattgccccagcgtttgccaaaagatttaagcgaagcgcaggtcgaacgtttattacaggcaccattaatcgatcagccactggagctacgcgataaagccatgcttgaagtgttgtatgctaccgggctgcgtgtctctgaactggtcggactgacaatgagtgatatcagcctgcgtcagggcgtggtacgggtcattggtaaaggcaacaaagagcgtctggtgccgttaggtgaagaggcggtttactggctggaaaccatacggaaaaagggtcaagcacccacaacctggttggctgcacctcgagcagcgttgattgggtttaaccagcaggcccaccagttggcttcgattccggtgttcatgcgcatcaaacaacagctgttgtttatttcaaagatgaacgtgcagcttttagcagcctggcaagagctgtgtcaaagtgacctatccctggaccggcagcttaccggactctatgatgccttgcttggtgcttggcacacacaaatccagtgggctacacagggtttcaggcatggctgtaagcggaacaccattaaaccggacgtcgtgatcgtgttgaatacccccgaagcgggagatgttccgggcattgataccattaaatacccgctaaacttgggccaggggcggggcttgatgctgtttgacaagcgctacttccccaaccagaaattggtagcagcgttaaaaagctgtgccgcacataacgatttaccgctgcaattttccaccatgaaaaccggtgcgacggatggcgggcgctacaacgtgatgggcggcgggcgtccggttgtcgcgctgtgtctgccaactcgttatctgcacgccaacagcggtatgatttcaaaagccgattacgaagctctgctcacgctgatacggggttttctgacgaccttaactgcggagaaagtcaacgcgtttagccagttccgtcagattgtcgatctgctggagcaacagccgcgcacgcctggcgagctggcgcaacagactggcgtttcaggcaggaccatcctgcgtgatattgactatctcaacttcacccttaacggcaaagcccgcattttcgccagtggcagtgcgggctatcagctggaaatcttcgagcgccgcagcttttttcagttgctgcaaaagcacgatagggtacaccacttaaaacgatacccattgtacatgtggaaattaccccttatagaaacgcaggggaaaagcaccaatgtgttacagccgggcgcgatgtttgttctaatccggcgtatgtttgttagcggagaagacggcgattatcacaactggaccggttgcggcaacacgctcaatttgagtcatccggcggtggtggattacgccagcgcctgcctgcgttattgggtagtaacctgccacgtcgatggtttccgctttgatctggcggcagtcatgggccgtacgccagagttccgtcaggatgcgccgttgtttaccgctatccagaactgcccggtgctctcgcaggtgaagttaattgctcacccgtgggatatcgctcctggtggtaatcaggcctacaactgttgccgacccgtaggccggataaggcgctcgcgccgcatccggcagtgtttacccgcggcgactcaaaatttctttctcataagcccgcacgctctccagccattcgctacctgctggcgtatcgtgacgttggcaatacatttcccagaccgcctgccacggcaacgatttctgctcttccagcagtgccagacgcgcagtgtaatcgcccgccgcttccagcttgcgcagctcagcggtaggttccagcaacgcacgcagcagggcttttttcatattgcgtgtaccaatgacccacgcggcaatgcggttgatagaggcatcgaagaagtcaaggccgatatgcacccggtcaaacagatcgtgacgcacaatctcactggcaattgcctgggtttcatcatccagcagcactacgtgatcgctgtcccagcgaaccggacggctgacaataccttcatccccgtgaatcccggaaagataaccaaggagtatcccatgacctttgtaggcaaagaatgcactgagttaagataa

SEQ ID NO: 124440 - DNA, 826 bp, Homo sapiens
atgacgacctccaggtcagacacaaggtcacaggacgatcccagtgcgcatctcgcttcaccgaaattgccccagcgtttgccaaaagatttaagcgaagcgcaggtcgaacgtttattacaggcaccattaatcgatcagccactggagctacgcgataaagccatgcttgaagtgttgtatgctaccggcgctgcgtgtctctgaactggtcggactgacaatgagtgatatcagcctgcgtcagggcgtggtccgggtcattggtaaaggcaacaaagagcgtttggtgccgttaggcgaagaggcaggttcactggctggaaacctatctggaacatgggcgtccgtgtctactgaatggtgtgccaattaacgtgttgtttcccagccagcgtgcgcagcagattacgcgacaggccttatggcgccgtattaaccattatgatgagctgggcgggtatagacagcgaaaagctgtcaccgcatgtggtgcgtcacgcttttgccacttattttgcggggtcgggcgggtgtattgctgatttctgcgggggctcatgcgctggctcgagtgctgctgaatcctgtctatggtttgcgggaacgggtctctacctacatcatgcttgggtcagtggcgtctggagccgagagtgctctggggcagcatggagggacagacgggatgtgggaggaggggagtgagcttccaaggaatgagggggctgaagggagagcaggaggacatgtgagtgggcagaagcttgagtctgaatctccaggaggctccacagtgtcttcgggatctgctgatcttcaataa

SEQ ID NO: 124441 - DNA, 1341 bp, Homo sapiens
atggtaggagtgctggaggaatcaaacaaagcacctaagaaccagggacttatgtttacaatgaaacagacaagtcacacagtccctgtaggccctgtgtcctcctcagctaataaggcatctatctggggagtgtatgaagatgaaatggaatcacatatggagcgctgttggcgcatatcccaaacaagttccaagttgactattaatagtcaaggagaaggaaaggctaaacagaagctggagtgtggaactttatcaatagtcctcagatcctgtgagaaaaaccaggaaaggattaaagctgcagagaaaaggaataggagttggacaaccctctgcgggcttggcgcatggcgccccctgctgtttgaggttgaaatgttccttcttgcctatgctgtgcgccacaccatccaggtgtaccggctctccaagtacaacacggaagaattcatcacagtctaccccaccgacccacccaaggactggccagtggtaacgctcattgctgaggacgatcggcactataacatccccgtcagagagacctttgaggacgtattctctgaccgctcccttcgcaaagtgccctggtacgtgctagccggaaaccatgaccaccttggcaatgtctctgcccagattgcatactctaagatctccaagcgctggaacttccccagccctttctaccgcctgcacttcaagatcccacagaccaatgtgtctgtggccattattatgctggacacagtgacactatgtggcaactcagatgacttcctcagccagcaggctgagagggcccgagaccaacttagcccgtttgaagtgcgccgctggcagcaggaattaaacagtccgaacgagcaaattcgccagctcgccattgatgaaattggcctgatgctcaagcgatttagcctctctggctgggaaccgattctggtcaataaaacctcgcgcacacacaaaaacagcgtctcgcgccatgcgcaattttatgttagccagatgctgggctttattgccgaaaactatgatcaggcgctgaccatcaacgatgtggctgagcacgtcaaacttaacgccaactatgcaatggggatattccagcgggtcatgcaattgacgatgaaacagtacattaccgcgatgcgcatcaaccacgttcgcgcgttactgagcgataccgataaaagtattctcgatattgccctgacgggaggctttcgttcaagtagtcgtttttacagcacgttcggcaaatatgtcggcatgtcgccgcaacaataccgcaaacttagccaacagcgccgccagacgttttcccgctaa

SEQ ID NO: 124442 - DNA, 930 bp, Homo sapiens
agcatggacccatgctggcattctcttaaaacacaaatacagtttcctggtgggatgtgcctcaatctcagatgtcatagctcaggttgtttttgtagccattttgcttcaccagtcacctggaatgccgggagcccctgctcatcccgatcgctctccttgtacatgggcgcacttgtgcgctgcaccaccctgtgcctgggctactacaagaacattcacgacatcatccctgacagaagtggcccggagctgtggggagatgcaacaataagaaagatgctgagcttctggtggcctttggctctaattctggccacacagagaatcagacggcctattgtcaacctctttgtttcccggcaccttggaggcagttctgcagccacagaggcagtggcgatttttgacagccacataccctgtggtccacatgccatacggctggttgacggaaatccgtgctgtgtatcctgctttcgacaagaataaccccagcaacaaactggtgagcacgagcaacacagtcacggcagcccacatcaagaagttcaccttcgtctgcatggctctgtcactcacgctctgtttcgtgatgttttgggacacccaacgtgtctgaggaaaatctttgatagacatcatcgggagtggactttggcctttgcaggaactctgtgttgtttcctttgtggatcttctccttcttcccagttccagtcacagtgagggcgcatctcaccgggtggctgatgacacttgaagaaaaccttcgtccttgcccccagctcttgtgctgcggatcatcgtcctcatcgccagcctcgtgggtcctaccctaacctgggggtgcacggtgcgaccctggggcgtgggcttcctcctgggcgggcttttgtggggagaattccaccatgggtcggccattgg

SEQ ID NO: 124443 - DNA, 1972 bp, Homo sapiens
ggagatgcaacaataagaaagatgctgagcttctggtggcctttggctctaattctggccacacagagaatcagtcggcctattgtcaacctctttgtttcccgggaccttggtggcagttctgcagccacagaggcagtggcgattttgacagccacataccctgtgggtcacatgccatacggctggttgacggaaatccgtgctgtgtatcctgctttcgacaagaataaccccagcaacaaactggtgagcacgagcaacacagtcacggcagcccacatcaagaagttcaccttcgtctgcatggctctgtcactcacgcttaaagacagtgtacagaaaccagacatcagcctgacggggcgcttagtccagacactcccgacacgcatgcgccatcaacgtggagaaagcaaagatgtggcgcctctggcctcttggctttccgagcccagcaccagctcggaggcttcccaaacaagttccaagttgactattaatagtcaaggagaaggaaaggctaaacagaagctggagtgtggaactttatcaatagtcctcagatcctgtgagaaaaaccaggaaaggattaaagctgcagagaaaaggaataggagttggacaaccctctgcgggcttggcgcatggcgccccctgctgtttgagttacctgtgattgttcaaaccccagatcagactaaccgcttccagttccgataccccgcgaagacccagtctgggctttgtagttttttccatagttttgacctcctcacattggaggcctttgtcaaagtctggtttcctggttgcctgctcattttgattgagtatgcctcatccaaaaatcgaaaatccaaaatgctccaaaatctgaaacttttgagcgctgacatgactctcaaactctgtttcgtgatgttttggacacccaacgtgtctgagaaaatcttgatagacatcatcaggagtggactttgcctttgcagaactctgtgttgttcctttgcggatcttctccttcttcccagttccagtcacagtgagggcgcatctcaccgggttgtctgatgacactgaattatatccttcgtccttgcccccagctctgtgctgcggatcatcgtccctcatcgcccagcctcgtgggtcctaccctaccctgggggtgcacggtgcgaccctgggcgtgggcttccctcctggcgggctttgtgggagaatccaccatggtcgcccatcgctacgtgctatgtctaccggaagcagaaaaagaagatggagaatgagtcggccacggagggggaaagactctgccatgacagacatgcctccgacagaggaggtgacagacatcgtgggaaatgagagaggagaatgaataaggcacgggacgccatgggcactgcagggacagtcagtcaggatgacacttcggcatcatctcttccctctcccatagtattttgttccctttttttttgttttgttttggtaatgaaagaggccttgatttaaaggtttcgtgtcaattctctaggcatactgggtatgctcacactgacgggggggacctagtgaatggtctttactgttgctatgtaaaaacaaacggaaacaactgacttcataccctcctgcctcacggaaaacccaaaaggacacagctggcctcacggtttgacgttgtgtcctcctcccctgggacaatctcctcttggaaccaaaggactgcagctgtgccatcgcgcctcggtcaccctgcacagcaggccacagactctcctgtcccccttcatcgctcttaaggaatcaacaggttaaaactcgggttcctttggatttgcttcccagtcacatggccgtacaaagagatgggagccccggtggcctcttaaatttcccttccgccacggagttcgaaaccatctactccacacatggcagggaggcgggtggcacgctgcag

SEQ ID NO: 124444 - DNA, 558 bp, Homo sapiens
atgccgttcccacaaaatgcccagaccgcaattgaagttgaagaaactattcgtaaacagggcgctgtacctgccacgatcgccattattggtacagccctgtggagcgtattgcctacaatgttgaagcagcgcgtgatagaacagcgtaccgacctggacaagctggtcatcgaaatggaaaccaacggcacaatcgatcctgaagaggcgattcgtcgtgcggcaaccattctggctgaacaactggaagctttcgttgacttacgtgatgtacgtcagcctgaagtgaaagaagagaaaccagagttcgatccgatcctgctgcgccctggtggacgatctggaattgactgtccgctctgctaactgccttaaagcagaagctatccactatatcggtgatctggtacagcgtaccgaggttgagctccttaaaacgcctaaccttggtaaaaaatctcttactgagattaaagacgtgctggcttcccgtggactgtctctgggcatgcgcctggaaaactggccaccggcaagcatcgctgacgagtaacc

SEQ ID NO: 124445 - DNA, 787 bp, Homo sapiens
cataaacatcaaaatcgaagtactttttcgctaatttctcgtaagtaccgtcagcgcgcatttcggcaaaggctttgttcagtgcttcgcgcagttcgttatcttctttacgcaggcccatgccggtccctacgccaaacagtttttcatctttaacagacgggccaccgaatttgtaatctttaccgacaggttgtttgaggaaaccttcgctggcagcgacctcatcctggaacgcggcatcaatacgtccggcagtcaggtcagaataaatgttgtcctgcccctgatacgagacgatttcaatgccttttggtgcccaatgttcattaccgaacgtctcctgggtggtgccctgcaatacgcctacccgtttgcctttcagcgactcgactgtcggctgaatgtcagaatttttcgccaccaccaaacgagaatcggcagcgtacagtttgtcggtgaaggctatttcttgctgacgtttttccgtaatggaaagcgatgacatgatggcgtcaatcttcttcgcttttaaggacgggattaacccgattacgcggaaaatgcccatgttatgccgccggtggtgattgaagatgcttccgatatgctgctggcaatcactcaggcaggccgtatgttgatgttcccggtaagtgatctgccgcagctgtcgaagggcaaaggcaacaagattatcaacattccatcggcagaagccgcgcgtggagaagatggtctggcgcaattgtacgttctgccgccgcaaagcacgctgaccattcat

SEQ ID NO: 124446 - DNA, 1216 bp, Homo sapiens
tcaatgctctgcacgttttgctgatgcaggcgatcgacgtgggcgaacaaagaacaggccattgtgatgaatgttcagcgccagcccggtgctaacattatctccaccgccgacagcattcggcagattcaccgggctcgtcgtggacgtcctgtctatgcgcaacccgtctcgccgcgggtatcttacaacacaccaaatctggctggacgcgcggcgtccacgttcgccagtgactttctgtaactcttccgggcgcagtttaattttgcgtttcccaacatgaatggtcagcgtgctttgcggcggcagaacgtacaattgcgccagaccatcttctccacgcgcggcttctgccgatggaatgttgataatcttgttgcctttgcccttcgacagctgcggcagatcacttaccgggaacatcaacatacggcctgcctgagtgattgccagcagcatatcggaagcatcttcaatcaccaccggcggcataacatgggcattttccggtaaggtgatcaaagccttacctgcacggttacgcgccaccagatcgttaaaggtgcagacgaaaccgtaacccgcatcggaagccatcagcagtttctgatcgtcgctttccatcagcatatggtcaacggtcgccccaggcggcaacgttaatttgccggtgagcggctcgccctgaccacgcgccgacggcagcgtaatcgggtcaatggcatagctacgaccggtggaatcaacaaacactaccggttggttgctcttacctttcaccgccgctttgaagctatcacccgctttataattcaggcccggcgcgtccgatatcatggcctttagcgctgcgtacccagcccatctgcgacagcacaatggtgacaggttcagacggcagcatgtcgtgctcgctcatcgctttcgcttcttcgcgttccgaagcttgcgcgtctgcctgcagttctttcttcagcaggttattcattttacgctcggaagccaaaatgccctgcaactggtcgcgctctttttccagttcactctgctcaccgcgaatcttcatctcttccagtttggcaagatgacgcagtttcagttcggagatcgcatcctccaggcacctcaagctcaccccaggaatcacagcctttgcatgtgttgccttcttgtcctgggtgctgtcccctgcttcttcacatggctgggccat

SEQ ID NO: 124447 - DNA, 714 bp, Homo sapiens
atgaatccgcaagaagccaactacgcctatttacgcggtgagtggaactggttcgtctgccggatgcagaaggccgtatcgctgccgaagtgcgcttccttatcctccgggtgtgctcgctctggaagaagggatcaactgctgccaggttttgcaccggagctgcagggtgtctatatcgaagaactgatggtcttaaccatactgacgatggtcaacatgatgggtccggtatcatcatgctgccgacaaagcttgccgaagtcgggacaatctaattatctcctggctggtgacagccgtaggctcaatggcactggcatggcattcgcaaatgcgataagcattcacatgttcaatttcgtcggcggagtaacaaactccgaaggccgctttaagtttttgcggaaaaaagtggaagatactgcaccagctggctggcctgttcgctgtcgcggcggatcaccgtttaatggtgttaagcgcattaaacaaaaaatggggattcacctgggcggaagcagtttgatctctgactggtataagttaagaaatcggtttgccggtaaatggtgtcgacaccattgccgggtccgcttcgtcattgctcagattgttacctccagcagcatggcaaagggcggtcctggaaacctgggacggattaaatttttcttggcttctttcaaacggaaacgggggaatccttcttaa

SEQ ID NO: 124448 - DNA, 811 bp, Homo sapiens
atggccaaacttcagcaacttgttgccctgctggtacgcttcgaaaaactgcttgagtccgacgcgccattagcagaagtgctaccttccatctacaaacagcatgaagagcgctacgccggttataccctgcgtcagttgtgtcaggaaatgcatgatttgtatgcccgccacaacgtgaaacaactgcaaaaagagatgttccgtaaggagcacttcccacgcgtcagcatgaatccgcaagaagccaactacgcctatttacgcggtgaagtggaactggttcgtctgccggatgcagaaggccgtatcgctgccgaaggtgcgcttccttatcctccgggtgtgctgtgtgttgttccgggtgaaatctggggtggtgctgttctgcgttacttcagcgctctggaagaagggatcaacctgctgccaggttttgcaccggagctgcagggtgtctatatcgaagaacatgatggtcgaattaagaaaagggccagtgcccctcaatgggccattactgtcagtagtgtgtgccacaatgagagaacacaatatcgaaaaagatgcggatacacccccccacaaacacagagtgccacaaagcacacagatcgtccaacgagaataattattgcacggtgcgagtcatctagaggatcccggagaagcacatcgtatatcagtgtgacgactgcggcggcatccatccagtcatcggttcgtctgagaatgacgtgcaactgcgcacgcgacacccggagacaacggctgactaagcttactccccatccccgggcaataagggcgc

SEQ ID NO: 124449 - DNA, 682 bp, Homo sapiens
atgcagcagttgctgaaagacctgctcaccgcctacaaattcggggtcaaaacactgtattatcagaacacccgtgacggcgctgaagacgcacaagacgatctggtgccgtcaatccaggacgatggctgcgaaagcggcgcatgcctgataagacgcgccagcgtcgcatcaggctccgggtgccggatgcagcgtgaacgccttatccggcctacggctcggatttgtaggcctgataagacgcgccagcgtcgcatcaggcacaggatgcggcgtaaaatgccttatccggcattaaactcccaacaggacacactcatggcatataccaccttttcacagacgaaaaatgatcagctcaaagaaccgatgttctttggtcagccggtcaacgtggctcgctacgatcagcaaaaatatgacatcttcgaaaagctgatcgaaaagcagctctctttcttctggcaaaactggccgctgttacttgatgcgcttattcctgtcgccaatacctgcgaaatgatcctgatgcccgcctgcttcggtctggccgatgacaaactgtggcgttggttgaatgaaaaactaccttgttcactgatgcttttgccaacgctgccgccttccgtgctgggcattcgtctgcaaaaccagttacagcgccagtttgtgcgccagg

SEQ ID NO: 124450 - DNA, 588 bp, Homo sapiens
ctaatgcaaggtcataggaaggctttcagcttctgcttgacttttggaacatgcattcttagagccctgagtcaccacataagaagtcagactactcacgccaataaactgaatatgcgttgataatagcacgactgccggatgcggcgtgaacgctttatccggcttacacttcgcccgtaagccgtaggcctgataagacgcgcaaagcgtcgcatcaggcatggcgcacgactgccggatgcggcgtgaacgccttatccggtctacacttcgcccataaaccgtaggccacatcaaatcatcaggcactttgaagtcggcatacgggtcgtcttcatcctgctcttcggcgctgagcgcgctgtgcaacactatactgctggcatcgcgctgagcaattttatcggcaacgctggcgggacacgctgctgaatctgatggaacgcaaagacgttcagtttggtctggcgacgatgtgtatcggtctgggtcagggtattgcgacggtgtttgagcgggtttaaccacttgccggatgcggcgtgaacgccttatccggtctaccgatccggcaccaatgtaggc

SEQ ID NO: 124451 - DNA, 1776 bp, Homo sapiens
atgatgcaagtaatacttggagcaagtaagttggaccccaataataaccacgaggaagtactgaggcgagtatttacccgttggggtaagggaaaatgggaatatcgccccaacaccttggaggttgacaaagggggagaaggagaaaagagaaccctcggttacaagatacaccacaaccatcatgatgacgcgcacgagtcggacacgagctcacatgagaaaagaaccgctgggcagtgcgcttttgttgctacctggatggcggttcgtaatttgaacttctactacggcaaattccatgccctgaaaaacatcaacctggatatcgctaaaaaccaggtaacggcgtttatcgggccgtccggctgcggtaaatcgacgctgctgcgtaccttcaacaaaatgtttgaactgtacccggagcagcgtgcggaaggtgaaattctgcttgatggcgacaacatcctgaacaactctcaggatatcgcactgccaggcgaatatgagccaccaccgaacaggattttatcgggtagtcctggacaagttggcgatgggggaattaaagctgggttgtggatctttaaatgtgcgacagcctttaccttcgtaaaaggtaatgccccagccatctttatgtggcccggttccaccaccacgctgtacaagcccggtgaaactaaagcagatatcgaatataaagctcaggtgaagcagcttattgaaatgaaccgaatcaccattgccaatggcgatattggttttaacttcactgacggcaatctgattaagaagatttttgtcgataagctcacacaggcgcagttgattaatggtcgtctggcgattgcccgcttgttggtcgataacaatagcgaaggtgaatacgccattattcccgccagcgttgccgataaaattgctcagcgcgatgccagcagtatagtgttgcacagcgcgctcagcgccgaagagcaggatgaagacgacccgtatgccgacttcaaagtgcctgatgatttgatgtggcctacggtttatgggcgaagtgtagaccggataaggcgttcacgccgcatccggcagtcgtgcgccatgcctgatgcgacgctttgcgcgtcttatcaggcctacggcttacgggcgaagtgtaggccggataaggcgttcacgccgaatccggcagtcgtgctattatcaacgcatattcagtttattggcgtgtcccaacctccccccccgctgctcctgcaatttgcccctgcccctccgtgccctgcccggatgcttgatcgccagatgctgccacagttcgccgctggcggagatgcgtccagaacgccgtcaccactccttccggtgaatggcaaactacgcgtcgacagccagccaaccgaggaggccagttgccacaccgccacgatgcccaccggtaaaaaccagggggcaacgcgcaataaccacttcttcactggcgttgccattatttcttccttagctttgcgcgactttacgggggataaaatcattcgccaccgatatctacttgcggattcagcggctgcggatggtgaatttccgggattggctgacatccagaagcgggaacagcaactcgccaacccgatccgcttcttccagatgcggatagcccgaaagcacaaaactgtcgatgccaagcgcggcatattcgttgattcgcgcagcgaccgtaggaccatcgaccaccagcgccgtcccggcaccggcgcgcactctcgatgcttttattag

SEQ ID NO: 124452 - DNA, 1806 bp, Homo sapiens
gtacttctcacctgcagctatgaaagccctggatttactcattaaatggacccgaagcgaccaaaatttagggggatgcaatacgggtttaatccggcccatttctccaattgttttaatctacaaactagtcattggagaacagatgattgatgtcttagggccggagaaacgcagacggcgtaccacacaggaaaagatcgcaattgttcagcagagctttgaaccggggatgacggtctccctcgttgcccggcaacatggtgtagcagccagccagttatttctctggcgtaagcaataccaggaaggaagtcttactgctgtcgccgccggagaacaggttgttcctgcctctgaacttgctgccgccatgaagcagattaaagaactccagcgcctgctcggcaagaaaacgatggaaaatgaactcctcaaagaagccgttgaatatggacgggcaaaaaagtggatagcgcacgcgcccttattgcccggggatggggattgcacgtcattctcagacgaaccgatgactggatggatggccgccgcagtcgtcacactgatgatacggatgtgcttctccgtatacaccatgttatcggagagctgccaacgtatggttatcgtcgggtatgggcgtcgtcgcagacaggcagaacttgatgattcaaggttcaaaaccgttattttccgccagttttgtcagatttcgagcacttgcaagaaccttatgagtactttgggaaattacggtaaccgtggttacctgcaactggtgagtttcatgcagaaatttatcgatcagtcgatttttgcaaacacccagtatgatccgtcacgcttcccgtcaggaaaagtgccgattcagcagttgctgaaagacctgctcaccgcttacaaattcggggtcaaaacactgtattatcagaacacccgtgacggcgctgaagacgcacaagacgatctggtgccgtcaatccaggacgatggctgcgaaagcggcgcatgcctgataagacgcgccagcgtcgcatcaggctccgggtgccggatgcagcgtgaacgccttatcctggctacggctcggatttgtaggcctgataagacgcgccagcgtcgcatcaggcacaggatgcggcgtaaaatgccttatccggcattaaactcccaacaggacacactcatggcatataccaccttttcacagacgaaaaatgatcagctcaaagaaccgatgttctttggtcagccggtcaacgtggctcgctacgatcagcaaaaatatgacatcttcgaaaagctgatcgaaaagcagctcttctttcttctggcgtccggaagaagttgacgtcttcccgcgaccgtatagattaccaggcgctgccggagcacgaaaaacacatctttatcagcaacctgaaatatcagacgctgctggattccattcagggtcgtagcccgaacgtggcgctattgccgcttatttctattccggaactggaaacctgggtcgaaacctgggcgttctcagaaacgattcattcccgttcctatactcatatcattcgtaatatcgttaacgatccgtctgttgtgtttgacgatatcgtcaccaacgagcagatccagaaacgtgcggaagggatctccagctattacgatgagctgatcgaaatgaccagctactggcatctgctgggcgaaggtacccacaccgttaacggtaaaactgtgaccgttagcctgcgcgagctgaatgaaaaactgtatctctgcctgatgagcgttaacgcgctgtga

SEQ ID NO: 124453 - DNA, 1269 bp, Homo sapiens
atgactttgtcatgctgctccaccgattttgagaacgacagcgacttccgtcccagccgtgccagtgcgttcaccgaatacgtgcgcaacaaccgtcttccggagcctgtcatacgcgtaaaacagccagcgctggcgcgatttagccccgacgtatccccactgttcgtccatttccgcgcagacgatgacgtcactgcccggctgtatgcgcgaggttaccgactgcggcctgagttttttaaatggcggaaaatcgtgttgaggccaacgcccataatgcgggcggttgcccggcatccaacgccattcatggccatatcaatgattttctgcgaaggtgaatacgccattattcccgccagcgttgccgataaaattgctcagcgcgatgccagcagtatagtgttgcacagcgcgctcagcgccgaagagcaggatgaagacgacccgtatgccgacttcaaagtgcctgatgatttgatgtggcctacggtttatgggcgaagtgtagaccggataaggcgttcacgccgcatccggcagtcgtgcgccatgcctgatgcgacgctttgcgcgtcttatcaggcctacggcttacgggcgaagtgtaggccggataaggcgttcacgccgcatccggcagtcgtgctattatcaacgcatattcagtttattggcgtgaggatccccattgccgaccgcgaactggcggcgctggcgctgaaacaggccagcggcgataacgttgaagcgattttcctgctgcgcgcctaccgcaccacgttggcgaagctggcggtaagcgagccgctcgacaccaccgggatgcgtctcgaacgccgtatctccgccgtttataaagacattcccggcggccagctgcttggcccaacctacgactacacccatcgcctgctcgattttaccctgctggcaaacggcgaagcgccgacgctgaccaccgccgacagcgaacagcagccgtcgccgcacgttttcagcctgctggcgcgtcaggggctggcgaagtttgaagaggatagcggcgcacagccggatgacatcacccgcacgccgccggtttacccctgctcacgctcctcccgtttgcagcagttgatgcgcggcgacgaaggctatttgctggcgctggcctactccacccaacgcggttacgggcgcaatcacccgttcgcaggcgagatccgcagcggctatatcgacgtgtcgattgtgccggcttgctgctttcagaatgatgaatga

SEQ ID NO: 124454 - DNA, 1910 bp, Homo sapiens
atggggtttcaccatgttgcccaggctggttttgaactcctgatctcaagtgatctgcccgccttggcctcccaaactgctaggattacagcgcgtgaagctcgggcgccggtagaagaaaataaaaaggcacagcttgagcgtgataaacagcttagcgaacagcaaaaacaagcggcgttggcgaaagaatataaagctcaggtgaagcagcttattgaaatgaaccgaatcaccattgccaatggcgatattggttttaacttcactgacggcaatctgattaagaagatttttgtcgataagctcacacaggcgcagttgattaatggtcgtctggcgattgcccgcttgttggtcgataacaatagcgaaggtgaatacgccattattcccgccagcgttgccgataaaattgctcagcgcgatgccagcagtatagtgttgcacagcgcgctcagcgccgaagagcaggatgaagacgacccgtatgccgacttcaaagtgcctgatgatttgatgtggcctacggtttatgggcgaagtgtagaccggataaggcgttcacgccgcatccggcagtcgtgcgccatgcctgatgcgacgctttgcgcgtcttatcaggcctacggcttacgggcgaaacacccctcgttcagcagccagggggttcctcactgtgtcccagatgtcactctaaagattgcttcagaggctccctccccaatcgttggagggactctgccagttccaatgaccagccagctgccttcagtcacaagcatgcagctgctgctagatctggataccatccctaatgagcccctccattacgactgggaagctctgcgtgagtcaatcaaaacgcacggtctgcgtaactccacgctttctgctctgatgccgtccgagacttcttcccagatctctaacgccactaacggtattgaacccccgcgcggttacgtcagcatcaaagcgtcgaaagacggtattttgcgccaggtggtgccggactacgagcacctgcacgacgcctatgagctgctgtgggaaatgccgggtaacgatggttatctgcaactggtgggtatcatgcagaaatttatcgatcagtcgatctctgccaacaccaactacgatccgtcacgcttcccgtcaggaaaagtgccgatgcagcagttgctgaaagacctgctcaccgcctacaaattcggggtcaaaacactgtattatcagaacacccgtgacggcgctgaagacgcacaagacgatctggtgccgtcaatccagggacgatgggctgcgaaagcggcgcatgcctgataagacgcgccagcgtcgcatcaggctccgggtgccggatgcagcgtgaacgccttatccggcctacggctcggatttgtaggcctgataagacgcgccagcgtcgcatcaggcacaggatgcggcgcgttctgcctggtcgtgccactcgtcgggattttccctctctggaggctgggtatcagtggttaccggggcgtggtctggtgattgaaccgcaggcgcaggtgatgtatcagggcgtgcagcaggatgattgtaccgccgctagccgtgcgcgcgtgtcacaatcgcagggtgatgatattcagacgcggctgggtttacacagcgaatggcgtaccgctgttcatgtcataccaacattagatctgaatgattatcacgatccccattcgacggaaattgaagaggatggcagcactatcagtgacgatgcggtgaagcaacggggtgaaataaaagtgggagtcacgggcaatatcagtcagcgagtgtccctgcgcggcagcgtggcgtggcagaaagggagtgatgattttgcccagacggcagggtttttgtcgatgacggtgaaatggtaa

SEQ ID NO: 124455 - DNA, 1329 bp, Homo sapiens
atgcgtcatgtcaaaccgcacggcatgttgtacaaccaggcggcgaagaagcacaactggcagacgccatcgccagagcggtatacgcttgcgatcagcattgattctcgtcgggctggcgggaagcgagctgattcgtgcaggaagcaatatggtctgacaacgcgcgaggaagtgtttgccgatcgcggtttcaggctgacggctcgctggtgccgcgaagccaattttccgctgccaaacgcgccgcgttacccgagaacaagtaccggacgaggcatatgcgcctttatcaaacaacgcatgatcggatcaccggagataacatgcacgtcctgcggatctcttccagtgcacagctggcggggaagtaacggaggtcggcgctttaccttcaccgattgcatttcacaattgttgtcgggtatcccccggcaacgactgaatgcgcccccacggggcaagcgccaaccaaggggcgttttcacactgatggcacatcaccggcgcactgatgctgtcagtcgctgtaccttcaaccggggtgacaaccagatccgcgccatgaactgcatcaccaccagcaaaacttttttcagatgcgtctgggtaaatacccgacgtcaccggtttaatcaggccccatttatcgagtttaattccgctgccctgcaaccacggctggcatgcgcctggaaaccaaaggccataatcagaacatcggcgggcaatcaaactctgaacccgctaccggacgaggacgacggcgaccatccggcccggctcacccatggcggtacgaatcaggcccctcgacacctttcaaaacataatcccggtgcggcgtgtaaggtgtgggaacgtttagtcacagacaccgtcccgtctacctcccccgagtccagccttggtgggtgctgcacagcgacttgcggccttaggtcttctcgctgtgccttctttcctcctgagagatgctctccgcctaagaccgctaacagctcaattggtctcattgatcccactcaccatctagagccctgttgcctcattaatcgttgtgccaccagctcacgggctgcaactgggaagagacgagacctgttatccatcgccgacactgggatacgcagcaatctgcaaaatggggtagaaccacaggaagaaagtggtaggcgacggcgcaggcacggtagaaaggcgaggccggccccaagctgggggagtattctagactgcaacaccgttcacacgctactagcaacagacgggtgtcatccggaccatgaggttcgctgtgtacgactccggaagttccggcgacaatag

SEQ ID NO: 124456 - DNA, 3732 bp, Homo sapiens
ttaaaggcgatcagtaccagagtgaacatctgaaagccaaatccccgattggcctccgccgacataattgacaaatggtagcgtcacacctgccgtaacaaagcctgccagactggcaagaggacgcggataaggaaccagttgttcgcgctcacgtttatcgagcgtgatggttggaaccagcgaccagaagggaatatccataatggtgtaagtcatgccccagaggatgtaggtcacgcaaacaaagacaatctgagtagtaccttcaaacagatgcgcaccccatcgcgatcgcgtagcatttacaatccatcccataatcggatcgttaatagcatcccagatcctcgccaccagaaacaaagtaccgaccaaacccacagacagcccgacgacatcggtgtagtaatacatgaggtacatatacacaatgccgatcgcaaaatccttcccgaacgctccaaatccataactgagttttgtagtcattgaaatgctcatagggtatcgggtcgttgggcttgccgtatatttcgataaccgcacgtgagtaccgcacagcatttccactgcgatttgggatatccgccgtgacacgttcgctttgccgtttttacacaagccattttccagatctggccatgcaccgtcatgcacgcataccacgccttgttggatcccgtcagtcaccaccgcgcctgtcaaaatctgaccacgtttgttccagacacgcaccagatcgccattcgcaataccaaagcgtgcagcatcttcggtgtgaatagtgattggttcacgatcggcgatcgcatattttttacgcagttccgcatagttaagctgactgtgtaaacggtgtgccggatgtgcggtcagaagctgtaactgcttctcgtcggcggtacctttccattcatcaggagccagccaggttgggtgtgccgggcaatccttatagccaaatttttccaacgtttttgaatagatttcaattttgccgcttggcgtacccagcgcatttttcaccggatcggcgcggaaatcaccataacgaacgtactgttcgttcttgtcgctgtggcgcatttcgatcagtgtattttgctgccagaaggcattaaacattggcatagtgacgcgttgcgcacgggcacctttctgagcggcatcatagaaaaatttcagccacgccatttcatctttaccttcggtatagatctcttttccgccaggtttgagtaattcgcgcaagatcggcaaacacgtcaaaatcgttacgcgcactgccaagggcatcggatgcatcgaagaattgtatccctgcatatgatcgttgacgtaccgatgacttgtggatatgggacgtaccggtacacgaaggtcagagtgatagtttcggtcaatcgtgaaggtaagctctgacttccgtccttccgcggccatctgtgcactggtagagatccgaaaccgcgaaatgttgactggcacatcggtcgcggcgtcgccattatcatgcagaaatcgggtatcccggatatcgatcaggctaactgcatgatcaaactggaatcggacggcacctttatcgttcattctggcggtgcggatattggtactggtctggatactgtagtgacgaaactggcagcagaagtgctgcactgcccaccgcaggacgtgcatgttatctccggtgataccgatcatgcgttgtttgataaaggcgcatatgcctcgtccggtacttgcttctcgggtaacgcggcgcgtttggcagcggaaaattagtcgcatgcgtgctcgtcgcctcttgttgatccccctgggtggtttccccggtgttcctgttcccgtgtactcgcccttggcttgtgtgtccccccccttggtcgtggcgggcgcgctcagtgctttttgcacggccgcgatttcgctcggtccgctcaggtcgggtatctgccggaacccggggccctggacaccaggacgcactttctgcagcccacttattactacgcgatcgcctgctttcagaccttctgtcaccagccacttatcgccaatagcctggcttgcaacgatcggacgggtttccactttgtcatccgcgccaactaccagtacggtggcatcgccacgcggcgtacgggttacgccctgttgcgggactaaaatagcgtttggattaagcccttcttccagacgtgcgcgcacgaacatacccggcagcagagtgtgatccgggttcgggaagatagcgcgtagggtgatagacccagtggtctgatcaacggtaacgtcagagaattccagcgtaccgtcctgcgggaacttaatgccgtcactggtgatcagtgacactttggctttgccgttctcttgtttcagcgtgccattcgccagttcctgtttcaggcgcaggaagtcgttggagatcctgtagagtgaccaggaattccatatggatttccggacatataggccaggttgtttcgaaaggtccagcacatttgaagatttcacattgggctgggtgaattcgccgttgaccgggaaggtgcgggtaatatcgccagcgtaaccttggtattcacaacccgcgtcaatcaacaccaggtcgccgtcgcgcatttcacactcgtgttcggtgtagtgcagaatgcagccgttttcaccgctgccgacaatggtgtaataggacggatagcgcgcaccgtggcggttaaattcgtggtgaatttcgccttccagatggtactcgaacattcccggacggcatttttccatcgcccgtgtatgtgccatggcggtgatttctcccgcgcggcggagtacggcaatctcttctggcgatttgaacaggcgcatttcatgaacaacaggacgccagtcgatcatcgttgccggtgcggtgagattttgccgcgaacctttacgcagtttttccagcgcactgttcacgattacatcagcatatgcatattcgccctgggcatggtaaaccacatccaggccgttaagtagttgataaagttgctgattgatttcgctgaatgccagtgcgcggtcaacgcccagtttctctggcgcggcatcctggcacgcggtccgataagaaaggtcacttcgttgtagcccatcccgcgtttctgccagtttctccatgccgcgatggacataaaacagccggtaatcagcatcgacaatttgctcgccatccacaaacaagcggaagtgacccggttcatcggaggtgatatgcagcgggccgacagggatcacccgcgcatcgctgttgccctcattgataaacggatacgtttcggaatcagtcgtcggttcagggcgcagtcgataatccatcgcatctttgcgcagcggatgcatatcttccggccagtcatcgggcaacaccaggcgacgggaaactcccgactgtcggcatcgacccagcgccttcaccacaatccagcatttttcggccccttccattgaaagggcataataaaccgcgtaatgaccgttaagtgtccgctcgtcgttgccaaacaggaccggaagccagccatcatgttgataataaagatactgtacaacgtcaggcagcagattgattttcaccgtaatggtgacctgttcaggcgtttgtcgctcttcatccagcaccgcgccggggaactgcgttttcagggcggcgagattgtactctgttgtggtgttggttctcat

SEQ ID NO: 124457 - DNA, 1124 bp, Homo sapiens
ctaatttgccatcggaattaagtcgccgcttctcctcgcagtgtcatgaagatccgcttcaggttcgaatgatccatgtttccccgtatcccctttgggtactgcacatcgatctcgcgtcgccattatatgccagaaatcggtatcccggatatcgatcagtctaatctgcatgatcaactggaatcgcacggcacctttatcgttcattctggcgtttcgattatggtactggtctggatactgtatgttgacgaaactggcagcagaagtgctcactgcccaccgcaggacgtgcatgttatctccggtgataccgatcatggttgtttgataaaggcgcatatgcctcgtccggtacttgcttctcgggtacgcggcgcgtttggcagcggtaaatccacgtgcgctggcgtattcatatggggggggggggggcgcgcgcgtatgcatatggggggggtgggggcggcggtaatgaaaaatgaagaatagctgccgggtgacccgaataccaaaacgatgaaagcgcaataggagacgatggcgactcgggcatcggatgcgagctctgcatggtttttgacttggtcgcgatgcagttgggacgggatgaaccagtcgtgagtttgggatggcgcggtcattggcgaagagagcattgttgccagccatgagctttgtcaaagcgggctttcgcggcgagaaacgccagttgttgatgggtacgccagcccgcgcgcgggacgagcatagtatggttggacgagttgcggtggtcgcagatgcagcgggggtggcggtaaacgattgagtaaagagttgtacacagccttgaataactgaaccgctcgtgctttcggcgtcgtgcttgtgttgagtctcttcaacttttcttgcttacgtgtcttcgttcgtgctttcttcgctctgtttctcgtgtttcttttgtcttgtggctgtttttcgcgtctttctcttttgtctggctgtggttttctgtgcctgcgagtcttcttttcctgctccctgcagtataccgtggggatcttgggggtcccacgaacatcatccatgttcacggataatgcacttaaatataagaagtcccgattatagcgcat

SEQ ID NO: 124458 - DNA, 901 bp, Homo sapiens
atgtctatcgcatatcaagagattccacagaatgagcgcttaagactgagtgattcttcgattactagtgtcgttgagtatctcctcgctgtagtcgcacggtcggtgtacacatctccagatatggcaatattcagagaacaccacagttatatgtctctttctatggctgcgtgtagaaagataagaccgtgtccccaggagcttccccggagcattccccacatgatctcagccatgtggagtcagagtgccccagatcatgtcgttcaacatgaacgtgagcagcagagtggctttggggatggcacagaatctcacagtacttcagattcaaatacggaagtgcgtcaaaactgtagtcccccaataggaggtgtgcggaaccatcgggctctccgaggtcaccagcccgcagagctcgaacccgagaatatactaaagcttctgcttatggtcgccgaaaggaaggcacataaaggctggtattacagcggcgatctctgccgtatggatgaggctggctatataaaaattaccggacgcaaaaaagatattattgtccgcggcggcgaaaatattagcagccgtgaagtggaagatattttattgcagcatcctaaaattcccaatgcctgatatgggggcaatgtccgatgatcgcctaggtgaacgatcatgcgcttatgtccgtgctgaaagcgccgcatcattcattatcgctggaagaggtcctttgctggaggggatgctaagatgtaaactgactgctgaagattttgctatactggtacagtcaagatgcgatgtaggtgattgccccaatggctatggggtttacttagcccctgaagggctgcagtactttccgtaccactattaccacaagacttacgtttga

SEQ ID NO: 124459 - DNA, 1248 bp, Homo sapiens
atgcgttatgacgaatcctgtgtccagtatcgtgagccggatggctcagacatcgtctctctgaagatcgactgcatcatagagcgttcccagctgcctcaaagttaccagcgtatgcctgacttccgccgccgcttcctgcaggcgcggagtcgcggccgctccacagctgagtccgtgctctcagatccaacatcctcctcctctccctgctggcccgtgggtcggattccagcatgttttgtgtctgaggctcccggattctaccaggtgcctccatcacgaggtctttcagagttcatcgcaggccaggcggtgaagttcaatccgctgttgcccgtctcactggtgaaaagaaataccaccctggcgcccactacgcataccgcctctccccgcgcgttggccgattcattaatgcagctggcacgacaggtttcccgactggatagcgggcaacgctcagtcgtctttgtacgttggagtcgccgatctataatagtggactctcatgctggactgatcaccactcaacgcgctctcggacagtctgatatgtatagaggatctctgcctatttccgagcttcgcatcatagggcccagacatctcaggggtgttctgcgcgtggtccgcttgtgtccattcagtgagccgatgctggtggagtgtaatccgttgttgccatcctcactcataataagagaaccctcgctggagcccaccttgcgattcgcctcccgcatcgctctgcctgactctacggttttgcagatattttccggagtacttcccctatctagcgggcaggcctacattcagttcacgtactctgagacgccacgtagcactcctcgagaagccaactccgcgcacatattgtcagttcaccagtggaagtgtggtcatattgttatggcagccagagtaaaggtcggttacccacaatggacgcccatcagtctatctgcgggtctctcggccgtgctctacaagccagtagagcgtgggggccgatgttcacattcttgcagcacagcgttgtcacctcagggtttcttatccagccttctacgcttcataagtgaaggcgtttttaagtcctttacagacaagcaaatgctgagagattttgtcaccaccaggcctgccctaatagtgctcctgtggcagccgctcaatgtggaaggaacatccagtaccagccactgcataatcatgccaacctgtaatgaccatcgagactag

SEQ ID NO: 124460 - DNA, 710 bp, Homo sapiens
taaggcggcagggttcgggaacaggagagcgcacgagggagcttccagggggaaacgcctggtatctttatagtcctgtcgggtttcgccacctcttgacttgagcgtcgatttttgtgatgctcgtcaggggggcggagcctatggaaaaacgccagcaacgcggcctttttacggttcctggccttttgctggccttttgcttcacatgtcctttcctgcgttaatcccctgattcctgtggataacccgtattacccgcctttgagtgaagctgatacccgctccgccgcagccgaacgaccgagcgcagcgagtcagtgagcgaggaagcggaagagcgcccaatacgcaaaccgcctctccccgcgcgttggccgattcattaatgcagctggcacgacaggtttcccgactggaaagcgggcagtgagcccaacccaattaatgtgagttagctcactcattaggcaccccaggctttacactttatgcttccggctcgtatgttgtgtggaattgtgagcggataacaatttcacacaggaaacagctatgaccatgattaccccaagctatttaggtgacactatagaatactcaagctattcatccaacgcgttgggagctctccggatccggttgcagtgagccgagattgttccactgtactccagcctgggtgacagagcaagcctctgtctttaaaa

SEQ ID NO: 124461 - DNA, 1123 bp, Homo sapiens
  misc_feature (1)...(1123): n = a,t,c or g
gcggtatgccgccggacgcctctgtctctctatgtgccgataaaaacgagcccgacttcacatgatctgcacggcccgacagcgggtctccatcccaaaaaacctaaacataacccccggaatcgtccagtcaaacgacctccgtgaggcggcatatagtctcttccgggatcaaaaacgtatgctgtatctgttcgttgcccagatcagaaaatctgatggcaccctacaggaacatgacggtatctgcgagatccatgttgctaaatatgctgaaatattcggattggccctctgcggaagccagtaaggatatacggccaggcattgaagagtttcgcggggaaggaaagtggttttttatcgccctgaagaggatgccggcgatgaaaaaggctatgaatcttttccttggtttatcaaacgtgcgcacagtccatccagagggctttacagtgtacatatcaacccatatctcattcccttctttatcgggttacagaaccggtttacgcagtttcggcttagtgaaacaaaagaaatcaccaatccgtatgccatgcgtttatacgaatccctgtgtcagtatcgtaagccggatggctcaggcatcgtctctctgaaaatcgactggatcatagagcgttaccagctgcctcaaagttaccagcgtatgcctgacttccgccgccgcttcctgcaggattttcgcctgctggggcaaaaccagcgtggaccgcttgcttgcaactctctcagggccaggcggtgaagggcaatcagctgttgcccgtctcactggtgaaaagaaaaaccacccttggcgcccaatacgcaaaccgccctctccccgcgcgttggccgattcattaatgcagctggcacgacaggtttcccgactggaaagcgggcagtgagcgcaacgcaattaatgtgagttagctcactcattaggcaccccaggctttacactttatgcttccggctcagtatgttgtgtggaattgtgagcggataacaatttcacacaggaaacagctatgaccatgattacgccaagctntaatacgactcactatagggaaagctggtacgcctgcaggtaccggtccggattcccggc

SEQ ID NO: 124462 - DNA, 626 bp, Homo sapiens
atgcggtggaaaatcgatctggcacgcatcagtaaagaaatcatcgacttttatatcacccagggcgttaatcgtattggttttattgccggtgaagatgagcctggcaaggcggatattcgtgaggtcgcctttgcggaatatggccgactgaaacaagtggtacgcgaagaggatatctggcgcggcggtttttccagttcgtcgggttatgaactggcaaaaccaaatcctggcgcggaaagactatccgaagccactgtttgttgcttccgattccattgcaatcggcgtactgcgggcaattcatgaacgaggcctgaacatcccacaggatatttcgcttatcagcgttaacgatatccccaccgcgcgattttcctttccgccgctctccaccgtgcgcatccattccgagatgatgggaagtcagggcgttaacctggtgtatgaaaaagcccccgatggtcgcgcgctcccgctgttagttttcgttcccagcaaattaaaactgcgcggcacgacccgttaaatccccttactcattgtacggcattcgtttgggccggacagtgctgccgccagtcttcgtgatccccgggtcggacgcttgaattcgtgatcgt

SEQ ID NO: 124463 - DNA, 1059 bp, Homo sapiens
atggcaacactaaaagacatcgcaatcgaagctggcgtatccctggcgacagtatccagggtcttaaatgacgatccgacattgaatgtgaaagaagagacgaaacatcgcattctcgagatcgccgaaaagctggagtacaagaccagtagtgcccgtaaactccagacaggtgcagtcaaccaacaccatattctggctatctacagctaccagcaggagctggagatcaacgatccttactatctggcgatccgccacggcattgaaacccagtgcgaaaagctgggcatcgagctcaccaactgttatgaacacagcggcttaccagacattaaaaacgtcaccggtattttaattgtcggcaaacccacgcccgccctgcgcgccgctgccagcgcgttgaccgacaatatctgttttatcgactttcacgaacccggcagcggttacgatgcggtggatatcgatctggcacgcatcagtaaagaaatcatcgacttctatatcaaccagggcgttaatcgtattggttttattggcggtgaagatgagcctggcaaggcggatattcgtgaggtcgcctttgcggaatatggccgactgaaacaagtgggattacgcgtgctgattaaagacgaccagaaccgcaatatgtttgaacgcggcagcgcgaagattatgccgttctttaaaacgctgctggtggagctcgcgccagtgttcgactcgctcgataataaaattattattaccgggcataccgatgcgatggcctacaaaaacaatatctacaacaactggaacctttcgggtgaccgcgcgctttcggctcgtcgggtgctggaagaggccggaatgccggaagataaagtgatgcaggtaagcgcaatggcggaccagatgctgctggattccaaaaatccgcaaagcgcgggcaaccggcgcattgagattatggtgctgaccaaaagtgcgtccgatacgctgtatcaatactttggtcagcatggggataaagtggtgcagccgctggtgcaaaagctggataagcagcag

SEQ ID NO: 124464 - DNA, 2853 bp, Homo sapiens
ctaactggtgtgagatggtatctctttgtatctctttgtgcttttgctttgcatttctctgatggccagtgatgatgagcatttcttcatgtgtctgttggctgcataaatgtcttcttttgagaagtgtctgttcatatccttagcccacttgtttatggggttgtttgattttttcttgtaaatttgtttgagttctttgtagattctggatattagccctttgtcagatgagtagattgcaaaaattttctcccattctgtaggttgcctgttcactctgatggtagtttcttttgctgtgcagaagctctttagtttaattacatcccatttgtcaattttggcttttgttgccattgcttttggtgttttagacatgaagtccttgcccgtgcctatgtcctgaatggtaatgcctaggttttcttttagggtttttatggttttaggtctaacatttaagtctttaatccatcttgaattaatttttgtataaggtgtaaggaagggatccagtttcagctttctacatatggctagccagttttcccagcaccatttgttaaatagggaatcctttccccatttcttgtttttgtcaggtttgtcaaagatcagatagttgtagaagtgtggtattatttctgagggctctgttctgttccattgatctatatctctgttttggtaccagtaccatgctgttttggttactgtagccttatagtatagtttgaagtcaggtagtgtgatgcctccagctttgttcttttggctcaggattgacttggcaatgtgggctcttttttggttccatatgaactttaaagtagttttttcctaaaaacccctttctactctcagagaaatgcccctgatttctggatccaaaaatgtcaacactgagttgcttttcatgctggatgtaagaaccagcagagcatggaaacgtctaccctctgactccctagagcccccccagttcattgataccttatctgtcatgaaaaggaccatctgccactggcaccaatacaggacatttgtgcttggcccaaagagctgcccatcaaattgagtattaaatccaggaccatctagctggaatacttcatcttcttccagttctctttgcctgttgtccccactatccactctaatcattggtcctttgtactggtttcctgacaaatgttgcctaattccaggacacgaacctgcagcatctccaagtttcctccacacaacattgcacatttctctgactatagctttttctgtctcactaaggtcatgttcatactctttaccctgttgacgatctatagtttcctgaacatccaagaccagattaacatcagctctgtgctcatttgaccttctccactccaggcacataactgtggctgcaaccattacataaaatgtgtatctatcctggggcagcatgcgattttcttcctccagctgtcttactcttgcctccagctgcctaacataggacaaggttgattctttataaaagagtcttgaaagatccctttccccttcatggcaggcactgcctatgggcttccaccagacaccaaatctatgggtgcctgcgtcttggactttccaaccttcaaaactgtgagcaataaatttctgttgtttataaattacccaacctaaggtattctgttgtatcagcccaaaaggactcccatcccaccccagtggaggggtactgacggagcaggagcaggcacagctgtgtgcaatgcacggcggggcaggtgtccgacactgaatgagaggctctgcaccgccagagagcagcctgttgtctcctgactttttaatgatcgccattctaactggtgtgagatggtatctcattgtggttttggtttgcatttctctgatggcccgtgatgatgagcattttttcatgtgtctgttggctgcataaacatcttcttttgagaattgtctgttcatatccatcacccactttttaatggggttgtttgattttttcttgtaaatctgtttgagttttttgtagattctggatactagccctttgtcagatgagtagatttatcggtaccagtgggccgccgcaccgttaacagaaataattctcgaaccgcgttctgccgcgatggcataagtggagaaacgcttgccgttggtgacattccagatatcaatggcttcgttttcgagaataccggctgcgtcaagaaaatcctggtcaatggcgcaagaaccttcatagtgcaggtccgcatgagtcactttcaattggcgacgacgtgtatgccaatggtgagaagatcgattccccgcaccgtccggcactggatgcactcgccagcaacattgcgctgactgcggagaattttggcgatgcgcatgatagttgtaaccgccagtgaacaggttcgggcacggtaatcccataaacgacaactgcgcgccgtcggtaccaccgcggatcggtttcagttccggttcaatatcgcaatcgcgcatcgcctgctgggcgatatcgagaatatgcggatgctcaaccactttctcgcgcatattgtagtaactgtcttcaatcaccagttcaatgtagcaatcaggatgtaaccctttgcccacttttttggcgatctccatcattttacgtttacgcgcttcaaactgtttacggtcgaaatcacggatgatgtagtgcatatcggcccgttcaacggtgcctttcatgctcgccagatgatagaaaccttcatagccttctgtcatttccgggctttcatccgccggaacttccgcatgaatacgtgccgccagcgacagcgcatttaccat

SEQ ID NO: 124465 - DNA, 1259 bp, Homo sapiens
atgcgcccgttcggtgactacccggacgggggtattgatgatctgaagatttctttttctgtacccgccgccggcgtcggcccgcatttcgatcagtacgacgtgtttatcattcagggtaccgaacgtcgtcgctggcgagtgggcgaaaagctgcaaatgaaacagcactgcccacatccggatctgttacaggtcgatccgttcgaagccatcatcgatgaagagctggagcctggtgatattctttatattccgccaggattcccgcatgaaggctacgcgctggaaaatgcgatgaactattccgtgggctttcgcgcgccaaatacgcgggaactgatttagtggattgcccgattatgtgctgcaacgtgaactgggcggcaactactacagcgatccggatgttccacctcgcgctcatcctgcggatgttctgccgcaagagatggataaactgcgtgagatgatgctcggaattgtccacccacccggacccctttaagcaatggttgggggagtttatatcccagtcacgtcatgacctggatatcgcgccgccagacccgccttatcagccggatgaattctccgatgcgctgaaccaaggtaaagtcttgggcgccttgggtggtctgcgcgtattgcgcatgggcgacgccgtgtatcccaatggtgagaagatggattccccgccccgtccggcactggatgccctcgccagcaccattgcgctgactgcgaagaattttggcgatgcgctggaagatccgtcattcctcgcgatgctcgcggcgctggtcaatagcgggtattggttcttcgaagggtaagtttggatttaagccggatgcggcatcacatgccgcatcccttttcgcttacttccgttgcgccgttaactcggcaatacggacgatcacctgccccgctttttccataccttccagagtcacaaactcatgcttaccatgatagttgtaaccgccagtgaacaggttcgggcacggtaatcccataaacgacaactgcgcgccgtcggtaccaccgcggatcggtttcagttccggttcaatatcgcaatcgcgcatcgcctgctgggcgatatcgagaatatgcggatgctcaaccactttctcgcgcatattgtagtaactgtcttcaatcacccaggtcatggggaccaatcagggatggaaccctttgcccccctttttggcgatcccgggtccgagctgaattcgaatgaggtcgag

SEQ ID NO: 124466 - DNA, 474 bp, Homo sapiens; identical to SEQ ID NO: 117935

SEQ ID NO: 124467 - DNA, 413 bp, Homo sapiens; identical to SEQ ID NO: 122730

SEQ ID NO: 124468 - DNA, 532 bp, Homo sapiens
cgtcagagcaccatcgctgattgtttctttcacggccactctgcctgtatgtgcccgtttcgatggcggtacagcaggttttcgctcaagcaacagcgcattctggcgcatgatccggtaaacacgtttggcattgatcgcaggcataccatcaagttctgcctgtctgcgaagcagcgcccatacccgacgataaccatacgttggcagctctccgataacatggtgtatacggagaagcacatccgtatcatcagtgtgacgactgcggcggccatccatccagtcatcggttcgtctgagaatgacgtgcaactgttctccggcggcgacagcagtaagacttccttcctggtattgcttacgccagagaaataactggctggctgctacaccatgttgccgggcaacgagggagaccgtcatccccggttcaaagctctgctgaacaattgcgatcttttcctgtgtggtacgccgtctgcgtttctccggccctaagacatcaatcatctgttctccaatgactagt

SEQ ID NO: 124469 - DNA, 694 bp, Homo sapiens
gttgaaggccgtggcgacggaactgttgcccatgaatggctcgctgtggagcacgcaggctcgtatctctcccgcgttcctgctgaaggtaaaccagacattaatggactatcgaaccggaagagtacaacctgctattccgcagagtctccctgaagctctccgtttggctgccgacctggcagagcaaaagcaacggctggagcaaaaaatgcttatggatgcacctaaagtcgaattcgctgaacgcgttgctaccgccagcggggttctaatcggcaactatgccaaagtgctcggcctgggccaaaactatctcttcacctggttgcgtgataacggaattctgatcgcaaccggtgaacgcaggaacgtccccaaacaggattccatatctcacgccgggcatatcctgtcgcaatgtgcaaatctcgcggcaacaaccagtgaatacttcattcacaagcctcaccgcctgatcgcggcagaaactggttatagccaatcaaccgtcgttcgtgcattccgtgaagctgtaaacaaaggaattctgtctgtagagattgttatcggcgatcaccgtgaacgtcgcgctaacctgtaccggtttacaccatcctttttggccttcgcacaacaagccaaaaatgcgctgatagaaagcaaattaaagatctcttcagcggcaaccaag

SEQ ID NO: 124470 - DNA, 2141 bp, Homo sapiens; identical to SEQ ID NO: 119523

SEQ ID NO: 124471 - DNA, 748 bp, Homo sapiens
atggaccagtgtccttataaaagaggcgccagagagctgctttgccccttccaccatgtggagacacagagagaaggtgccatctctgagaaagtgggtccacatcagataccaaatctattggaccttggtcatgacttcgatgactggatggatggccgccgcagtcgtcacactgatgatacggatgtgcttctccgtatacaccatgttatcggagagctgccaacgtatggttatcgtcgggtatgggcgctgcttcgcagacaggcagaacttgatgagtggaccgtgaaagaaagcaatcagcgatggtgctctgacgggttcgagttctgctgtgataacggagagagactgcgtgtcacgttcgcgctggactgctgtgatcgtgaggcactgcactgggcggtcactaccggcggcttcaacagtgaaacagtacaggacgtcatgctgggagcggtggaacgccgcttcggcaacgatcttccgtcgtctccagtggagtggctgacggataatggttcatgctaccgggctaatgaaacacgccagttcgcccggatgttgggacttgaaccgaagaacacggcggtgcggagtccggagagtaacggaatagcagagagcttcgtgaaaacgataaagcgtgactacatcagtatcatgcccaaaccagacgggttaacggcagcaaagaaccttgcagaggcgttcgagcattataacgaatggcatccgcata

SEQ ID NO: 124472 - DNA, 630 bp, Homo sapiens
  misc_feature (1)...(630): n = a,t,c or g
acatttatcgactatcgaaccggaagattacaacctgctattccgcagagtctccctgaagctctccgtttggctgccgacctggcagagcaaaagcaacggctggagcaaaaaatgcttatggatgcacctaaagtcgaattnnntgaacgcgttgctaccgccagcggggttctaatcggcaactatgccaaagtgctcggcctgggccaaaactatctcttcacctggttgcgtgataacggaattctgatcgcaaccggtgaacgcaggaacgtccccaaacaagaatacatatctcgtgggtatttcacccttaaagaaaccgtgatcgatacaagcaatggaagcaggatttctttcacgactcgtataaccggcaaaggtgcggttgctggcgcctatatcgccgacatcaccgatggggaagatcgggctcgccacttcgggctcatgagcgcttgtttcggcgtgggtatggtggcaggccccgtggccgggggactgttgggcgccatctccttgcatgcaccattccttgcggcggcggtgctcaacggcctcaacctactactgggctgcttcctaatgcaggagtcgcataagggagagcgtcgaggagaacttcta

SEQ ID NO: 124473 - DNA, 2238 bp, Homo sapiens; identical to SEQ ID NO: 117937

SEQ ID NO: 124474 - DNA, 1887 bp, Homo sapiens
atgggcaaggacttcatgactaaaacaccaaaagcaatggcaacaaaagccaaaattgacaaatgggatgtaattaaactaaagagcttctgcacagcaaaagaaactaccatcagagtgaacaggatcaacaaaattgataaaccgctagcaagactaataaagaaaaaaagagagaagaatcaaatagacacaataaaaaatgataaaggggatatcaccactgatcccacagaaatacaaactaccatcagagaatactacaaacacctctacacaaataaactagaaaatctacaagaaatggataaattcctcgacacatacactctcccaagactaaaccaggaagaagttgaaactctgaatagaccaataacaggatctgaaattgtggcaataatgaatagtttaccaaccaaaaagagtccaggaccagatggattcacagctgaattctaccagaggtacaaggaggaactgcatcatcctgataccaaagcagggcaggacacaaccaaaaaagagaattttagaccaatatccttgatgaacattgatgcaaaaatcctcaataaaatactggcaaaacgaatccagcagcacatcaaaaagcttatccaccatgatcaagtgggcttcatccctgggatgcaaggctggttcaatatacgcaaatcaataaatgtaatccagcatataaacagagccaaagacaaaaaccacatgactatctcaatagatgcagaaaaagcctttgacaaaattcaacaacccttcatgctaaaaactctcaataaattaggtattgatgggacgtatttcaaaataataagagctatctatgacaaacccacagccaatatcatactgaatgggcaaaaactggaagcattccctttgaaaactggcacaagacagggatgccctctctcaccactcctattcaacatagtgttggaagttctggccagggcaattaggcaggagaaggaaataaagggtattcaattaggaaaagaggaagtcaaattgtccctgtttgcagatgacatgattgtatatctagaaaaccccactgtctcagcccaaaatctccttaagctgataagcaacttcagcaaagtctcaggatacaaaatcaatgtacaaaaatcacaagcattcttatacaccaacaaaagacaaacagagagccaaatcatgagtgaactcccattcacaattgcttcaaagagaataaaatacctaggaatccaacttccaagggatgtgaaggacctcttcaaggagaactacaaaccactgctcaaggaaataaaagaggatacaaacaaatggaagaacattccatgctcatgggtaggaagaatcaatatcgtgaaaatggccatactgcccaaggtaacttacagattcaatgccatccccatcaagctaccaatgactttcttcacagaattggaaaaaactactttaaagttcatatggaaccaaaaaagagcccgcatcgccaagtcaatcctaagccaaaagaacaaagctggaggcatcacactacctgacttcaaactatactacaaggctacagtaaccaaaacagcatggtactggtaccaaaacagagatatagatcaatggaacagaacagagccctcagaaataacgccacatatctacaactatctgatctttgacaaacctgagaaaaacaagcaatggggaaaggattccctatttaataaatggtgctgggaaaactggctagccatatgcagaaagctgaaactggatcccttccttacaccttatacaaaaatcaattcaagatggattaaagatttaaacgttagacctaaaaccataaaaaccctagaagaaacctag

SEQ ID NO: 124475 - DNA, 825 bp, Homo sapiens
atgcaacaggtcgaaggccgtggcggcggcacttttgcccatgaattgctcgctgtggagtacgcaggctggatttctcccgcgtttcggctgaaggtaaaccagacatttatcgactatcgaaccggaagattacaacctgctattccgcagagtctccctgaagctctccgtttggctgccgacctggcagagcaaaagcaacggctggagcaaaaaatgcttatggatgcacctaaacaatggaagcaggatttctttcacgactcgtataaccggcaaagcgccgggcatatcctgtcgcaatgtgcaaatctcgcggcaacaaccagtgaatacttcattcacaagcctcaccgcctgatcgcggcagaaactggttatagccaatcaaccgtcgttcgtgcattccgtgaagctgtaaacaaaggaattctgtctgtagagattgttatcggcgatcaccgtgaacgtcgcgctaacctgtaccggtttacaccatcctttttggccttcgcacaacaagccaaaaatgcgctgatagaaagcaaattaaagatctcttcagcggcaaccaagactctaaaccagagaaactacttccacaggaagcctaattaccactcagataaactagtcagtaaaagtgacagaagttttacacccctgcaacttggtaaggtgatagggaaaggttatgatcaaggtcattccttagatgtggctattgaagagtgtggaagacaatttgaggtcaacaaggccagaggcaaagagatcagttgggtggtagtcctcgaactcaagcttggagcaaaacaatga

SEQ ID NO: 124476 - DNA, 2949 bp, Homo sapiens
ttatcttgtgcaatgtaacatcagagattttgagacacaacgtggctttcccccccccccctgcaggtcgatagcagcaccaccaattaaatgattttcgaaatcgaacttgacattggaacgaacatcagaaatagctttaagaaccttaatggcttcggctgtgatttcttgaccaacgtggtcacctggcaaaacgacgatctttagaagttctcctcgacgctctcccttatgcgactcctgcattaggaagcagcccagtagtaggttgaggccgttgagcaccgccgccgcaaggaatggtgcatgcaaggagatggcgcccaacagtcccccggccacggggcctgccaccatacccacgccgaaacaagcgctcatgagcccgaagtggcgagcccgatcttccccatcggtgatgtcggcgatataggcgccagcaaccgcaccccattgttcgttatctttatttttggctaaaaccgcattaagagcttcgtttaccgtcatgcaatgcggtaggttatcgaagtttgatatcccgccaatatcaggcgaacgcttgttcttcaggtaagcatatttccgcgcagccgcctctactttctgcttgaactcatgtttttgagtgcgttttttggataaccgcagattgtcagcctttgcttttgccttagcgatccatgaagtcaattttttgaggctggttgttccggcaccgccggaaactgatctttttgtttttttaacttgtgacttcttattctttattgccacgtcatcctgacagggggagggggtatcattttgacatgggggtgtggataaaaaattaaataaagccaatgtcttagcgagaacagctttaaccttggttgccgctgaagagatctttaatttgctttctatcagcgcatttttggcttgttgtgcgaaggccaaaaaggatggtgtaaaccggtacaggttagcgcgacgttcacggtgatcgccgataacaatctctacagacagaattcctttgtttacagcttcacggaatgcacgaacgacggttgattggctataaccagtttctgccgcgatcaggcggtgaggcttgtgaatgaagtattcactggttgttgccgcgagatttgcacattgcgacaggatatgcccggcgctacgggatagaccggagtgtgttacaaagcaggccaattcatagccagaaaaagtaaaatcgctcatcgttatacagctcaggaaagtgactttagccagcattacaatgctggtggttcttactacgtcagcatcaagcaatcgcttcatcagccactgctgacctttgccggttatacgagtcgtgaaagaaatcctgcttccattgcttgtatcgatcacggtttctttaagggtgaaatacccacgagatatgtattcttgtttggggacgttcctgcgttcaccggttgcgatcagaattccgttatcacgcaaccaggtgaagagatagttttggcccaggccgagcactttggcatagttgccgattagaaccccgctggcggtagcaacgcgttcagcgaattcgactttaggtgcatccataagcattttttgctccagccgttgcttttgctctgccaggtcggcagccaaacggagagcttcagggagactctgcggaatagcaggttgtaatcttccggttcgatagtcgataaatgtctggtttagccgccaacatcccgtgaacagcctgacgggcttgtctgctcccggcatccgcttacagacaagctgtgaccgtctccgggagctgcatgtgtcagagttttcaccgtcatcaccgaaacgcgcgaggcagctgcggtaaagctcatcagcgtggtcgtgaagcgattcacagatgtctgcctgttcatccgcgtccagctcgttgagtttctccagaagcgttaatgtctggcttctgataaagcgggccatgttaagggcggttttttcctgtttggtcactgatgcctccgtgtaagggggatttctgttcatgggggtaatgataccgatgaaacgagagaggatgctcacgatacgggttacagtaaggcaaccccgccagcctagccgggtcctcaacgacaggagcacgatcatgcgcacccgtggccaggacccaacgctgcccgagatgcgccgcgtgcggctgctggagatggcggacgcgatggatatgttctgccaagggttggtttgcgcattcacagttctccgcaagaattgattggctccaattcttggagtggtgaatccgttagcgaggtgccgccggcttccattcaggtcgaggtggcccggctccatgcaccgcgacgcaaacgcggggaggcagacaaggtatagggcggcgcctacaatccatgccaacccgttccatgtgctcgccgaggcggcataaatcgccgtgacgatcagcggtccaatgatcgaagttaggctggtaagagccgcgagcgatccttgaagctgtccctgatggtcgtcatctacctgcctggacagcatggcctgcaacgcgggcatcccgatgccgccggaagcgagaagaatcataatggggaaggccatccagcctcgcgtcgcgaacgccagcaagacgtagcccagcgcgtcggccgccatgccggcgataatggcctgcttctcgccgaaacgtttggtggcgggaccagtgacgaaggcttgagcgagggcgtgcaagattccgaataccgcaagcgacaggccgatcatcgtcgcgctccagcgaaagcggtcctcgccgaaaatgacccagagcgctgccggcacctgtcctacgagttgcatgataaagaagacagtcataagtgcggcgacgatagtcatgccccgcgcccaccggaaggagctgactgggttgaaggctctcaagggcat

SEQ ID NO: 124477 - DNA, 1137 bp, Homo sapiens
atgattgatgtcttagggccggagaaacgcagacggcgtaccacacaggaaaagatcgcaattgttcagcagagctttgaaccggggatgacggtctccctcgttgcccggcaacatggtgtagcagccagccagttatttctctggcgtaagcaataccaggaaggaagtcttactgctgtcgccgccggagaacaggttgttcctgcctctgaacttgctgccgccatgaagcagattaaagaactccagcgcctgctcggcaagaaaacgatggaaaatgaactcctcaaagaagccgttgaatatggacgggcaaaaaagtggatagcgcacgcgcccttattgcccggggatggggatcgtcacactgatgatacggatgtgcttctccgtatacaccatgttatcggagagctgccaacgtatggttatcgtcgggtatgggcgctgcttcccagacaggcagaacttgatggtatgcctgcgatcaatgccaaacgtgtttaccggatcatgcgccagaatgcgctgttgcttgagcgaaaacctgctgtaccgccatcgaaacgggcacatacaggcagagtggccgtgaaagaaagcaatcagcgatggtgctctgacgggttcgagttctgctgtgataacggagagagactgcgtgtcacgttcgcgctggactgctgtgatcgtgaggcactgcactgggcggtcactaccggcggcttcaacagtgaaacagtacaggacgtcatgctgggagcggtggaacgccgcttcggcaacgatcttccgtcgtctccagtggagtggctgacggataatggttcatgctaccgggctaatgaaacacgccagttcgcccggatgttgggacttgaaccgaagaacacggcggtgcggagtccggagagtaacggaatagcagagagcttcgtgaaaacgataaagcgtgactacatcagtatcatgcccaaaccagacgggttaacggcagcaaagaaccttgcagaggcgttcgagcattataacgaatggcatccgcatagtgcgctgggttatcgctcgccacgggaatatctgcggcagcgggcttgtaatgggttaagtgataacagatgtctggaaatatag

SEQ ID NO: 124478 - DNA, 2121 bp, Homo sapiens
atgatgcctccactggtgataccctggcaaacaggatctggagtggacctcctgcaaactccaccagacctgcagaagagggtcctgactgttagaaggaaaactaacaatcagaaagcaatagcatcaacatcaacaaaaaggacgcccacgcaaaaaccccatccgaaggtcaccaacatcaaagatcaaagaactaatgacaaaaaccagatgattatctcaatagatgcagaaaagcccttcaataaaattcaacttcccttcatgctaaaaactctcaataaattaggtattgatgggacatatttcaaaataataagagctatctatgacaaacccacagccaatatcatactgaatgggcaaaaactggaagcattccctttgaaaactggcacaagacagggatgccctctctcaccgctcctattcaacatagtgttggaagttctggccagggcaatcaggcaggagaaggaaataaaaggtattcaattaggaaaagaggaagtcaaattgtccctgtttgcagacgacatgactgtttatctagaaaaccccatcgtctcagcccaaaatctccttaagctgataagcaacttcagcaaagtctcaggatacaaaatcaatgtaaaaaaatcacaagcattcttatacaccagcaacagacaaacagagagccaaatcatgagtgaactcccattcacaattgcttcaaagagaataaaatacctaggaatccaacttacaagggatgtgaaggacctcttcaaggagaactacaaaccactactcaaggaaataaaagaggatacaaacaaatggaagaacattccatgctcatgggtaggaagaatcaatatcgtgaaaatggccatactgcccaaggtaatttacagattcaatgccatccccatcaagctaccaatgactttcttcacagaattggaaaaaactactttaaagttcatatggaaccaaaaaagagcctgcatcgccaagtcaaccctaagccaaaagaacaaagctggaggcatcacactacctgacttcaaactatactacaaggctacagtaaccaaaacagcatggtactggtaccaaaacagagatatagatcaatggaacagaacagagccctcagaaataacgccgcatacctacaactatctgatctttgacaaacctgagaaaaacaagcagtggggaaaggattccctatttaataaatggtgctgggaaaactggctagccatatgtagaaagctgaaactggatcccttccttacaccttatacaaaaatcaattcaagatggattaaagatttaaacgttagacctaaaaccataaaaaccctagaagaaaacctaggcattaccattcaggacataggcatgggcaaggacttcatgtccaaaacaccaaaagcaatggcaacaaaagacaaaattgacaaatgggatctaattaaactcaagagcttctgcacagcaaaagaaactactatcagagcgaacaggcaacctacaacatgggagaaaattttcgcaacctactcatctgacaaagggctaatatccagaatctacaatgaactcaaacaaatttacaagaaaaaaacaaacaaccccatcaaaaagtgggcgaaggacatgaacagacacttctcaaaagaagacatttatgcagccaaaaaacacatgaaaaaatgctcatcatcactggccatcagagaaatgcaaatcaaaaccactatgagatatcatctcacaccagttagaatggcaatcattaaaaagtcaggaaacaacagagcatcactcttgtctggtgagtccagcgtggttcatcattgcatctggacttcagccagcagcaagtgggaacagaactctgtgggtcccaagcccttcttgtatctttgtgactgtaccactctagtgacttcttctgggcaacaaagtgagatcctgtctcaaaaaaaggaagaggaggagaagaagaagaagaagaagaagaagaagaagaagaaggaggaggaggaggaggaggaggaggaggaggaggaggaggaagagagaagaggaggaggaaaagaaagaggttacgtgaattag

SEQ ID NO: 124479 - DNA, 2868 bp, Homo sapiens
atgcccttgagagccttcaacccagtcagctccttccggtgggcgcggggcatgactatcgtcgccgcacttatgactgtcttctttatcatgcaactcgtaggacaggtgccggcagcgctctgggtcattttcggcgaggaccgctttcgctggagcgcgacgatgatcggcctgtcgcttgcggtattcggaatcttgcacgccctcgctcaagccttcgtcactggtcccgccaccaaacgtttcggcgagaagcaggccattatcgccggcatggcggccgacgcgctgggctacgtcttgctggcgttcgcgacgcgaggctggatggccttccccattatgattcttctcgcttccggcggcatcgggatgcccgcgttgcaggccatgctgtccaggcaggtagatgacgaccatcagggacagcttcaaggatcgctcgcggctcttaccagcctaacttcgatcattggaccgctgatcgtcacggcgatttatgccgcctcggcgagcacatggaacgggttggcatggattgtaggcgccgccctataccttgtctgcctccccgcgtttgcgtcgcggtgcatggagccgggccacctcgacctgaatggaagccggcggcacctcgctaacggattcaccactccaagaattggagccaatcaattcttgcggagaactgtgaatgcgcaaaccaacccttggcagaacatatccatcgcgtccgccatctccagcagccgcacgcggcgcatctcgggcagcgttgggtcctggccacgggtgcgcatgatcgtgctcctgtcgttgaggacccggctaggctggcggggttgccttactgcgaacgtgaagcgactgctgctgcaaaacgtctgcgacctgagcaacaacatgaatggtcttcggtttccgtgtttcgtaaagtctggaaacgcggaagtcagcgccctgcaccattatgttccggatctgcatcgcaggatgctgctggctaccctgtggaacacctacatctgtattaacgaagcgctggcattgaccctgagtgatttttctctggtcccgccgcatccataccgccagttgtttaccctcacaacgttccataaccgggcatgttcatcatcagtaacccgtatcgtgagcatcctctctcgtttcatcggtatcattacccccatgaacagaaatcccccttacacggaggcatcagtgaccaaacaggaaaaaaccgcccttaacatggcccgctttatcagaagccagacattaacgcttctggagaaactcaacgagctggacgcggatgaacaggcagacatctgtgaatcgcttcacgaccacgctgatgagctttaccgcagctgcctcgcgcgtttcggtgatgacggtgaaaactctgacacatgcagctcccggagacggtcacagcttgtctgtaagcggatgccgggagcagacaagcccctaaaccagacatttatcgactatcgaaccggaagattacaacctgctattccgcagagtctccctgaagctctccgtttggctgccgacctggcagagcaaaagcaacggctggagcaaaaaatgcttatggatgcacctaaagtcgaattcgctgaacgcgttgctaccgccagcggggttctaatcggcaactatgccaaagtgctcggcctgggccaaaactatctcttcacctggttgcgtgataacggaattctgatcgcaaccggtgaacgcaggaacgtccccaaacaagaatacatatctcgtgggtatttcacccttaaagaaaccgtgatcgatacaagcaatggaagcaggatttctttcacgactcgtataaccggcaaaggtcagcagtggctgatgaagcgattgcttgatgctggtgtgctggtacctgtcgcggcaacgctaacagacgtagtaagaaccaccagcattgtaatgctggctaaagtcactttcctgagctgtataacgatgagcgattttactttttctggctatgaattggcctgctttgtaacacactccggtctatcccgtagcgccgggcatatcctgtcgcaatgtgcaaatctcgcggcaacaaccagtgaatacttcattcacaagcctcaccgcctgatcgcggcagaaactggttatagccaatcaaccgtcgttcgtgcattccgtgaagctgtaaacaaaggaattctgtctgtagagattgttatcggcgatcaccgtgaacgtcgcgctaacctgtaccggtttacaccatcctttttggccttcgcacaacaagccaaaaatgcgctgatagaaagcaaattaaagatctcttcagcggcaaccaagatcctctacgccggacgcatcgtggccggcatcaccggcgccacaggtgcggttgctggcgcctatatcgccgacatcaccgatggggaagatcgggctcgccacttcgggctcatgagcgcttgtttcggcgtgggtatggtggcaggccccgtggccgggggactgttgggcgccatctccttgcatgcaccattccttgcggcggcggtgctcaacggcctcaacctactactgggctgcttcctaatgcaggagtcgcataagggagagcgtcgaggagaacttctaaagatcgtcgttttgccaggtgaccacgttggtcaagaaatcacagccgaagccattaaggttcttaaagctatttctgatgttcgttccaatgtcaagttcgatttcgaaaatcatttaattggtggtgctgctatcgacctgcaggggggggggggaaagccacgttgtgtctcaaaatctctgatgttacattgcacaagataa

SEQ ID NO: 124480 - DNA, 1641 bp, Homo sapiens; identical to SEQ ID NO: 121942

SEQ ID NO: 124481 - DNA, 3690 bp, Homo sapiens
  misc_feature (1)...(3690): n = a,t,c or g
atgattgaaagtatactggaggctacacgtgggttaaatgcagatactacgcccttttaccttggggccaaaaaaggaagtttgggagctcagaaactggcaaacacatgctttaatgaaattgaaaaacaagctcaagctgcggataaaatgaaggagcaggaagacctggccaaggtggtatctaaagaagaatcaatttactttgacgagccagtggagttaaggagcagttctttctctagctgggatgacagttcagattcctattggaaaaaagagaccagcaaagatactgaaacagttctgaaaaccacaggctattcagacagacctactgctcgccgcaagccagattatgagccagttgaaaatacagatgaggcccagaagaagtttggcaatgtcaaggccatttcatcagatatgtattttggaagacaatcccaggctgattatgagaccagggcccgcctagagaggctgtcggcaagttcctccataagctcggctgatctgttcgaggagccgaggaagcagccagcagagaacaaagatccattaaatttttttgaccctgtgtggatgccaaaccaaccctggttcctggcacctcgtggtcattgtaaggtgcaccctggggacaggtgccggcagcgctctgggtcattttcggcgatggaccgctttcgctggagcgcgacgatgatcggcctgtcgcttgcggtattcggaatcttgcacgccctcgctcaagccttcgtcactggtcccgccaccaaacgtttcggcgagaagcaggccattatcgccggcatggcggccgacgcgctgggctacgtcttgctggcgttcgcgacgcgaggctggatggccttccccattatgattcttctcgcttccggcggcatcgggatgcccgcgttgcaggccatgctgtccaggcaggtagatgacgaccatcagggacagcttcaaggatcgctcgcggctcttaccagcctaacttcgatcattggaccgctgatcgtcacggcgatttatgccgcctcggcgagcacatggaacgggttggcatggattgtaggcgccgccctataccttgtctgcctccccgcgtttgcgtcgcggtgcatggagccgggccacctcgacctgaatggaagccggcggcacctcgctaacggattcaccactccaagaattggagccaatcaattcttgcggagaactgtgaatgcgcaaaccaacccttggcagaacatatccatcgcgtccgccatctccagcagccgcacgcggcgcatctcgggcagcgttgggtcctggccacgggtgcgcatgatcgtgctcctgtcgttgaggacccggctaggctggcggggttgccttactgcgaacgtgaagcgactgctgctgcaaaacgtctgcgacctgagcaacaacatgaatggtcttcggtttccgtgtttcgtaaagtctggaaacgcggaagtcagcgccctgcaccattatgttccggatctgcatcgcaggatgctgctggctaccctgtggaacacctacatctgtattaacgaagcgctggcattgaccctgagtgatttttctctggtcccgccgcatccataccgccagttgtttaccctcacaacgttccataaccgggcatgttcatcatcagtaacccgtatcgtgagcatcctctctcgtttcatcggtatcattacccccatgaacagaaatcccccttacacggaggcatcagtgaccaaacaggaaaaaaccgcccttaacatggcccgctttatcagaagccagacattatcgcttctggagaaactcaacgagctggacgcggatgaacaggcagacatctgtgaatcgcttcacgaccacgctgatgagctttaccgcagctgcctcgcgcgtttcggtgatgacggaaacagctatgacccatggatttacgccaagcttgcatgcctgcaggtcgaaggccgtggcggcggcacttttgcccatgaattgctcgctgtggagtacgcaggctggatttctcccgcgtttcggctgaaggtaaaccagacatttatcgactatcgaaccggaagattacaacctgctattccgcagagtctccctgaagctctccgtttggctgccgacctggcagagcaaaagcaacggctggagcaaaaaatgcttatggatgcacctaaagtcgaattnnntgaacgcgttgctaccgccagcggggttctaatcggcaactatgccaaagtgctcggcctgggccaaaactatctcttcacctggttgcgtgataacggaattctgatcgcaaccggtgaacgcaggaacgtccccaaacaagaatacatatctcgtgggtatttcacccttaaagaaaccgtgatcgatacaagcaatggaagcaggatttctttcacgactcgtataaccggcaaaggtcagcagtggctgatgaagcgattgcttgatgctggtgtgctggatgacgtggcaataaagaataagaagtcacaagttaaaaaaacaaaaagatcagtttccggcggtgccggaacaaccagcctcaaaaaattgacttcatggatcgctaaggcaaaagcaaaggctgacaatctgcggttatccaaaaaacgcactcaaaaacatgagttcaagcagaaagtagaggcggctgcgcggaaatatgcttacctgaagaacaagcgttcgcctgatattggcgggatatcaaacttcgataacctaccgcattgcatgacgatcctctacgccggacgcatcgtggccggcatcaccggcgccacaggtgcggttgctggcgcctatatcgccgacatcaccgatggggaagatcgggctcgccacttcgggctcatgagcgcttgtttcggcgtgggtgaccacgttggtcaagaaatcacagccgaagccattaaggttcttaaagctatttctgatgttcgttccaatgtcaagttcgatttcgaaaatcatttaattggtggtgctgctatcgacctgcaggggggggggggaaagccacgtgcgacaatctatcgattgtatgggaagcccgatgcgccagagttgtttctgaaacatggcaaaggtagcgttgccaatgatgttacagatgagatggtcagactaaactggctgacggaatttatgcctcttccgaccatcaagcattttatccgtactcctgatgatgcatggttactcaccactgcgatccccgggaaaacagcattccaggtattagaagaatatcctgattcaggtgaaaatattgttgatgcgctggcagtgttcctgcgccggttgcattcgattcctgtttgtaattgtccttttaacagcgatcgcgcgcaatcacgaatgaataacggtttggttgatgcgagtgattttgatgacgagcgtaatggctggcctgttgaacaagtctggaaagaaatgcataagcttttgccattctcaccggattcagtcgtcactcatggtgatttctcacttgataaccttatttttgacgaggggaaattaataggttgtattgatgttggacgagtcggaatcgcagaccgataccaggatcttgccatcctatggaactgcctcgaaacggctttttcaaaaatatggtattga

SEQ ID NO: 124482 - DNA, 1059 bp, Homo sapiens
atggataaattcctcgacacatacaccctcccaagactaaaacaggaagaagttgaatctctgtatagaccaataacaggctctgaaattgaggcaataatcaatagcttaccaaccaaaaaaagtccaggaccagatggattcacagctgaattctaccagaggtacaaggaggaactggtaccattccttctgaaattattccaatcaatagaaaaagagggaatcctcccaaactcattttatgaggccagcatcatcctgataccaaagcctggcagagacacaaccaaaaaagagaattttagaccaatatccttgatgaacattgatgcaaaaatcctcaataaaatactgacaaaccgaatccagcagcacatcaaaaagcttatccaccatgatcaagtgggcttcatccctgggatggcaattaggcaggagaaggaaataaagggtattcaattaggaaaagaggaagtcaaattgtccctctttgcagatgacatgatagtatatctagaaaaccccattgtctcagcccaaaatctccttaagctgataagcaacttcagcaaagtctcaggatacaaaatcaatgtacaaaaatcacaagcattcttatacaccaataacagacaaacagagagccaaatcatgagtgaactcccattcatgattgcttcaaagagaataaaatacctaggaatccaacttacaagggacgtgaaggacctcttcaaggagaactacaaaccactgctcaatgaaataaaagaggatacaaacaaatggaagaacattccatgctcatgggtaggaagaatcaatatcgtgaaaatggccatactgcccaaggtaatttacagattcaatgccatccccatcaagctaccaatgactttcttcacagaattggaaaaaactactttcaagttcatatggaaccaaaagagagcccgcatcgccaagtcaatcctaagccaaaagaataaagctgaaggcatcatgctacctgacttcaaactatactacaaggctacagtaaccaaaacagcataa

SEQ ID NO: 124483 - DNA, 2265 bp, Homo sapiens; identical to SEQ ID NO: 116371

SEQ ID NO: 124484 - DNA, 2040 bp, Homo sapiens
atggaactcggtccctggctgcaagaagcccccacagcagacggagggacagccacaccagcagagtcgtttgtgacagcgcagaactgcaacagggagacaagctgtgaccgtctccgggagctgcatgtgtcagaggttttcaccgtcatcaccgaaacgcgcgaggcagctgcggtaaagctcatcagcgtggtcgtgaagcgattcacagatgtctgcctgttcatccgcgtccagctcgttgagtttctccagaagcactttacgaaacacggaaaccgaagaccattcatgttgttgctcaggtcgcagacgttttgcagcagcagtcgcttcacgttcgctcgcgtatcggtgattcattctgctaaccaccgggtcctcaacgacaggagcacgatcatgcgcacccgtggccaggacccaacgctgcccgagatgcgccgcgtgcggctgctggagatggcggacgcgatggatatgttctgccaagggttgcatggcctgcaacgcgggcatcccgatgccgccggaagcgagaagaatcataatggggaaggccatccagcctcgcgtcgcgaacgccagcaagacgtagcccagcgcgtcggccgccatgccggcgataatggcctgcttctcgccgaaacgtttggtggcgggaccagtgacgaaggcttgagcgagggcgtgcaagattccgaataccgcaagcgacaggccgatcatcgtcgcgctccagcgaaagcggtcctcgccgaaaatgacccagagcgctgccggcacctgtcctacgagttgcatgataaagaagacagtcataagtgcggcgacgatagtcatgccccgcgcccaccggaaggagctgactgggataaggtgaacttcactctgtgctcgggccctcggctggaggccgcgctggcctccaaggacagggagatcctgcggctgctgaaggacgtgcagcacctccagagctcactgcaggagctggaggaggcatccgccaaccagatcgccgacctggagcggcagctcacggccaagtccgaggccatagaaaagctggaagagaagctccaggcccagtctgactatgaggaaattaaaacggagctgagcatcctgaaagccatgaagctggcctccagcacctgcagcctcccccagggcatggccaagcctgaagactcactgcttattgcaaaggaggccttcttccccacgcagaaattccttctggagaagcccagcctcctggccagccctgaggaagacccatcagaggacgattccatcaaggattcactgggcacggagcagtcctacccctcccctcagcagctcccacctccaccagggccagaagaccccctgtctcccagccccgggcagcccctgctgggccccagcttggggcctgacggcactcggactttctcgctgtcccccttccccagcctggcatcaggggagagactgatgatgcccccagccgccttcaagggagaggcgggcggcctgctggtgttccccccagccttctatggcgccaagccccccacagcccctgccaccccggcccctggccctgagccactgggcggtcctgagcccgcggatggtggtgggggcggagcggcggggcccggggcagaggaggagcagctggacacggcagagatcgccttccaggtgaaggagcagctgctgaaacacaacatcgggcagcgggtgtttgggcattacgtgctggggctgtcgcagggctcggtcagcgagatcctagcccggcccaagccctggcgcaagctcacggtgaagggcaaggagcccttcatcaagatgaagcagttcctgtcggatgagcagaatgtactggcgctcaggaccatccaagtgcggcagcgaggtgagtgcccaagagggcccgtccccgctggccaccacgccaggtccagggcatcagggctgggggctgaggacacgcgctctgggttcaaagcccagctctaccaccacctggctgtgtga

SEQ ID NO: 124485 - DNA, 2409 bp, Homo sapiens
atggagctgaaaaccaaggctcgagaactacgtgaagaatgcagaagcctcaggagcccatgcaatcaactggaagaaagggtatcagcgatggaagatgaaatgaatgaaatgaagcgagaagggaagtttagagataaaagaataaaaagaaatgagcaaagcctccaagaaatatgggactttgtgaaaagaccaaatctacgtctgattggtgtacctgaaagtgatggggagaatggaaccaagttggaaaacactctgcaggatattatccaggagaacttccccaatctagcaaggcaggccaacattcagattcaggaaatacagagaacgccacaaagatactcctcgagaagagcaactccaagacacataattgtcagattcaccaaagttgaaatgaaggaaaaaatgttaagggcagccagagagaaagcaccacaccacacctattccaaaattgaccacatacttggaagtaaagttctcctcagcaaatgtaaaagaacagaaattataacaaactatctctcagaccacagtgcaatcaaactagaactcaggataaagaatctcactcaaaaccactcaactacatggaaactgaacagcctgctcctgaatgactactgggtacacaacgaaatgaaggcagaaataaagatgttctttgaaaccaacgagaacaaagacacaacataccagaatctctgggacacattcaaagcagtgtgtagagggaagtttatagcactaaatgcccacaagagaaagcaggaaagatccaaaattgacaccctaacatcacaattaaaagaactagaaaagcaagagcaaacacattcaaaagctagcagaaggcaagaaataactaagatcagaggagaactgaaggaaatagaggcacaaaaaacccttcaaaaaatcaatgaatacaggagctggttttttgaaaggatcaacaaaatagatagaccgctagcaagactaataaagaaaaaaagagagaagaatcaaatagacacaataaaaaatgataaaggggatatcaccactgatcccacagaaatacaaattaccatcagagaatactacaaacacctctacgcaaataaactagaaaatctagaagaaatggataaattcctcgacacatacactctcccaagactaaaccaggaagtagttgaatctctgaagagaccaataacaggagctgaaattgtggcaataatcaatagcttaccaaccaaaaagagtccaggaccagatggattcacagccgaattctaccagagagacataaccaaaaaagagaattttagaccaatatccttgatgaacgttgatgcaaaaatcctcaataaaatactggcaaaacgaatccagcagcacatcaaaaagcttatccaccatgatcaattgggcttcatccctgggatgcaaggctggttcaatatacccaaatcaataaatgtaatccagcatataaacagagccaaagacaaaaaccacatgattatctcaatagatgcagaaaaggcctttgacaaaattcaacaacccttcatgctaaaaactctcaataaattaggtattgatgggacgtatttcaaaatactaagagctatctatgacaaacccacagccaatatcatactgaatgggcaaaaagtggaagcattccctttgaaaactggcacaagacagggatgccctctctcaccactcctattcaacatagtgttggaagttctggccagggcaattaggcaggagaaggaaataaagggtattcagttaggaaaagaggaagtcaaattgtccctgtttgcagacgacatgattgtatatctagaaaaccccattgtctcagcccaaaatctccttaagctgataagcaacttcagcaaagtctcaggatacaaaatcaatgtacaaaaatcacaagcattcttatacaccaacaacagacaaacagagagccaaatcatgagtgaactcccattcacaattgcttcaaagagaataaaatacctaggaatccaatttacaagggacgtgaaggacctcttcaaggagaactacaaaccactgctcaaggaaataaaagaggatacaaacaaatggaagaatattccatgctcatgggtaggaagaaacaatatcgtgaaaatggccatactgcccaaggtaatttatagattcaatgccatccctatcaagctaccaatgcctttcttcacagaattggaaaaaactactttaaaattcctatggaaccaaaaaagagcccgcatcgccaagtcaatcctaagccaaaagaacaaagctggaggcatcacactacctgacttcaaattatactacaaggctacagtaaccaaaacagcatggtactga

SEQ ID NO: 124486 - DNA, 2616 bp, Homo sapiens; identical to SEQ ID NO: 118718

SEQ ID NO: 124487 - DNA, 4073 bp, Homo sapiens
aactagaaaagcaagagcaaacacattcaaaagctagcagaaggcaacaaataactaaaatcagagcagaactgaaggaaatagagacacaaaaaacccttcaaaaaatcaatgaatccaggagctggttttttgaaaggatcaacaaaattgatagaccgctagcaagactaataaagaaaaaaagagagaagaatcaaatagacacaataaaaaatgataaaggggatatcaccaccgatcccacagaaatacaaactaccatcagagaatactacaaacacctctacgcaaataaactagaaaatctagaagaaatggataaattcctcgacacatacactctcccaagactaaaccaggaagaagttgaatctctgaatagaccaataacaggctctgaaattgtggcaataatcaatagtttaccaaccaaaaagagtccaggaccagatggattcacagccgaattctaccagaggtacaaggaggaactggtaccattccttctgaaactattccaatcaatagaaaaagagggaatcctccctaactcattttatgaggccagcatcattctgataccaaagccgggcagagacacaaccaaaaaagagaattttagaccaatatccttgatgaacattgatgcaaaaatcctcaataaaatactggcaaaccgaatccagcagcacatcaaaaagcttatccaccatgatcaagtgggcttcatccctgggatgcaaggctggttcaatatacgcaaatcaataaatgtaatccagcatataaacagagccaaagacaaaaaccacatgattatctcaatagatgcagaaaaagcctttgacaaaattcaacaacccttcatgctaaaaactctcaataaattaggtattgatgggacgtatttcaaaataataagagctatctatgacaaacccacagccaatatcatactgaatgggcaaaaactggaagcattccctttgaaaactggcacaagacagggatgccctctctcaccgctcctattcaacatagtgttggaagttctggccagggcaatcaggcaggagaaggaaataaagggtattcaattaggaaaagaggaagtcaaattgtccctgtttgcagacgacatgattgtttatctagaaaaccccatcgtctcagcccaaaatctccttaagctgataagcaacttcagcaaagtctcaggatacaaaatcaatgtacaaaaatcacaagcattcttatacaccaacaacagacaaacagagagccaaatcatgggtgaactcccattcacaattgcttcaaagagaataaaatacctaggaatccaacttacaagggatgtgaaggacctcttcaaggagaactgcaaaccactgctcaaggaaataaaagaggacacaaacaaatggaagaacattccatgctcatgggtaggaagaatcaatatcgtgaaaatggccatactgcccaaggtcatttacagattcaatgccatccccatcaagctaccaatgactttcttcacagaattggaaaaaactactttaaagttcatatggaaccaaaaaagagcccgcattgccaagtcaatcctaagccaaaagaacaaagctggaggcatcacactacctgacttcaaactatactacaaggctacagtaaccaaaacagcatggtactggtaccaaaacagagatatagatcaatggaacagaacagagccctcagaaataatgccgcatatctacaactatctgatctttgacaaacctgagaaaaacaagcaatggggaaaggattccctatttaataaatggtgctgggaaaactggctagccatatgtagaaagctgaaactggatcccttccttacaccttatacaaaaatcaattcaagatggattaaagatttaaacgttaaacctaaaaccataaaaaccctagaagaaaacctaggcattaccattcaggacataggcgtgggcaaggacttcatgtccaaaacaccaaaagcaatggcaacaaaagacaaaattgacaaatgggatctaattaaactaaagagcttctgcacagcaaaagaaactaccatcagagtgaacaggcaacctacaacatgggagaaaattttcgcaacctactcttctgacaaagggctaatatccagaatctacaatgaactcaaacaaatttacaagaaaaaaacaaaaaaccccatcaaaaagtgggcaaaggacatgaacagacacttctcaaaagaagacatttatgcagccaaaaaacacatgaagaaatgctcatcatcactggccatcagagaaatgcaaatcaaaaccactatgagatatcatctcacaccagttagaatggcaatcattaaaaagtcaggaaacaacagaaacatggatggagctggaggccattatcctaagcaaactaatgaaggaacagaaaaccaaataccagatgttctcacttgtaagtgggagctaaatgataagaacatatggacacaaagaggggaacaacacaccctggagcctgttggaggagaaggtgaattaagaaaagataatcactcaaccaaaaatgaccagtacgataataggcattttcaactggctgtaggaaatggccttatggctaagaccttcatggtcagtttcttctataaagccagtgcctacgttgtacccacaggagaattgccagatttagatataattcagttaaaacaatttggaaacgcattgtcacatctaacagtaggaacctcagtcactcaaatacaaaatttaaatacaatgggaataattggatcccaagatagcagggaccaactggccacactcaaatgtcaaggtaaaggggacccaaaatatcaatgtgatcctccagttaaagtaggtgctaatggaggtcagataattaatgaagttttagctcaggtccaacttacagtgggtccaaagacaaatggatattggagaatgacagtggattatcataagcttaaccaagatgtgactccaattgtagctgctgtaccagatgtggtttcattgcttgaggttatatcaactcttcaaaaagacttctattgctttttccttctgcaaaatatcacactggtccattatattgatggcattatgctgactgaatccagtgagcaagaagtagcagacacactggacttattgactagtatacgtggactcatggaatgccttatccaccatcatggtatcccacacagcattgcctctgaccaaggccctcactttatggctaaagaattgtgggagtgggctcatgctcatggaattcactggtcttaccatattccccatcatcctgaagcagctggattgatagaatggcggaatgaccttttgaagtcacaattacaacaccaactaggtgacaatgctttgcagggctggggcaaagttctccagaaggccatgtatgctctgaatcagcatccaatatatgttactgtttttcccattgccaggattcataagtcctggaatcaaggggtggaagtagaagtggcatcactcaccatcacccctagtgatccactagcaaaatttttgctttccgttcccacaacattacattctcctggcctagaggtcttagttccagctggaggaatgctgccaccaggagacacaacaatcccattgaactggaagttaatattgccacctggacactttgggctcctcctacctttaagtcaacaggctaagaaggcagttacagtgttggctagggtgattgacccagactatcaggatgaaatcagtctactactccacaatggaggtaaggaagagtatgcatggaattcaggagatccattaggtgtctcttggtattaccatgccctgtcattaaggtcaatgagaactacaacagtgcaatccaggcaggattacaaatggcccagatacctcaggaatgaagatttgggtcatgttaccagggaaaaaaaacacaacctgctgaggtgcttgctgaaggctaagggaatatag

SEQ ID NO: 124488 - DNA, 3171 bp, Homo sapiens
atgattgtgtatctaaaaaacccaatcgtctcagcgcaaaatctcctcaagctgataagcaacttcagcaaagtctcaggatacaaaatcaatgtagaaaaatcacaagcattcttatacaccaataacagacaaacagagagccaaatcatgagtgaactcccattcacacttgcttcaaagagaataaaatacctaggaatccaacttacgagtgacgtgaaggacctcttcaaggagaactacaaaccactgctcaaggaaataaaagaggatacaaacaaatggaagaacattccatgctcatgggtaggaagaatcaatatcgtgaaaatggccatactgcccaagcccccagacaaccacttgcatcagtatcacccaaaagaagcagattcctgggccccaacttctaccactgaatcagaacctctatggaagataaaccctgcgctgcctgaggaaacagtgatggcctcccctgaggcagttgccaggaaagataatgtagagtctcctcaggacccatctccaacacccctgtttgcttctagacctataactggactaaagtcccagtgggcccctagagtgccagaatgcataattagcacagacatacttagcaactggcagaacccccacattggctccccaactggtggggtgagggctgttatggtgggaaaggccaaatggaagccattagaggtgcctctacctagaaaaatagtaaatcaaaaacaatgtcacatccctggagggattgcagagattagtgctgccattaaggccttaaaagatgcaggggcaatgattcctacaatatccctgttcgactctactcagcctgtgcagaagacaggtggattttggagaatgacagtggattattgtaagcttaaccaagtggtgtctccaattgcagctgctgtaccagatgtggtttcattgcttgagcaaattaacacaccttcgggagtatatcaactctccagcttggtgtttaatcttcagagagaccttgatcgcctttcccttccacaagatatcacactggtccattacattgataacactatactgattggatccagtgacagagaagtagcaaacacactggacttattgcgcatttatcgagtgactggaaaggctgccagttttgagtggggtctacaacaggagaaggctctgcagcaggtccaggctgctctgccgcttgcgccatatgatccagcagatccaatggtgcttgaggtgtcagtggcagacagggatgctgtttggagcctttggcagcccgccataggtgaatcacagtggaggcctccaggattttggagcaaggccctattttctgcagataactgctctccttttgagaaacagctcttggcctgttactgggctttggtagaaactgaacgtttgattatgggtcaagtcacaaggggaccagaactgcctatcatgaactgggtgctttctgacccattagccataaagtgggtcatgaacagcaatattccatcatcaagtggaaatggtatatatgtggtcaggcaccagcaggtcctgagggcacaaggtgatcagccagctacttggtggcaggttgattatattggatctcttccatcaaggaaagggcagcagcttgccctcactggaatagacacttactccagatataggtttacctatcctgtacgcaatgcttttataaagactaccatccgtggactcacagaatgctttatccaccatcatgcatcaacagcttgtaatagcgtctgccccgattacgctgaacttcacgtgagatcgtcgaaggactgcgattcagcgccagtacgtatcgcacgaatgctcattttggctgacaaaccagctcgtatctcctcgcgctcagacagtgtcagactagtcattggagaacagatgattgatgtcttagggccggagaaacgcagacggcgtaccacacaggaaaagatcgcaattgttcagcagagctttgaaccggggatgacggtctccctcgttgcccggcaacatggtgtagcagccagccagttatttctctggcgtaagcaataccaggaaggaagtcttactgctgtcgccgccggagaacaggttgttcctgcctctgaacttgctgccgccatgaagcagattaaagaactccagcgcctgctcggcaagaaaacgatggaaaatgaactcctcaaagaagccgttgaatatggacgggcaaaaaagtggatagcgcacgcgcccttattgcccggggatggggattgcacgtcattctcagacgaaccgatgactggatggatggccgccgcagtcgtcacactgatgatacggatgtgcttctccgtatacaaccatgtttatcggagagctgccaacgtatggttatcgtcgaggtatggtgacgcttcgcagaacaggcagaacgtgaatgatatggcctgcgaatcaatgccaaaccgtgttttaccggaatcgatgcccagagatgcgctgttgcctgaagcgaaaaacctgctgtaccgtccatcgagaccgggcacataccaggcagagtggcccgtgaaagaaaagcaatcaagcgatggtgctctgacgggttcgagttctgctgtgataacggagagagactgcgtggtcacgttcgcgctggactgctgtgatctggagtggctgacggataatggttcatgctaccgagctaatgaaacacgccagttcgcccggatgttgggacttgaaccgaagaacacggcggtgcggagtccggagagtaacggaatagcagagagcttcgtgaaaacgataaagcgtgactacatcagtatcatgcccaaaccagacgggggcaaatccacaggtgaactacgctcctctgtttgttacgcaataaaaactggtgttttcgactatgcaaaacagtttccctcctcacgcaatctggaaaaatttggtgaggcccgacaagatttaaccataaaagaactggctgaaaaatttctggcactgaaagaaactgaagtcgccaaaacatcactcaacacataccgtgccgtcatcaaaaatatcctgagcataatcggtgaaaaaaatcttgcctcatcgattaataaagaaaaattactggag

SEQ ID NO: 124489 - DNA, 1545 bp, Homo sapiens; identical to SEQ ID NO: 124207

SEQ ID NO: 124490 - DNA, 1011 bp, Homo sapiens
atgattgtttatctagaaaaccccatcgtctcagcccaaaatctccttaagctgataagcaacttcagcaaagtctcaggatacaaaatcaatgtacaaaaatcacaagcattcttatacaccaacaacagacaaacagagagccaaatcatgagtgaactcccattcacaattgcttcaaagagaataaaatacctaggaatccaacttacaagggatgtgaaggacctcttcaaggagaactacaaaccactgctcaaggaaataaaagaggacacaaacaaatggaagaacattccatggctcatgggtaggaagaatcaatatcgtgaaaatggccatactgcccaagtattggaagttacggccagggcaatcagggaagaaaaagaaagaaaggatattcatataggaagagcggaagtcaaattgtctctgtttgcagatgacatgattgtatatttagaaaaccccatcgtctcagcccaaaatctccttaagctggtaagcaacttcagcaaagtctcaggatacaaaatcaatgagcaaaaatcacaagcattcctattcaccaataatagacaaacagagagccaaatcatgagtgaactcccattcacaattgccacaaagagaataaaatacctaggaatacaatttacaagggatgtgaaggacctcttcaaggagaactacaaaccactgctcaaggaaataagagagggcacaaacaaatggaaaaacattccatgctcatggataggaaggatcaatatcatgaaaatggccatactgcccaaagtaatttatagattcaatattatccccattaagctaccattgacattcttcacagaattagaaaaaactactttaaacttcagatggaaccaaaaaagagcccatatagccaagacaatcttaaacaaaaagaacaaagctggaggcatcatgctacctgacttcaaactatactacaaggctacagtaaccaaaacatcatggtactga

SEQ ID NO: 124491 - DNA, 2244 bp, Homo sapiens; identical to SEQ ID NO: 119518

SEQ ID NO: 124492 - DNA, 2682 bp, Homo sapiens
atgattatctcaatagatgcagaaaaggcctttgacaaaattcaacaacacttcatgctaaaaactctcaataaattaggtattgatgggacatatctcaaaataataagagctatctatgacaaacccacagccaatatcatactgagtgggcaaaaactggaagcattccctttgaaaactggcacaagacagggatgccctctctcaccactcctattcaacatagtgttggaagttctggccagggcaattaggcaggagaaggaaataaagggtattcaattaggaaaagaggaagtcaaattgtccctgtatgcagatgacatgattgtatatctagaaaaccccattgtctcagcccaaaatctccttaagctgataagcaacttcagcaaagtctcaggatacaaaatcaatgtacaaaaatcacaagcgttcttatacaccaataacagacaaacagagagccaaatcatgagtgaactcccattcacaattgcttcaaagagaataaaatacctaggaatccaacttacaagggatgtgaaggacctcttcaaggagaactacaaaccactgctcaatgaaataaaagaggatacaaacaaatgcaagtacattccatgctcatgggtaggaaaaatcaatatcatgaaaatggccatactgcctaaggttatttatagattcaatgccatccccatcaagctaccaatgactttcttcacagaattggaaaaaactactttaaagttcatatggaaccacaaaggagcccgcatcaccaagtcaatcctaagccaaaagaacaaagctggaggcatcaggctacctgacttcaaactatactacaagactacagtaaacaaaacagcatgctactggtaccaaaacagagacagagatcaatggaacagaacagagccctcagaaataacgccacatatctacaactatctgatctttgacaaacctgacaaaaacaagcaatggggaaaggattccctatttaataaatggtgctgggaaaactggctagccatatgtagaaagctgaaactggatcccttctttacaccttatacaaaaattaattcaagatggattaaagacttaaacgttagacctaaaaccataaaaaccctagaagaaaacttaggcattaccattcaggacataggcgtgggcaatgacttcatgtctaaaacaccaaaggcaatggcaacaaaagccaaaattgacaaatggaatctaattcaactaaagagcttctgcacagcaaaagaaactaccatcagagtgaacaggcaacctacaaaatgggagaaaattttcgcaacctactcatctgacaaagggctaacatccagaatctacaatgaactcaaacaaatttacaagaaaaaaacaaacaaccccatcaaaaagtgggtgaaggacatgaacagacacttctcaaaagaagacatttatgcagccaaaaaacacatgaaaaaatgctcaccatcactggccatcagagaaatgcaaatcaaaaccacaatgagataccatctcacaccagttagaatggcaatcattaaaaagtcaggaaacaacagttcactgaacaatgtgatgaaaggaaatgatgaactgggggattctgtctcccggtttcagaagcagacactgagcctcaaatctgctaagattgccctgtgtgagagtcttatctcctgtagagaaagagctaaaattgtggaaaaacagacacaagctcttatcatgagagtggctgacctgaaacaaaaggtgcatgcacagccttgccaggctgccagttttaagtgggttccagaacaggagaaggctctgcaacaggtcaaggctgctgtgcaagctgctctgccacttgggccatatgacccagcagatccaatggtgcttgaggtgtcagtggcagataggggtgctctttggagcctttggcaggcttccatgggtgaatcacagaggatgtctctaggattttggagcaaggccctgccttcttctgcatataactactcttcctttaagagacagctcttggcctgttactgggttggtacagccataaagtgggtcttacatagcagcattccatcaccaaatggaagtggtatacatgtgactgggcttcagcaggtcctgaaggcacaacctgcactgatggtctcattgggaattccctatgaacagttgacagaggaagagaggacaagagcctgcttgacagatggttctgtaaaatatgcaagcaccacccgaaatgggacagctgaagcactatatcccctttctaggataaccctaagcaaggctgacttggctatggcagctgctgagtgcccagtttcccatcagctgaaaccaacactgagccctcaatatggcaccattcatcagggtgatcagccagctacctggtggcaggttgattatattgggactcttccattgtggaaaggccagagatttgtcctcactggaatagacacttacttcagatatgagtttgcctatcctgtaaataatgcttctgtgaagcctaccatctgtggactcacagaatgccttacctaccatcatggtattccacatggcattgcctctgaacaaggcattcactttacagctaaagaagtgtggcagtga

SEQ ID NO: 124493 - DNA, 2124 bp, Homo sapiens
atgcccttgagagccttcaacccagtcagctccttccggtgggcgcggggcatgactatcgtcgccgcacttatgactgtcttctttatcatgcaactcgtaggacaggtgccggcagcgctctgggtcattttcggcgaggaccgctttcgctggagcgcgacgatgatcggcctgtcgcttgcggtattcggaatcttgcacgccctcgctcaagccttcgtcactggtcccgccaccaaacgtttcggcgagaagcaggccattatcgccggcatggcggccgacgcgctgggctacgtcttgctggcgttcgcgacgcgaggctggatggccttccccattatgattcttctcgcttccggcggcatcgggatgcccgcgttgcaggccatgctgtccaggcagcctaacttcgatcattggaccgctgatcgtcacggcgatttatgccgcctcggcgagcacatggaacgggttggcatggattgtaggcgccgccctataccttgtctgcctccccgcgttgcgtcgcggtgcatggagccgggccacctcgacctgaatggaagccggcggcacctcgctaacggattcaccactccaagaattggagccaatcaattcttgcggagaactgtgaatgcgcaaaccaacccttggcagaacatatccatcgcgtccgccatctccagcagccgcacgcggcgcatctcgggcagcgttgggtcctggccacggtctggaaacgcggaagtcagcgccctgcaccattatgttccggatctgcatcgcaggatgctgctggctaccctgtggaacacctacatctgtattaacgaagcgctggcattgaccctgagtgatttttctctggtcccgccgcatccataccgccagttgtttaccctcacaacgttccataaccgggcatgttcatcatcagtaacccgtatcgtgagcatcctctctcgtttcatcggtatcattacccccatgaacagaaatcccccttacacggaggcatcagtgaccaaacaggaaaaaaccgcccttaacatggcccgctttatcagaagccagacattaacgcttctggagaaactcaacgagctggacgcggatgaacaggcagacatctgtgaatcgcttcacgaccacgctgatgagctttaccgcagctgcctcgcgcgtttcggtgatgacggaaacagctatgaccatgattacgccaagcttgcatgcctgcaggtcgaaggccgtggcggcggcacttttgcccatgaattgctcgctgtggagtacgcaggctggatttctcccgcgtttcggctgaaggtcatgcactggctgatgaaccgtatgcttgatgcaagaaaccgtgatcgatacaagcaatggaagcaggatttctttcacgactcgtataaccggcaaagcgccgggcatatcctgtcgcaatgtgcaaatctcgcggcaacaaccagtgaatacttcattcacaagcctcaccgcctgatcgcggcagaaactggttatagccaatcaaccgtcgttcgtgcattccgtgaagctgtaaacaaaggaattctgtctgtagagattgttatcggcgatcaccgtgaacgtcgcgctgacctgtaccggtttacaccatcctttttggtcttcgcacaacaagccaaaaatgcgctgatagaaagcaaatcaaagatcctcttcagcggcaaccaaggtgcggttgctggcgcctatatcgccgacatcaccgatggggaagatcgggctcgccacttcgggctcatgagcgcttgtttcggcgtgggtatggtggcaggccccgtggccgggggactgttgggcgccatctccttgcatgcaccattccttgcggcggcggtgctcaacggcctcaacctactactgggctgcttcctaatgcaggagtcgcataagggagagcgtcgaggagaacttctagcgcaatcacgaatgaataacggcttggttgatgcgagtgattctgatgacgagcgtaatggctggcctgttgaacaagtctggaaagaaatgcctaagctttttgccattctcacccggatttcagtcgtcacctcatggtga

SEQ ID NO: 124494 - DNA, 1497 bp, Homo sapiens
atggcccgcaaagatatccaggttctaatcattggaacctatgaatattaccttgtaaagggggaaaaggtcttaacaattttagcgattaagttaaaggtcttaaaatggagtggttatcctggattatgtctcccagaatatcatctgggagaggttgaaggcgaggatgacatggaagtgacagccatggatggcagatgcttagaggtgaagcagggatcggagcgactgcaggtcgcagaccaggaatgtgtaggagacgggtcggggagactgtgcccatttgacaggtgtgaatgcgaacagaggctgcagctggttagaccagggctgtgcaaccctagagccattgccttgaccacaaagccacagtctcctagtcctaatattaagagactagtcattggagaacagatgattgatgtcttagggccggagaaacgcagacggcgtaccacacaggaaaagatcgcaattgttcagcagagctttgaaccggggatgacggtctccctcgttgcccggcaacatggtgtagcagccagccaagaaggaagtcttactgctgtcgacgccggagaacaggttgttcctgcctctgaacttgctgccgccatgaagcagattaaagaactccagcgcctgctcggcaagaaaacgatggaaaatgaactcctcaaagaagccgttgaatatggacgggcaaaaaagtggatagcgcacgcgcccttattgcccggggatggggaacgaaccgatgactggatggatggccgccgcagtcgtcacactgatgatacggatgtgcttctccgtatacaccatgttatcggagagctgccaacgtatggttatcgtcgggtatgggcgctgcttcgcagacaggcagaacttgatggtatgcctgcgatcaatgccaaacgtgtttaccggatcatgcgccagaatgcgctgttgcttgagcgaaaacctgctgtaccgccatcgaaacgggcacatacaggcagagtggccgtgaaagaaagcaatcagcgatggtgctctgacgggttcgagttctgctgtgataacggagagagactgcgtgtcacgttcgcgctggactgctgtgatcgtgaggcactgcactgggcggtcactaccggcggcttcaacagtgaaacagtacaggacgtcatgctgggagcggtggaacgccgcttcggcaacgatcttccgtcgtctccagtggagtggctgacggataatggttcatgctaccgggctaatgaaacacgccagttcgcccggatgttggacttgaacctacatgaactagggcggcctgccaagagagtcgttgtaatctcttactccggggatcgtcctggaaataatcggggtatggatgcaaaggtggagtctggaatgtcggttggcaataccctgtatattcggctggctaccacgggttgttggcgaagaatcgggggcatgacaccggttccggtgtga

SEQ ID NO: 124495 - DNA, 2784 bp, Homo sapiens; identical to SEQ ID NO: 120657

SEQ ID NO: 124496 - DNA, 2448 bp, Homo sapiens
atgaacatcgatgcaaaaatcctcaataaagtactggcaaaccaaatccagcagcatatcggacagcttatccaccacgatcaagtgggcttcatccccaggatgcaaggctggttcaacatatgcaaatcaataaatgtaatccagcatgtaaacagaatcaacgacaaaaaccacatgattatctcactagacctagaaaaggcctttgacaaaattcaacagcccttcatgctaaaaactctcaataaattaggtattgatgggaagtatctcaaaacaataagagctatttatgacaaacccacagccaatatcatactgaatgggcaaaaactggaagcattccctttgaaaactggcacaagacagggatgccctctctcaccactcctattcaacatagtgttggaagttctggccagggcaatcaggcaggagaaagaaataaaaggtattcaattaagaaaagaggaagtcaaattgtccctgtttgcagatgacatgattgtatatttagaaaaccccatcatctcagccccaaatctccttaagctgataagcaacttcagcaaagtctcaggatacaaaatcaatgtacaaaaatcacaagcattcttatacaccaataagagacaaacagagagccaaatcatgagtgaactcccactcaaaactgcttcaaagagaataaaatacctaggaatccaagttacaagggttgtgaaggacctcttcaaggagaactacaaaccactgctcagtgaaataaaagaggatacaaacaaatggaagagcattccatgctcatgggtaggaagaatcggtattgtgaaaatggccaaactgcccaagagcttgaacgccgtgctgagagaaccattgctctcttcagggctgtcagggacatttaagtctgcagaagctgtctgctgccttttgttctactatgccctgccctcagaggtggaatctatagaggcagtaggccttgctgagctgtggtgggctctgcccagtttgtacttccaggccactttgtttacactacctataactagactaaagtaccagcaggctcccagagttaaactagaggcttatggaggtcaggtaattaatgaagctttagctcaggtaggccttacagtgggtctactgggtccctgggcttatcctgtggtcatttccccagtgtcagaatacataattggcatagacatagttagcagctggcagaaccctcacattggcttcctgactgctgccgtaccagatgtggtttcattgcttgagcaaattaacacatctcctggtacctggtatgcagccattgacttggtaaatgcctttttctccattgttgtccataaggcccatcagaagaaatttgccttcagctggcaaagccagcaatatacctttactctcctacctcaggggtatatcaactctcaggctttgtgtcataatcttatttggagagaacttgatcgctttctgcttccacaagatatcacagtggtccattacattgaagacattatgctgattggatccagcgagcaagaaatagcaaacacactggacttattggtgagacatttgtgtgtcagaggatgggagacaaatctgactaaaattaagggaacttctacttcagtaaaatttctaggggcccagtggtgtggagtctgtctcgatattccttctaaggtgaagaataacttgctgcatttggctcttcctacaaccaagaaagaggcacaacacctagtgggcctatttggattttggagacgatacattcttcatttagtcacaatgcaacctgaattgcctattatgaactgggtgctttctgatccatctagccataaagtgggatatgcacagcagcattccatcatcaaatggaagtggtataaacatgatcgggctcaagcaggtcctgaaggcacaaatgaactggctacagccactgctgagtgtccagtttgccagcagcagagaccaacactgagaccttcatatggcaccattccttggggtgatcatccagctacctggtggcaggttaattatactggacctattccatcatggaaagggccaaggtttgttctcactggaatagacacttactctggatatgggtttatctatcctgcatgcaatgcatatgccaagactaccatctatggacttatggaaagcgttattcaccgtcatggtattccacacagcattgcttttgaacaaggcactcactttatggctaaagaatttggcagtgggctcacgcttatgaaattcactggtcttaaccatgtttcccatcatctggaagcagctggattgatagaatggtggaatggccttttgaagtcacaattacaatgccaaataggtgacaacgctttgcagggctggggcaaagttctctaa

SEQ ID NO: 124497 - DNA, 1431 bp, Homo sapiens
atggatgaagctggaaactatcattctaagcaaactatcacaaggacagaaaaccaaacacagcatgttctcactcatagtgaggaaactgtggctcaggaagatgatgtgcctttgacaaggtcatggttgctgaaagcactcaagccccaagaggttcagagcagagccaagtcccctgatggccagtacaaagaggaggagaaagagaaggacagcagagggtgctctctgctggatttccccagcatgccagcttcccactgtgcagataaagcaaaatctgataggagcggggaggaagtgggctcaggctccaggagtacaagttggtatgcaagcaagtcattccaaacgccgcctccacacaaaccctctgagctgcaaattattaacctgcttaactctattgcagaaacaagcgctgctggggtgttggaagttctggccagggcaattaggcaggagaaggaaataaagggtattcaattaggaaaagaggaattcaaattgtccctgtttgcagatgacatgattgtatatctagaaaaccccattgtctcagcccaaaatctccttaagctgataagcaacttcagcaaagtctcaggatacaaaatcaatgtacaaaaatcacaagcattcttatacaccaataacagacaaacagagagccaaatcatgagtgaactcccattcacaattgcttcaaagagaataaaatacctaggaatccaacttacaagggatctgaaggacctcttcaaggagaactacaaaccactgctcaatgaaataaaagaggatacaaacaaatggaagaacattccatgctcatgggtaggaagaatcaatatcgtgaaaatggccatactgcccaagagggacgtgactgcaaattgtccaggttcttggcgttttgaacaaagaattggacaaaacacgcagcaaagaaagaatgaagcaacaaaagaacgaaagcagctctctcggctttcggctcggaggaggccaaggtgcaactttcttcggtcgtctcgaatccgggttcatccgacaccagccgcctccaccatgccgccgaagttccaccccaatgagatcaaagtcgtatacttcacgtgcactggagttgaagtcggtgccacttctgctctggcccccaagattggccccgcgggtctgtctccaaaagaggttggtgatgacattgccaaggtaacgggtgactggaagggcctgaggattacagtgaaactgaccattcagaacagacaggcccagattgaagtggtaccttctgcctccgccctgatcatcaaaaggaactaccaagagacagaaagaaacagaaaaacattaaacacagggggaatatcactttttatgagatcgtcaacattgctcgacagatgcagcactgatccttag

SEQ ID NO: 124498 - DNA, 2481 bp, Homo sapiens; identical to SEQ ID NO: 118549

SEQ ID NO: 124499 - DNA, 1746 bp, Homo sapiens; identical to SEQ ID NO: 121181

SEQ ID NO: 124500 - DNA, 541 bp, Homo sapiens
cgccgggcatatcctgtcgcaatgtgcaaatctcgcggcaacaaccagtgaatacttcattcacaagcctcaccgcctgatcgcggcagaaactggttatagccaatcaaccgtcgttcgtgcattccgtgaagctgtaaacaaaggaattctgtctgtagagattgttatcggcgatcaccgtgaacgtcgcgctgacctgtaccggtttacaccatcctttttggtcttcgcacaacaagccaaaaatgcgctgatagaaagcaaatcaaagatcctcttcagcggcaaccaaggtgcggttgctggcgcctatatcgccgacatcaccgatggggaagatcgggctcgccacttcgggctcatgagcgcttgtttcggcgtgggtatggtggcaggccccgtggccgggggactgttgggcgccatctccttgcatgcaccattccttgcggcggcggtgctcaacggcctcaacctactactgggctgcttcctaatgcaggagtcgcataagggagagcgtcgaggagaacttcta

SEQ ID NO: 124501 - DNA, 1533 bp, Homo sapiens
atgcccttgagagccttcaacccagtcagctccttccggtgggcgcggggcatgactatcgtcgccgcacttatgactgtcttctttatcatgcaactcgtaggacaggtgccggcagcgctctgggtcattttcggcgaggaccgctttcgctggagcgcgacgatgatcggcctgtcgcttgcggtattcggaatcttgcacgccctcgctcaagccttcgtcactggtcccgccaccaaacgtttcggcgagaagcaggccattatcgccggcatggcggccgacgcgctgggctacgtcttgctggcgttcgcgacgcgaggctggatggccttccccattatgattcttctcgcttccggcggcatcgggatgcccgcgttgcaggccatgctgtccaggcaggtagatgacgaccatcagggacagcttcaaggatcgctcgcggctcttaccagcctaacttcgatcattggaccgctgatcgtcacggcgatttatgccgcctcggcgagcacatggaacggtaaccgggcatgttcatcatcagtaacccgtatcgtgagcatcctctctcgtttcatcggtatcattacccccatgaacagaaatcccccttacacggaggcatcagtgaccaaacaggaaaaaaccgcccttaacatggcccgctttatcagaagccagacattaacgcttctggagaaactcaacgagctggacgcggatgaacaggcagacatctgtgaatcgcttcacgaccacgctgatgagctttaccgcagctgcctcgcgcgtttcggtgatgacggaaacagctatgaccatgattacgccaagcttgcatgcctgcaggtcgaaggccgtggcggcggcacttttgcccatgaattgctcgctgtggagtacgcaggctggatttctcccgcgtttcggctgaaggtaaaccagacatttatcgactatcgaaccggaagattacaacctgctattccgcagagtctccctgaagctctccgtttggctgccgacctggcagagcaaaagcaacggctggagcaaaaaatgcttatggatgcacctaaagtcgaattcgctgaacgcgttgctaccgccagcggggttctaatcggcaactatgccaaagtgctcggcctgggccaaaactatctcttcacctggttgcgtgataacggaattctgatcgcaaccggtgaacgcaggaacgtccccaaacaagaatacatatctcgtgggtatttcacccttaaagaaaccgtgatcgatacaagcaatggaagcaggatttctttcacgactcgtataaccggcaaagagattagtactgaagagcagctaaggcgcctgcaagaggagaagctttgcaaaatctgtatggatagaaatattgctatcgtttttgttccttgtggacatctagtcacttgtaaacaatgtgctgaagcagttgacaagtgtcccatgtgctacacagtcattactttcaagcaaaaaatttttatgtcttaa

SEQ ID NO: 124502 - DNA, 13935 bp, Homo sapiens
ttatcttgtgcaatgtaacatcagagattttgagacacaacgtggctttcccccccccccctgcaggtcgatagcagcaccaccaattaaatgattttcgaaatcgaacttgacattggaacgaacatcagaaatagctttaagaaccttaatggcttcggctgtgatttcttgaccaacgtggtcacctggcaaaacgacgatctttagaagttctcctcgacgctctcccttatgcgactcctgcattaggaagcagcccagtagtaggttgaggccgttgagcaccgccgccgcaaggaatggtgcatgcaaggagatggcgcccaacagtcccccggccacggggcctgccaccatacccacgccgaaacaagcgctcatgagcccgaagtggcgagcccgatcttccccatcggtgatgtcggcgatataggcgccagcaaccgcaccccattgttcgttatctttatttttggctaaaaccgcattaagagcttcgtttaccgtcatgcaatgcggtaggttatcgaagtttgatatcccgccaatatcaggcgaacgcttgttcttcaggtaagcatatttccgcgcagccgcctctactttctgcttgaactcatgtttttgagtgcgttttttggataaccgcagattgtcagcctttgcttttgccttagcgatccatgaagtcaattttttgaggctggttgttccggcaccgccggaaactgatctttttgtttttttaacttgtgacttcttattctttattgccacgtcatcctgacagggggagggggtatcattttgacatgggggtgtggataaaaaattaaataaagccaatgtcttagcgagaacagctttaaccttggttgccgctgaagagatctttaatttgctttctatcagcgcatttttggcttgttgtgcgaaggccaaaaaggatggtgtaaaccggtacaggttagcgcgacgttcacggtgatcgccgataacaatctctacagacagaattcctttgtttacagcttcacggaatgcacgaacgacggttgattggctataaccagtttctgccgcgatcaggcggtgaggcttgtgaatgaagtattcactggttgttgccgcgagatttgcacattgcgacaggatatgcccggcgctacgggatagaccggagtgtgttacaaagcaggccaattcatagccagaaaaagtaaaatcgctcatcgttatacagctcaggaaagtgactttagccagcattacaatgctggtggttcttactacgtctttgccggttatacgagtcgtgaaagaaatcctgcttccattgcttgtatcgatcacggtttctttaagggtgaaatacccacgagatatgtattcttgtttggggacgttcctgcgttcaccggttgcgatcagaattccgttatcacgcaaccaggtgaagagatagttttggcccaggccgagcactttggcatagttgccgattagaaccccgctggcggtagcaacgcgttcagcgaattcgactttaggtgcatccataagcattttttgctccagccgttgcttttgctctgccaggtcggcagccaaacggagagcttcagggagactctgcggaatagcaggttgtaatcttccggttcgatagtcgataaatgtctggtttaccttcagccgaaacgcgggagaaatccagcctgcgtactccacagcgagcaattcatgggcaaaagtgccgccgccacggccttcgaccgaaacagggctgtcggggacaggcctcgggtgttggagggcaaaggtgacagcatcatggacagaggcaaagagatgcttcttggtgatggatgcatcgaagaagtgcccagcctcaagctggctgaccacagggctgtggcaggccgccatgtacacctccacctcaatctcccggaagtcatggaaaatattcttcaggctcttgaggcacacagtgtccacaaaggagagggcacccaggtccaggatgaggctgtggaagtctggctgaggcaggcccagggccttcagtgtggacccatctggggccttggagtcttcttgaccattggctgttgcatcttccatcttatctcctgagctcacctgctggggagccagacatgcagacaaaaggggccctgcctgtttccgaagcttctcctctttctgcagttgcttcagcttcagctgctcctgcttcttgagcagtttcttcttctgggagatgaggaagtcgacatccacaccacacctctgcttcagcgcatcactgtagaactcagcattggcaaagtacacggtggccgaggagcggaagaccttcaccccccggacttccttggcctctgagtactctgccacatctctgtaaatatccgtgtctggcacctgccccaggacagagtagtggggcatctgtgtccggaccaccacgagcagcagggagaagatgaccgcaaccaccaagccaaggtccaggttcagcaagatggtggccgtgaaggtcaccagccagataagcagatccgcccgattggccttccagagggagcgcatgtcgctgagctgcctcagcatgcccttcaggttcacaatgatgatggctgccaggaccgccttgggcaggtcatggaagagttccccaagtttgacaatgatgaggaggatgaaaagggaagagatggctccagcaacctgcgagttgcccccggtgctctcctgtaccaggctccgagacatagagcaactcacggggaagcactggaagatgcctccgataaggttactgaggcccagggccaccagctcctggttgctgtccacccggtagccgtgcctcagggcgaagatcttccccagtgagatggcaatggcaaacccaaccacagcgatggtgaaggcgctgcccacgagctttgagaacagctgggtgttgggggccactgggggcaccagccctgcagggatgttgcccacgacatctacctcaaatctgtgctttagacccatgccataggagatgcctgtggccccgatgagcgtgagcagctccccgggtatcggcatgggcagctgctgctgcagcttgtcattcaacagcttcaccaccacgagcaccaccccagccacagctgcagtgaccacggtgccaaccttgctctggggcagcttccagcagacctccagcactgtatagatgagggacagtggcccagagtggctgctcagatggaggccaaacacatacttgagctgtgagacgaagacctgcacagctgcagctgtggtatagcctcggacaagaggttctgacaggtaggtgaccacgaagccgaagtggatcaggcccagccccacctggaagaggccaaccaggacactgagtgtggaggccacctgtacccgggcagcatctctggctgtctcattgatcatggagtcgttcaaggcctgcggggccagggattctgtcacactgcccaccatcacagacatgacagcaaaggtccctgtgtctactggtcccgggacacagaggctctccacggagatgtgccgggaagtgccaaacaggaagtagatgaagacagggtagaaggagctatagaggccaaacacggggggcaatccagccaggagggcgtaggccaagccctgcggaagctgcatgatggccacactcaggccggataacaggtcacccaggagccagtcacgcacaggataccggggtaaccagaccaaaaccgggaggtgttggagcagaagggcataggcccgagcacgggagcactgcaaccaggtccgccactggtgggtcctaggtgctgagccccagcgccccagctcctccaaatgctcctggttcagcagcggccgttccatgtggtagtctcgcctccgcaggtccattgcttgtgttgcagacagcagtgcctgtgtgtccctcggttctgagtctggcgacagctccgagatgctgtgagacgtggcagaacgtggcgtggagggcccaagcacagaggctgtggcagaaggtgtggcagtggtgtgagggcccaagggtgtgcttgaagattgcacagaggagagggccgaggagttgaaagaggcaaggatggaggaaagaatgtccaactgttctgtggaggggccatggctggggccactgaccgagtcctccctagctctgagcagctgcgggagtggcccaagggcttctcgtgaggggtgccggctaggcacctggtccagctgctcccgagagttcgagctcctagacagagagtccagcggccgggatggcaagagggggtcccttgagagttgccgctggggagacaggggcagaggtgggggctgtgggtcaaggtcccgggtgcggcggggcggaggcagcgtgctcaaccactctcgaggtgcccctaagtcgagcgcatcccgtgacccgaagcggccagccatggcgccagggtagtcccgaggtggctgcctccgtggcagggtgctgccccgatctttgggctccagtcggcctggtgcagcatccatgcattcctgggaccctggccggctcaggggacgtagaacaggggcaggggcttcctctagtcgctcacggctcagttgccgccggaggagcaggtccagctgttctctagaagagtagcggctggctggctgtgaaaggctgcccgtgcccccgccagcatagatgcgaccgtaagaggcagctggcacagcacggtggcccaaggtggctgcacggcaccaggacagctcaggggcacctcgggtctgtggcaccagtgggtattgcaaccggttcttcaggatgcctttcctctggcgctgggcccggcccagagaagtctcatccccactggtcagggccgggtctggctggttgttgttagctgcatccttgctggtgtccagccccaggcgcctttcagagccccaagtctgcagagcacagggggctgcctcgcactcccccagggctggccagtaggacaggaggtcattgccatccacatctttggggtgggtgaggagcctctcactctgggctgctcggcagagtggccgttggaagcgcccccgcgtccggccattgtcctcgctttctgaagatggaatggagagactcctctcctcctccaaggacaggtcactgtcagagtcggagtctgcgccagcatctcgatggaacatggccacgtccaggtcagtggggccagcatgagcctggaggctgtggtcagtgtggtcagcggctgagccatgtcgaaccaggacattgtccctgaggtagctgcggccccgctggctgtcctggtcctgggtccggccggagcgggcactgctcacagaggagacggtggaggcgcccagagtgatgcggatgaggccactctcctcaaagagagccgtgttgttgtaggccccaggtcccagcccaggtgctggccttgcctcctcaggcgctgccttcctgcccagacaggctggcatccaggcagcccgagcatctgcatttaggacacagaagagcagcagcaccgccaggccctggaggccgcagagtccagcatggaggtagtggaaggctaggatgctgtggttgactgccaggagcccaaagagccaggaggcactgaccagcagaagcagcaggaaggagctgcgaagggtcctgagtgcagaggtcttcttggcctccctctgccctgtggagcaggatgtgcgggcagcgaggagaaacatggtcccgttcatcactatgaccaggacaacagggccagcaaagctccagatgaggggctcgtggactgagatccagcagaagtcagggttcccatagccctcagggtccaggcccacagcaaggcccagcagcacagcagggacgccccagcccagggcatggtagaagcgcatggcgccgcggtccacgttgcgtggctcaacctgcatgcggtagaggtgcagcccctgcacgaagagccacgcgaaggtgctgaggaagaagtagtgcaggaggatggcgactgcagtgcacaccagctctgaccctgagttttggccccaggcctcctgggccagtagggtcatcaggacacaagttccctggccctgatcctgcacctgattgtgggtcctgtgaatccccagcaggaagaggagctctgccacccccagggcggctgccacattggcatggatcccacgcacattggacttgaggctgcgcaggctcagcaggatggctgcagtcagcaccagcgcagccacagacacagccacgaccacgtgggtgaacacagccagcagctccaggtcgccctccagcctctcacggggagaggcatccatgaggaccccaaaggtccctgtccggctgcagcgacaccgtgcgtgggacccattcctgtgcaccagctcgcagtcccgtgctgtccacacaccatgctgctccgccaggccaggtgggtcccactgcacacagatcgccttgctccgattcgctgtctgtagcaggcgaaactctaggctgatgggggactccaggattccccttaggaagttgcgtccgtggaacacagccacgctgaccaccggggagttcatgacggggttctgaggaagcctggcacctcggcgttctgcctggaactgggcagggagcagtccccctaaggtgcggtaaacgaggagaatgataatggagatcccaggctctggctctggcggggctggtggggggaccacacttgaggtggtggagttttctatgctgctgcttgtgggcagaacttcagatggggatggccgtggggactgggaaggcagcagcacatgggtgtgaggatcccaggcatcctggcctcgaaagaggttgctatggtagcgagggtagcgacgggccccccggggagaactggggtgctccatgcggtcaatgctgagcatgatattaggcgtcaccagccccatgggattcaggtatgtgagttccatattccttgcgagtgtggctgcatactcctccaggtgcctcaccagtcccgcgctgcctggggagcccccaggggcccgctgccccagcgccgcccacaagtcccctgtctctggggcaagcagtgcagagccggcccacagcagattctcattgaagtgggcatcctgtgtggctgtcagcccgaagccctgctgatggctctcgaaggccagcaggtgggccagcaggcgggcagtgactcgaacatcttggctaaaatagtggtcagtgtggccagtcacctcccgtagccgctgagccagcttcttggcctccatggtatccagtgccgtcttgttcagctctaggccatccagcagcagactgagctctcgaaaggcaggggaggtacagttgaagaggtcgggctccagccaaccctgggcctcatcacacagccgcacagcagcacccagggccccccggggacagggcactgtggccaggacgccaaactttgtctggggccaccacacaccagatctcagggacttagggcaggcatcatagagcacccggcagccgctggctgtcacctctgcgaagggactgtcacagctgttgcactggcggccaagggctcctgggcgacaggggcactgcccgctgtggggtgcacatgagcgcgaggtggagcccacagggtagcagtcacatgggaggcaagagtcactgccccgcggtcggtagtggaactccttgcagtgacactgcccatttgtcttgttgcagttgggatcaaaacctttgtgaacatcacagttgcaggggccacaggttgggctcccccaccagccccgtgggcactgctggtccatcctgtgctcacagtggtgcccgaaatagccacccacacagtcacaggtatagccatggggggctcctggcaggtgccggcatgatccctggttctgacaggggttcaggaggcaggcatccacacagcctgggccgtagtaacctggctggcaggtgcaagaaaaggtctgccagaggtcccggcagtctgcgtgaggtgggcagggcccagaggcacaggcgttggtcacaacacagccaggtccgcattcactcggtggctggatgcagccaaccagaccctgaggagcctcctctgcactgccggggggcaggcctcccacgtggagctgctttaccttcaggccctgcagctcactccccaccgccatggtgtcctggaagaggctaaagtccagtgagaccataaggacatggtggccccgccggccacctggttcctcctgcaactccagccgcagatcgtgccaccggccatcactgacagtcacctggtccagaaggagatgggaagcacggcccgagcccctggtcactgtcacagacagtaacccccgatctagctggcaaaggagcgtgctgtgtggcccagcctgcacttgcatcaggaccccctgcgttgcccgtgtccgaaatgccagccccaggtaccatggcacagacacagccatgtcacttccaaagttccagctcagtgtgccgttgccacggaaatggtggggatgggccatagtaagctgacagtctttgccgccgaagcccacagggcagtcgcagctgaagctgccccagcgctccgagcagaagccactgttcttgcaggggcctgagtcacaaaagtgtagcttggcttggcagcctgccatggtgccattatttgcgacaaaagccgccatgtccactcggcggccatcaatgtgcaggtcccgcatacagccgatgaagtccttatgggatacggggaagttctcggggaggttggggacacctcccagaagaagagggcccgtcaggtccagggacttcttggagcttgtttgcacaccagcagccgcgcatgagtagttgccaatctcagcaccaaactgcagagccacggccacatcacaatcatccacgcttagcacagccaccttgtccttggaggggccctgtgcaccccctagggcatctgtccggggcttgttgtagtatctcagatgcactgtatgccattgcccgtcactcaagccccctggaactgtggggctgaccacggtgttggattcacccgtggaatatgtgagccgcacttggccagccacgagttccagggccaggaagtcgtgcttctcgttcaggcgcccgttgtagaagagcagcccgctctgctgcactgtcgcgaacgagagggacagcgtaaggtggaatcgctgccgcaggccgcgaaacatgacgaacgaactgggcgggaaggagcgcgcagccacctcgcagcgcgggccctcgaaggcgccgcctgccgggcactggcagcgaaagccgccgttgggcgcgtcggtgcaggtgcccccgttgcggcagacgcccggcacgcagcggccggcctcggtgtccagctcgcagtcctctccggtgaagcgcgggcggcagacgcacgtgtagcctccctcgcgccgcgcgcaggctccgccgttgcgacatgggttggagtagcagaggtcgagctcggtctcgcaaaagtctcccgtgaatccgggcgggcagcggcagcgcaggccagcgatgggctggatgggtcggaacagcgtggaggccgaggccaggaagggcgcggacgagtcaaagcggagcacggacacgcatttcatgtagttctcacagggctctcgcaggcacacgttgtcgtcgaagggcagtacgtcgagcagggagcgagccgccagcgccgcccggcgcacgtacaactgctcttgcagctcctcggagctgaaccagggccctgcagcgcccgccccggccccacgtggagctagcgccgagaaactcacattgagcacggtgccccctacgtctgtgtcgttctggatgttgaagatgaagacgtcctcagcgggcgtagcgagcaccgcagccacgccctcgaggaagcggcccagcagcggtgacaggaagcgctcctgccacatgttctcaaggcgcacggtcaggctgttggccagcaactcctccgtgatgatgaccacgcgcagcacacactgcgccgtcacgctgtgcaggccatctgtgacagtcaccaacatggaggccaccagtgggcggttattgtctagctttcggctgagtcgcagctccccactggtctggttgactaccagcagctgcagctcattgccacgctcaaaggagtagaagaggtggtcggagacatcggggtcataagctgggatgcgcccaataatgcccgacgggaaggtgtctgaacggttggatacatagttgttgaagaggatctggaagttgttgagcacagggctgttgtcattctggtcaaccaggcggacgtgcacagtggcccggctgaccaaaggagcagatgtggcctgcaccacaatcacatattcttggcgagcctcatagtctaggtcaatgagtgccgtcagttctccagagaagatgtccatttggaacagctcagggatgttcccctccacgatctggtacattatatgggcattggggccttcgtcagggtccactgcagtgatctgggccaccactgagcccacaatgctattctctttcacccgcacctcaaactcctcagctgggaagacaggtgcattgtcgttcacatcctgcaccatcacctggatactgactggagtccggagtgggggcacacctctgtccactgcgtaggcagtcaactcatacactgatactgcctcccggtctagccgccttactgtacggacaattccagaggtgggctcaatggtaaaatctccatccccatcttcaccattctggaaagtgtactggacccggccattggcatgagcatcccggtcagtggctgagatctgcaggacactggtgaaaggtggggcatcctcagagaccagccctgtatagtgggaggccacaaattgtggagcattgtcattcacgtcattgaccatcacctccacataagtagtgtctgccttctgtgggatgccattgtcccgagctgtgatagccagggtgtaggtcacctggtcctcatagtctaatggggcctgtaatgtaatggctcctgagtctgcatcaatgcggaactggggcaggttgtcctccaggagataggtgatacgagcattctcacccacgtcatcatcagaggcactgatgaccactatggtgctacccattggccgatcttcattcacactcactgagtagtgggcactttgaaagaccggccgatgagtgttggcatctgtgatgttgatgtgcacatagcagtgatcatgaagggcacggtcagatgcagttagtaccagcttgaagtagcgttcctgcttgtagtccagtggcagagccagagtcaccagacccacacccccctgggtgctgatggcaaagcgattccgggtgttgccgcctgtgatctggtagctgatggcactgttggcatcacggtctactgcggtcacgctgaccacactggtgcccacagctgcatcctcattcagtcgtaggtggtactccttcattgtgaactcaggccgattgtcattaacgtccagcacagtcacggtgacactggctgaggcagagagtgggggtgagccatggtctcgagcctccacaccaaagaagtaatgctccacagactcacggtccaggggaccactcacagagacccagccagtggcgctgtttatcacaaaaggagtatcaggtgccacaccagttagggagtactccaatctggcattctccccatggtctgcatcgactgcctgaatgtggatgactgagtgacccaagggagcattttccaagacagaaacttggaagggcgtgctgacaaaaataggaatgtggtcattgatgtccaccacctggatgctggccaggcccgtgttgttggacagcggtggccggccagcatcctgcgccctgatgcgcaaggcatactctctctctgcctcgaagtccagaggtgccaccacctggatctcgccagtgaggctgtcgatggcaaagtgtccacggctattgccactgatgatgttgtagtgcaccaatccgttggcgtccttgtcccggtcagtggccgtgacgcgcagcacgactgtgtgggggcgcacatcctcgcgcacctgcgccacgtagcgcttctcgctgaactgaggagcattgtcgttctcgtctagcacagttatgtgtacgcgcacagtggccgagcgcggcccgggttcctggccctggtcgctggcttccaccaccagctcatagctttccatgtgctcgcggtccactcggccgctggtgctgatgaggccggagcgtggatcaatctcgaaggcggcggcagctgcagcgcgcgcagctggcggccccacgaagcggtagcgcaggttggcgttggggggcgcgtcgccgtcagtggcacgcagctgcaggatagggtagccctcctccacattctcgcgaagggtctcccggtactgcgcttgctcaaaaaccggcgagtggtcgttgcggtcggctactgtcacggccaccatcgtggtggccgagaggcgcggcgacccgtggtcctgcgcggtcacacgcaggtagtgacgctccatgctctcgcggtccagagctgccgccgtacggataaggccgctctgcgggtcgatgctgaacagctccagcgagcggctgttcatgagtgccgccagcgagtagactaggcgcccggcctcgccggcgtccgggtcctgagcaaccacgcgtagcaccgcggtgcctgctgcctcattctccggcaccagcgtctggtagttgtactgcggaaactgcgggtggcggtttgcggcgcgacgaaagcgtgcccggttcgccgaggttactttcctggcttcaggacgggccgggagtcccgggggacgcggcccggggcgctgcgggaggaagcggcagcggaagagaccccgggagcgcatgcgcttgggcgccggctcgggagctgtccgagactcgcggggtgctgaacctgatgcaggagctgtcctcgccgtgcgtggtgctgaatccagctcggggccagatcccgaggcccctggaagacagttccgccggggggctgtcctttctgctccggatgtcgtggctctctcgccctgacccttgctccctgttgcccataattccccacagcagcgcgcggtgcccactcttttgcgggagcctgtcccagcgttccgctgggaggacaccggcttgggaccgtggtgccgaatcaaaaagtctgaagggaggggcgagctgttccccgagcccgggacccctgaggacagagcccctggtgacagactacctctttgcaaaggtcctgtccgcccgcaagaggagacctctgggcgccagtataacacagaccctggtccctgtcctgtctctcgttcgcggctgcccaatggctggacgccgtgttcaatccccagctcctcattcggctgctcagggggccctcgactattccgggcgctttgccttctccctcggagccccacgaagataggctccctgacccccaggccaggccccccatcctcccggaccccggaagactccggacaaagagctaaggctccgccaccgatatgcgcccttggccccgtagtggcagctaagcctgggtcccagccctggtgcccaccgccccccagctcctcctggctgagggggaacaaagagaggagaaggagcaggagtatgggggtcgaccgtcccccgaggccccgccacggcggccgcctcgccat

SEQ ID NO: 124503 - DNA, 1905 bp, Homo sapiens
ttatcttgtgcaatgtaacatcagagattttgagacacaacgtggctttcccccccccccctgcaggtcgatagcagcaccaccaattaaatgattttcgaaatcgaacttgacattggaacgaacatcagaaatagctttaagaaccttaatggcttcggctgtgatttcttgaccaacgtggtcacctggcaaaacgacgatctttagaagttctcctcgacgctctcccttatgcgactcctgcattaggaagcagcccagtagtaggttgaggccgttgagcaccgccgccgcaaggaatggtgcatgcaaggagatggcgcccaacagtcccccggccacggggcctgccaccatacccacgccgaaacaagcgctcatgagcccgaagtggcgagcccgatcttccccatcggtgatgtcggcgatataggcgccagcaaccgcaccccattgttcgttatctttatttttggctaaaaccgcattaagagcttcgtttaccgtcatgcaatgcggtaggttatcgaagtttgatatcccgccaatatcaggcgaacgcttgttcttcaggtaagcatatttccgcgcagccgcctctactttctgcttgaactcatgtttttgagtgcgttttttggataaccgcagattgtcagcctttgcttttgccttagcgatccatgaagtcaattttttgaggctggttgttccggcaccgccggaaactgatctttttgtttttttaacttgtgacttcttattctttattgccacgtcatcctgacagggggagggggtatcattttgacatgggggtgtggataaaaaattaaataaagccaatgtcttagcgagaacagctttaaccttggttgccgctgaagagatctttaatttgctttctatcagcgcatttttggcttgttgtgcgaaggccaaaaaggatggtgtaaaccggtacaggttagcgcgacgttcacggtgatcgccgataacaatctctacagacagaattcctttgtttacagcttcacggaatgcacgaacgacggttgattggctataaccagtttctgccgcgatcaggcggtgaggcttgtgaatgaagtattcactggttgttgccgcgagatttgcacattgcgacaggatatgcccggcgctacgggatagaccggagtgtgttacaaagcaggccaattcatagccagaaaaagtaaaatcgctcatcgttatacagctcaggaaagtgactttagccagcattacaatgctggtggttcttactacgtctttgccggttatacgagtcgtgaaagaaatcctgcttccattgcttgtatcgatcacggtttctttaagggtgaaatacccacgagatatgtattcttgtttggggacgttcctgcgttcaccggttgcgatcagaattccgttatcacgcaaccaggtgaagagatagttttggcccaggccgagcactttggcatagttgccgattagaaccccgctggcggtagcaacgcgttcagcgaattcgactttaggtgcatccataagcattttttgctccagccgttgcttttgctctgccaggtcggcagccaaacggagagcttcagggagactctgcggaatagcaggttgtaatcttccggttcgatagtcgataaatgtctggtttaccttcagccgaaacgcgggagaaatccagcctgcgtactccacagcgagcaattcatgggcaaaagtgccgccgccacggccttcgactgatggagagtcagggttcgcggactgaccagtgacgtacaaggagccagaagggaagacgtgaggggtggcgggtagcaccgaggccggccaggccaggcacaggactgcagccgtctctggcat

SEQ ID NO: 124504 - DNA, 2901 bp, Homo sapiens
ttatcttgtgcaatgtaacatcagagattttgagacacaacgtggctttcccccccccccctgcaggtcgatagcagcaccaccaattaaatgattttcgaaatcgaacttgacattggaacgaacatcagaaatagctttaagaaccttaatggcttcggctgtgatttcttgaccaacgtggtcacctggcaaaacgacgatctttagaagttctcctcgacgctctcccttatgcgactcctgcattaggaagcagcccagtagtaggttgaggccgttgagcaccgccgccgcaaggaatggtgcatgcaaggagatggcgcccaacagtcccccggccacggggcctgccaccatacccacgccgaaacaagcgctcatgagcccgaagtggcgagcccgatcttccccatcggtgatgtcggcgatataggcgccagcaaccgcaccccattgttcgttatctttatttttggctaaaaccgcattaagagcttcgtttaccgtcatgcaatgcggtaggttatcgaagtttgatatcccgccaatatcaggcgaacgcttgttcttcaggtaagcatatttccgcgcagccgcctctactttctgcttgaactcatgtttttgagtgcgttttttggataaccgcagattgtcagcctttgcttttgccttagcgatccatgaagtcaattttttgaggctggttgttccggcaccgccggaaactgatctttttgtttttttaacttgtgacttcttattctttattgccacgtcatcctgacagggggagggggtatcattttgacatgggggtgtggataaaaaattaaataaagccaatgtcttagcgagaacagctttaaccttggttgccgctgaagagatctttaatttgctttctatcagcgcatttttggcttgttgtgcgaaggccaaaaaggatggtgtaaaccggtacaggttagcgcgacgttcacggtgatcgccgataacaatctctacagacagaattcctttgtttacagcttcacggaatgcacgaacgacggttgattggctataaccagtttctgccgcgatcaggcggtgaggcttgtgaatgaagtattcactggttgttgccgcgagatttgcacattgcgacaggatatgcccggcgctacgggatagaccggagtgtgttacaaagcaggccaattcatagccagaaaaagtaaaatcgctcatcgttatacagctcaggaaagtgactttagccagcattacaatgctggtggttcttactacgtctttgccggttatacgagtcgtgaaagaaatcctgcttccattgcttgtatcgatcacggtttctttaagggtgaaatacccacgagatatgtattcttgtttggggacgttcctgcgttcaccggttgcgatcagaattccgttatcacgcaaccaggtgaagagatagttttggcccaggccgagcactttggcatagttgccgattagaaccccgctggcggtagcaacgcgttcagcgaattcgactttaggtgcatccataagcattttttgctccagccgttgcttttgctctgccaggtcggcagccaaacggagagcttcagggagactctgcggaatagcaggttgtaatcttccggttcgatagtcgataaatgtctggtttaccttcagccgaaacgcgggagaaatccagcctgcgtactccacagcgagcaattcatgggcaaaagtgccgccgccacggccttcgactctgccgcagtcacactcaagactacacatgcgcgtgtgggcactggaactaaaatccgggttgagaggctgggcctgatattttgtggctagaagggccccacataactcaggtccagggaggtgagtgacctggaaaggacagagcggacatgaggcctgtgtgcggcctggctcctggaggccgatgtgcgagcgagccacagcttttcgggccaaagcggcgaaggtctcatccaggttgatatagtcctgccgctcctcctggtcccccgtgcgatggtttcgggagcgctggaggatgtgagccctgtcccggatgtgatgcccaatggacatctgctccagtccactgtctgaatcccgaacagtcctccgtgtctcccggatcccgcctggtgccgagcgcatctctgatgtctcttggtagaccttgggggcaccatcacccgtattggagtaggagatgacagtggaagatgagaaggtctggcaattgcctccagctgtcatgtgttccatgtttccaatcatgtcattcatcatcccaaacatgtccatgaaaccacccgactgctgcatccggcggctggcaggcctggtccctggcatgttgccatctgtgatgctgaggaaggggctatatccaaagccacctgacaacatacggctcatatgctgacggtgaatagcaaagggatccatcaggaacatgggatcctcaggctccacgtccctcatgaagcggaacatcctgatctcagctccagggggctccacacccgcatcccgggctcccagaccctgcagccccgtgggcccgctcccgtccggggctgccagctctgcccgagcctcaccagtgcccgattcgggctcagcggcccatccggccggtttcgcttcccggtacgctgcagggtcagggtcgcggcccggaacgtggggattggtccgggcttgagctcctcggccttccacgccgcctcctcccacagctgccacctccgtacggccccctcggccaacggagcccgaacccggggccgggccgtgggagccccgccccctggcgcgggtggtgagatggctggggccgagtcccaggggcgccggggccat

SEQ ID NO: 124505 - DNA, 2151 bp, Homo sapiens
ttatcttgtgcaatgtaacatcagagattttgagacacaacgtggctttcccccccccccctgcaggtcgatagcagcaccaccaattaaatgattttcgaaatcgaacttgacattggaacgaacatcagaaatagctttaagaaccttaatggcttcggctgtgatttcttgaccaacgtggtcacctggcaaaacgacgatctttagaagttctcctcgacgctctcccttatgcgactcctgcattaggaagcagcccagtagtaggttgaggccgttgagcaccgccgccgcaaggaatggtgcatgcaaggagatggcgcccaacagtcccccggccacggggcctgccaccatacccacgccgaaacaagcgctcatgagcccgaagtggcgagcccgatcttccccatcggtgatgtcggcgatataggcgccagcaaccgcaccccattgttcgttatctttatttttggctaaaaccgcattaagagcttcgtttaccgtcatgcaatgcggtaggttatcgaagtttgatatcccgccaatatcaggcgaacgcttgttcttcaggtaagcatatttccgcgcagccgcctctactttctgcttgaactcatgtttttgagtgcgttttttggataaccgcagattgtcagcctttgcttttgccttagcgatccatgaagtcaattttttgaggctggttgttccggcaccgccggaaactgatctttttgtttttttaacttgtgacttcttattctttattgccacgtcatcctgacagggggagggggtatcattttgacatgggggtgtggataaaaaattaaataaagccaatgtcttagcgagaacagctttaaccttggttgccgctgaagagatctttaatttgctttctatcagcgcatttttggcttgttgtgcgaaggccaaaaaggatggtgtaaaccggtacaggttagcgcgacgttcacggtgatcgccgataacaatctctacagacagaattcctttgtttacagcttcacggaatgcacgaacgacggttgattggctataaccagtttctgccgcgatcaggcggtgaggcttgtgaatgaagtattcactggttgttgccgcgagatttgcacattgcgacaggatatgcccggcgctacgggatagaccggagtgtgttacaaagcaggccaattcatagccagaaaaagtaaaatcgctcatcgttatacagctcaggaaagtgactttagccagcattacaatgctggtggttcttactacgtctttgccggttatacgagtcgtgaaagaaatcctgcttccattgcttgtatcgatcacggtttctttaagggtgaaatacccacgagatatgtattcttgtttggggacgttcctgcgttcaccggttgcgatcagaattccgttatcacgcaaccaggtgaagagatagttttggcccaggccgagcactttggcatagttgccgattagaaccccgctggcggtagcaacgcgttcagcgaattcgactttaggtgcatccataagcattttttgctccagccgttgcttttgctctgccaggtcggcagccaaacggagagcttcagggagactctgcggaatagcaggttgtaatcttccggttcgatagtcgataaatgtctggtttaccttcagccgaaacgcgggagaaatccagcctgcgtactccacagcgagcaattcatgggcaaaagtgccgccgccacggccttcgacctggcagtagtggatatccacctctacttcagacttacagcttcccaccttgacatactgcagcctggcagtgatgtcgttgcactcaggctcctcacatgtgtcacagcaggtgcctggaattttcataattttacctccctcagccagacacttgtgttcatcaaagggtgggcagcctgtgaccctcttctcccagaagtactctcctctctcattgaccttgcagaagtgagtatcacagccatcctggagcgtctcatcacgcttcagtgtcatgatctgtcctcctcttagctgaatggtgcaagccgtaggcaaacatctcccacaacattcacctgtgttattttcttccttgtaacccttcat

SEQ ID NO: 124506 - DNA, 2259 bp, Homo sapiens
atgaaactcatggaaacacttaaccagtgcataaacgctggtcatgaaatgacgaaggctatcgccattgcacagtttaatgatgacagcccggaagcgaggaaaataacccggcgctggagaataggtgaagcagcggatttagttggggtttcttctcaggctatcagagatgccgagaaagcagggcgactaccgcacccggatatggaaattcgaggacgggttgagcaacgtgttggttatacaattgaacaaattaatcatatgcgtgatgtgtttggtacgcgattgcgacgtgctgaagacgtatttccaccggtgatcggggttgctgcccataaaggtggcgtttacaaaacctcagtttctgttcatcttgctcaggatctggctctgaaggggctacgtgttttgctcgtggaaggtaacgacccccagggaacagcctcaatgtatcacggatgggtaccagatcttcatattcatgcagaagacactctcctgcctttctatcttggggaaaaggacgatgtcacttatgcaataaagcccacttgctggccggggcttgacattattccttcctgtctggctctgcaccgtattgaaactgagttaatgggcaaatttgatgaaggtaaactgcccaccgatccacacctgatgctccgactggccattgaaactgttgctcatgactatgatgtcatagttattgacagcgcgcctaacctgggtatcggcacgattaatgtcgtatgtgctgctgatgtgctgattgttcccacgcctgctgagttgtttgactacacctccgcactgcagtttttcgatatgcttcgtgatctgctcaagaacgttgatcttaaagggttcgagcctgatggcacacaggcaaagatgacacaaggtgaacgcaggaacgtccccaaacaagaatacatatctcgtgggtatttcacccttaaagaaaccgtgatcgatacaagcaatggaagcaggatttctttcacgactcgtataaccggcaaagacgtagtaagaaccaccagcattgtaatgctggctaaagtcactttcctgagctgtataacgatgagcgattttactttttctggctatgaattggcctgctttgtaacacactccggtctatcccgtagcgccgggcatatcctgtcgcaatgtgcaaatctcgcggcaacaaccagtgaatacttcattcacaagcctcaccgcctgatcgcggcagaaactggttatagccaatcaaccgtcgttcgtgcattccgtgaagctgtaaacaaaggaattctgtctgtagagattgttatcggcgatcaccgtgaacgtcgcgctaacctgtaccggtttacaccatcctttttggccttcgcacaacaagccaaaaatgcgctgatagaaagcaaattaaagatctcttcagcggcaaccaagtgtgacaatctaaaaacttgtcacacttcacatggatctgtcatggcggaaacagcggttatcaatcacaagaaacgtaaaaatagcccgcgaatcgtccagtcaaacgacctcactgaggcggcatatagtctctcccgggatcaaaaacgtatgctgtatctgttcgttgaccagatcagaaaatctgatggcaccctacaggaacatgacggtatctgcgagatccatgttgctaaatatgctgaaatattcggattgacctctgcggaagccagtaaggatatacggcaggcattgaagagtttcgcggggaaggaagtggttttttatcgccctgaagaggatgccggcgatgaaaaaggctatgaatcttttccttggtttatcaaacgtgcgcacagtccatccagagggctttacagtgtacatatcaacccatatctcattcccttctttatcgggttacagaaccggtttacgcagtttcggcttagtgaaacaaaagaaatcaccaatccgtatgccatgcgtttatacgaatccctgtgtcagtatcgtaagccggatggctcaggcatcgtctctctgaaaatcgactggatcatagagcgttaccagctgcctcaaagttaccagcgtatgcctgacttccgccgccgcttcctgcaggtctgtgttaatgagatcaacagcagaactccaatgcgcctctcatacattgagaaaaagaaaggccgccagacgactcatatcgtattttccttccgcgatatcacttccatgacgacaggatag

SEQ ID NO: 124507 - DNA, 751 bp, Homo sapiens
atgattgatgtcttagggccggagaaacgcagacggcgtaccacacaggaaaagatcgcaattgttcagcagagctttgaaccggggatgacggtctccctcgttgcccggcaacatggtgtagcagccagccagttatttctctggcgtaagcaataccaggaaggaagtcttactgctgtcgccgccggagaacaggttgttcctgcctctgaacttgctgccgccatgaagcagattaaagaactccagcgcctgctcggcaagaaaacgatggaaaatgaactcctcaaagaagccgttgaatatggacgggcaaaaaagtggatagcgcacgcgcccttattgcccggggatggggattgcacgtcattctcagacgaaccgatgactggatggatggccgccgcagtcgtcacactgatgatacggatgtgcttctccgtatacaccatgttatcggagagctgccaacgtatggttatcgtcgggtatgggcgctgcttcgcagacaggcagaacttgatgggatgcctgcgatcaatgcccaacgtgtttaccggatcttgcgccaaaatggccctgttgcttgagcgaaaacctgttggaccgccatcgtttgggaattcaactttgggccccggagaccaaagattccatctcaagaaaaagaaagagaaagcggtgtggttaaatttcccagcgtttagagattcttttttttcggggtctatgtctgcgcgtgacttct

SEQ ID NO: 124508 - DNA, 1422 bp, Homo sapiens
atggagtcttttcagtgtgccctaaaggaggtgggccttgatgagccactgagacttgctggcttcaggggagactcagcacattaccagctctggtggctacagggcaaaagtaaagaggcaaaagcagaggcaaaagtaaaggcgactttgtcttgcaccttaggtaccaaaaccgccacagtgttggaagttctggccagggcaatcaggcaggagaaggaaataaagggtattcaattaggaaaagaggaagtcaaattgtccctgtttgcagacgacatgattgtttatctagaaaaccccatcgtctcagcccaaaatctccttaagctgataagcaacttcagcaaagtctcaggatacaaaatcaatgtacaaaaatcacaagcattcttatacaccaacaacagacaaacagagagccaaatcatgagtgaactcccattcacaattgcttcaaagagaataaaatacctaggaatccaacttacaagggatgtgaaggacctcttcaaggagaactacaaaccactgctcaaggaaataaaagaggatacaaacaaatggaagaacattccatgctcatgggtaggaagaatcaatatcgtgaaaatggccatactgcccaagggaatttacagattcaatgccatccccatcaagctaccaatgattttcttcacagaattggaaaaaactactttaaagttcatatggaaccaaaaaagagcccgcatcgccaagtcaatcctaagccaaaagaacaaatctggaggcatcacactacctgacttcaaactatactacaaggctacagtaaccaaaacagcatggtactggtcccaaaacagagatatagatcaatggaacagaacagagccctcagaaataacgccgcgtatctacaactatctgatctttgacaaacctgagaaaaacaagcaatggggaaaggattccctatttaataaatggtgctgggaaaactggctagccatatgtagaaagctgaaactggatcccttccttacaccttatacaaaaatcaattcaagatggattaaagatttaaacgttagacctaaaaccataaaaaccctagaagaaaacctaggcattaccattcaggacataggcgtgggcaaggacttcatgtccaaaacaccaaaagcaatggcaacaaaagccaaaattgacaaatgggatctaattaaactaaagagcttctgcacagcaaaagaaactaccatcagagtgaacaggcaacctacaacatgggagaaaattttcgcaacctactcatctgacaaagggctaatatccagaatctacaatgaactcaaacaaatttacaagaaaaaaacaaacaaccccatcaaaaagtgggcgaaggacatgaacagacacttctcaaaataa

SEQ ID NO: 124509 - DNA, 524 bp, Homo sapiens
atgattgatgtcttagggccggagaaacgcagacggcgtaccacacaggaaaagatcgcaattgttcagcagagctttgaaccggggatgacggtctccctcgttgcccggcaacatggtgtagcagccagccagttatttctctggcgtaagcaataccaggaaggaagtcttactgctgtcgccgccggagaacaggttgttcctgcctctgaacttgctgccgccatgaagcagattaaagaactccagcgcctgctcggcaagaaaacgatggaaaatgaactcctcaaagaagacgatgaatttgggcgggcaaaaaagtggatagcgcaacgcgcccttattggccggggatggagagttagcttagtcaccgggttgagttgctgtggacgagcgacccatgtcggaatcccgcgcccacgtggctgcccaaagttccgagtctccgggctgcaggttctagtcacggaaccgagttgggagagtcataggggctgggacttggaggatcggctgag

SEQ ID NO: 124510 - DNA, 1005 bp, Homo sapiens
atgattgatgtcttagggccggagaaacgcagacggcgtaccacacaggaaaagatcgcaattgttcagcagagctttgaaccggggatgacggtctccctcgttgcccggcaacatggtgtagcagccagccagttatttctctggcgtaagcaataccaggaaggaagtcttactgctgtcgccgccggagaacaggttgttcctgcctctgaacttgctgccgccatgaagcagattaaagaactccagcgcctgctcggcaagaaaacgatggaaaatgaactcctcaaagaagccgttgaatatggacgggcaaaaaagtggatagcgcacgcgcccttattgcccggggatggggattgcacgtcattctcagacgaacgcctgcaggtcctgtcaggtagtacgcctgatatgcctgtcgactttctaacctctgaccaaaaacagaattacggttgttatgctgcagaacctaatgacgtgcaactggcgcgctattttcatcttgatgaacgggatctggccttcattaaccaacgacggggcaaacataataggctgggcattgcgcttcagctcaccacagcccgttttctgggaacatttctgacggatttaactcaggttctgcctggtgttcaacattttgtcgcggtacagcttaatatccaccgtccagaagttctctcccgctatgctgaacgggacactacccttagagaacatactgcattaattaaggaatattacggctatcatgaatttggtgattttccatggtctttccgcctgaagcgtctgctatatacccgggcgtggctcagtaatgagcgaccgggtctgatgtttgattttgccactgcatggttgcttcaaaataaggtattactgcccggagcaaccacactagtacgtctcatcagtgaaattcgtgaaagggcaaatcagcggctgtggaaaaagctggccgcactgccgaacaaatggcaggcagctcaa

SEQ ID NO: 124511 - DNA, 1659 bp, Homo sapiens
atggctcgcttccagctcagcgagaggtttgctttaatgctgccatatgagctgtttctccggcattgccagtacgaggtatatccaggcggccaacttggcaggctgttaatattctgccagtgttcaaagatatggtatatcaagatgttggtcaaaagctacaaagtaccttacggtgcggtactggcgaaaggcgatggcgaacaggttgctggcggcgaaaccgttgcaaactgggacccgcacaccatgccggttatcaccgaagtaagcggttttgtacgctttactgacatgatcgacggccagaccattacgcgtcagaccgacgaactgaccggtctgtcttcgctggtggttctggattccgcagaacgtaccgcaggtggtaaagatctgcgtccggcactgaaaatcgttgatgctcagggtaacgacgttctgatcccaggtaccgatatgccagcgcagtacttcctgccgggtaaagcgattgttcagctggaagatggcgtacagatcagctctggtgacaccctggcgcgtattccgcaggaatccggcggtaccaaggacatcaccggtggtctgccgcgcgttgcggacctgttcgaagcacgtcgtccgaaagagccggcaatcctggctgaagtcagcggtatcattccttcggtgaaacaaaatgtaacatctctatggacacgcacacggataacaactatgaacaaatcagggaaatacctcgtctggacagtgctctctgtaatgggagcatttgctctgggatacattgctttaaatcgtggggaacagatcaacgcgctgtggattgtggtggcgtcggtctgtatctatctgatcgcttaccgtttttatgggctgtatatcgccaaaaatgtgctggcggttgacccgacgcgtatgacgccagcggtgcgccataacgacgggctggactatgtgccgacggacaagaaagtgctgttcggtcaccattttgcggccattgccggagcaggtccgctggtggggccggtactggcggcgcaaatgggctacctgccggggatgatctggctgctcgctggggtggttctcgccgccagagtggccgtgaaagaaagcaatcagcgatggtgctctgacgggttcgagttctgctgtgataacggagagagactgcgtgtcacgttcgcgctggactgctgtgatcgtgaggcactgcactgggcggtcactaacggcggcttcaacagtgaaccagtacaggacgtcatgctgggagcggtggaacgccgcttcggcaacgatcttccgtcgtctccagtggagtggctgacggataatggttcatgctaccgggctaatgaaacacgccagttcgcccggatgttgggacttgaaccgaagaacacggcggtgcggagtccggagagtaacggaatagcagagagcttcgtgaaaacgataaagcgtgactacatcagtatcatgcccaaaccagacgggttaacggcagcaaagaaccttgcagaggcgttcgagcattataacgaatggcatccgcatagtgcgctgggttatcgctcgccacgggaatatctgcggcagcgggcttgtaatgggttaagtgataacagatgtctggaaatatag

SEQ ID NO: 124512 - DNA, 1662 bp, Homo sapiens
atggagctgccaaggctggacttggcacagagaagaccacttctcaaccagcatgaatgggctgatgccttctggcagctcctccacctccaccaggcacctgcgggccggggcttcttggcagggattcacacaagtgccttgtgtttaaggaagagtaaattgagtaacttacgcgaataccagaatcgtattgcagatatcgcaaaacgctctaaagctgtgcttggctgggcaagcactgcgcagttcggtactgataaccaattcattaaagatgatgccgcgcgtgccgcatctatccttgaagctgcacgtaaagacccgggttttgcgggtatctttgataatgccaccgctcaaatcgctacagcgtgggcaagtgcactggctgactacgccgcagcacataaatctatgccgcgtccggaaattctggcctcctgccaccagacgctggaaaactgcctgatagagtccacccgcaatagcatggatgccactaataaagcgatgctggaatctgtcgcagcagagatgatgagcgtttctgacggtgttatgcgtctgcctttattcctcgcgatgatcctgcctgttcagttgggggcagctaccgctgatgcgtgtaccttcattccggttacgcgtgaccagtccgacatctatgaagtctttaacgtggcaggttcatcttttggttcttatgctgctggtgatgttctggacatgcaatccgtcggtgtgtacagccagttacgtcgccgctatgtgctggtggcaagctccgatggcaccagcaaaaccacaaccttcaagatggaagacttcgaaggccagaatgtaccaatccgaaaaggtcgcactaacataaacgttaaccgtagtaagtctgccaatgatgttagttcatcaaatgtggcaaagagggctggacactataggagctgtatctgcattagagtaagccacagcagtcattacaagcctcaccgcctgatcgcggcagaaactggttatagccaatcaaccgtcgttcgtgcattccgtgaagctgtaaacaaaggaattctgtctgtagagattgttatcggcgatcaccgtgaacgtcgcgctaacctgtaccggtttacaccatcctttttggccttcgcacaacaagccaaaaatgcgctgatagaaagcaaattaaagatctcttcagcggcaaccaaggttaaagctgttctcgctaagacattggctttatttaattttttatccacacccccatgtcaaaatgataccccctccccctgtcaggatgacgtggcaataaagaataagaagtcacaagttaaaaaaacaaaaagatcagtttccggcggtgccggaacaaccagcctcaaaaaattgacttcatggatcgctaaggcaaaagcaaaggctgacaatctgcggttatccaaaaaacgcactcaaaaacatgagttcaagcagaaagtagaggcggctgcgcggaaatatgcttacctgaagaacaagcgttcgcctgatattggcgggatatcaaacttcgataacctaccgcattgcatgacggtaaacgaagctcttaatgcggttttagccaaaaataaagataacgaacaatggggtataccggcaggattcagagggtaa

SEQ ID NO: 124513 - DNA, 1227 bp, Homo sapiens
  misc_feature (1)...(1227): n = a,t,c or g
atgattgtatatctagaaaaccccattgtctcagcccaaaatctccttaagctgataagcaacttcagcaaagtctcaggatacaaaatcaatgtacaaaaatcacaagcattcttatacaccaataacagacaaacagagagccaaatcatgagtgaactcccattcacaattgcttcaaagagaataaaatacccaggaatccaacttacaagggacgtgaaggacctcttcaaggagaactacaaaccactgctcaaggaaataaaagaggatacaaacaaatggaagaacattccatgctcatgggtagaaagaatcaatattgtgaaaatggccatactgcccaagaccgcaaagaatggtccggttctcccacctttacattcggaggaaaaaattccgtttaattctccattgattattccgttaaacaattacggcaaccaaagcctgacaaaagcgcaggtaaatgtgtcaaaatctgatgacacactcaaaatcaacggagtggaagatcacaaatctatttttgacggagacggaaaaacatatcagaccgttcagcagtttatcgatgaaggcaattatacatccggcgacaaccatacgntgagagaccctcactacgttgaagacaaaggccataaataccttgtattcgaagccaacacgggaacagaaaacggataccaaggcgaagaatctttatttaacaaagcgtactacggcggcggcacgaacttcttctgtaaagaaagccagaagcttcagcagagcgctaaaaaacgcgatgctgagttagcgaacggcgccctcggtatcatagagttaaataatgattacacattgaaaaaagtaatgaagccgctgatcacttcaaacacggtaactgatgaaatagagcgcgcgaatgttttcaaaatgaacggcaaatggtacttgttcactgattcacgcggttcaaaaatgacgatcgatgggattttgccgatttcggaccccaccatcaaacaggattttcgcctgctggggcaaaccagcgtggaccgcttgctgcaactctctcagggccaggcggtgaagggcaatcagctgttgcccgtctcactggtgaaaagaaaaaccaccctggcgcccaatacgcaaaccgcctctccccgcgcgttggccgattcattaatgcagctggcacgacaggtttcccgactggaaagcgggcagtga

SEQ ID NO: 124514 - DNA, 2241 bp, Homo sapiens; identical to SEQ ID NO: 116379

SEQ ID NO: 124515 - DNA, 1254 bp, Homo sapiens
  misc_feature (1)...(1254): n = a,t,c or g
atgagtgaactcccattcacaattgcttcaaagagaataaaatacctaggaatccaacttacaagggatgtgaaggacctcttcaaggagaactacaaaccactgctcaaggaaataaaagaggatacaaagaaatggaagaacattccatgctcatgggtaggaagaatcaatatcgtgaaaatggccatactgcccaaggcagacatctgtgaatcgcttcacgaccacgctgatgagctttaccgcagctgcctcgcgcgtttcggtgatgacggtgaaaactctgacacatgcagctcccggagacggtcacagcttgtctgtaagcggatgccgggagcagacaagcccgtcaggctgttcacgggatgttggcggacatttatcgactatcgaaccggaagattacaacctgctattccgcagagtctccctgaagctctccgtttggctgccgacctggcagagcaaaagcaacggctggagcaaaaaatgcttatggatgcacctaaagtcgaattnnntgaacgcgttgctaccgccagcggggttctaatcggcaactatgccaaagtgctcggcctgggccaaaactatctcttcacctggttgcgtgataacggaattctgatcgcaaccggtgaacgcaggaacgtccccaaacaagaatacatatctcgtgggtatttcacccttaaagaaaccgtgatcgatacaagcaatggaagcaggatttctttcacgactcgtataaccggcaaaggtcagcagtggctgatgaagcgattgcttgatgctggtgcggttgctggcgcctatatcgccgacatcaccgatggggaagatcgggctcgccacttcgggctcatgagcgcttgtttcggcgtgggtatggtggcaggccccgtggccgggggactgttgggcgccatctccttgcatgcaccattccttgcggcggcggtgctcaacggcctcaacctactactgggctgcttcctaatgcaggagtcgcataagggagagcgtcgaggagaacttctaaagatcgtcgttttgccaggtgaccacgttggtcaagaaatcacagccgaagccattaaggttcttaaagctatttctgatgttcgttccaatgtcaagttcgatttcgaaaatcatttaattggtggtgctgctatcgacctgcaggggggggggggaaagccacgttgtgtctcaaaatctctgatgttacattgcacaagataa

SEQ ID NO: 124516 - DNA, 1398 bp, Homo sapiens
gctgacgacctggcagagcataagcaacggctggagcaaacaatgcttatggatgcacctaaagtcgaattcgctgaacgcgttgctaccgacagcggggttctaatcggcgactatgccaaagtcgaaggccgtggcggcggcacttttgcccatgaattgctcgctgtggagtacgcaggctggatttctcccgcgtttcggctgaaggtaaaccagacatttatcgactatcgaaccggaagattacaacctgctattccgcagagtctccctgaagctctccgtttggctgccgacctggcagagcaaaagcaacggctggagcaaaaaatgcttatggatgcacctaaagtcgaattcgctgaacgcgttgctaccgccagcggggttctaatcggcaactatgccaaagtgctcggcctgggccaaaactatctcttcacctggttgcgtgataacggaattctgatcgcaaccggtgaacgcaggaacgtccccatactaggatacttatctcgtggggttttcacccttaaagggaccgtgatcgatacagcattggagcaggatttcttcacgactcgtttaccggtcgaaggccgtggcggcggcacttttgcccatgaattgctcgctgtggagtacgcaggctggatttctcccgcgtttcggctgaaggtaaaccagacatttatcgactatcgaaccggaagattacaacctgctattccgcagagtctccctgaagctctccgtttggctgccgacctggcagagcaaaagcaacggctggagccaaaaatgcttatggatgcacctaaagttcgattcgctgaacgcgttgctaccgccaacggggttctaatcggcaactatgccaaagtgctcggcctgggccaaaactatctcttcacctggttgcgtgataacggaattctgatcgcaaccggtgaacgcaggaacgtccccaaacaagaatacatatctcgtgggtatttcacccttaaagaaaccgtgatcgatacaagcaatggaagcaggatttctttcacgactcgtataaccggcaaaggtcagcagtggctgatgaagcgattgcttgatgctggtgtgctggatgacgtggcaataaagaataagaagtcacaagttaaaaaaacaaaaagatcagtttccggcggtgccggaacaaccagcctcaaaaaattgacttcatggatcgctaaggcaaaagcaaaggctgacaatctgcggttatccaaaaaacgcactcaaaaacatgagttcaagcagaaagtagaggcggctgcgcggaaatatgcttacctgaagaacaagcgttcgcctgatattggcgggatatcaaacttcgataacctaccgcattgcatgacg

SEQ ID NO: 124517 - DNA, 2985 bp, Homo sapiens
atggaagatgaaatgaatgaaatgaagcgagaagggaagtttagagaaaaaagaataaaaagaaatgagcaaagcctccaagaaatatgggactatgtgaaaagaccaaatctacatctgattggtgtacctgaaagtgatgtggagaatggaaccaagttggaaaacactctgcaggatattatccaggagaacttccccaatctagcaaggcaggccaacgttcagattcaggaaatacagagaacgccacaaagatactcctcgagaagagcaactccaagacacataattgtcagattcaccaaagttgaaatgaaggaaaaaatgttaagggcagccagagagaaagggcactgtaactctggcaaaagtcacagatccctttgggaacaaaacaagggaatatttaccacatgtatttgtgatgatgccgaggacttacagtctccttcaactgctggaccctggtttggggttctttataccaaaggtggaccctaccctcaggaagacatattcagtgaagaagttcatacaggccctaagttgaggaagaaaattcaagagtaccagttaacaagcaaatggtcaaaaagtgatgttcaggtttctgtggagaggagaatggctggaggaaatccaaaccagtgccatattggggaagttctcctggatggattcacagctgaattctaccggaggtacaaggaggaactggtaccattccttctgaaactattccaatcaatagaaaaagagggaatcctccctaactcattttatgaggccagcatcattctgatacaaaagccaggcagagacacaacaaaaaaagagaattttagaccaatatccttgatgaacattgatgcaaaaatcctcaataaaatactggcaaaacgaatccagcagcacatcgaaaagcttatccaccatgatcaagtgggcttcatccctgtgatgcaaggctggttcaatatatgcaaatcaataaatgtaatccagcatataaacagagccaaagacaaaaaccacatgattatctcaatagatgcagaaaaagcctttgataaaattcaacaacccttcatgctaaaaactctcaataaattaggtattgatgggatgtatttcaaaataataagagctatctatgacaaacctacagccaatatcatactgaatgggcaaaaactggcagcattccctttgaaaactggcacaagacagggatgccctctctcaccactcctattcaacatagtgttggaagtcctggccagggcaatcaggcaggagaaggaaataaagggtattcaattaggaaaagaggaagtcaaattgtccctgtttgcagatgacatgatcgtatatctagaaaaccccattgtctcagcccaaaatctccttaagctgataagcaacttcagcaaagtctcaggatacaaaatcaatgtacaaaaatcacaagcattcttatacaccaataacagacaaacagagagccaaatcatgagtgaactcccattcacaagtgcttcaaagagaataaaatacctaggaatccaacttacaagggatgtgaaggacctcttcaaggagaactacaaaccactgctcaaggaaataaaagaggatacaaacaaatggaagaacattccatgctcatgggtaggaagaatcaatatcgtgaaaatggccatactgcccaaggtaatttatagattcaatgccatccccatcaagctaccaatgcctttcttcacagaattggaaaaaactactttaaagttcatatggaaccaaaaaagagccctcatcaccaagttaatcctaagccaaaagaacaaagctggaggcatcacactacctgactttaaactatactacaaggctacagtaaccaaaacagcatggtactggtaccaaaacagagataaagatcaatggaacagaacagagccctcagaaataacgccgcatatctacaattatctgatctttgacaaacctgagaaaaacaagcaatggggaaaggattctctatttaataaatggtgctgggaaaacgggctagccatatgtagaaagctgaaactggatcccttccttacaccttatacaaaaattaattcaagatggattaaagacttaaacgttagacctaaaaccagaaaaaccctagaagaaaacctaggcattaccattcaggacataggcatgggcaaggacttcatgtctaaaacaccaaaagcaatggcaacaaaagacaaaatagacaaatgggatctaattaaactaaagagcttctgcacagcaaaagaaactaccatcagagtgaacaggcaacctacaaaatgggagaaaattttcgcaacctactcatctgacaaagggctaatatccagaatctacaatgaactcaaacagatttacaagaaaaaaacaaacaaccccatcaaaaagtgggcgaaggacatgaacagacacttctcaaaagaagacatttatgcagccaaaaaacacatgaaaaaatgctcatcatcactggccatcagagaaatgcaaatcaaaaccacaatgagataccatctcacaccagttagaatggcaatcattaaaaagtcaggaaacaacagcactattcacagtagcaaagacatggattcaacccaaatgtgcatcaatgatacactgtatgaagaaagtgtagaacatatacaccatgaaatacaatccagccataaaaaaggagttcacatcctttgcagcaatatggatggagctgaaagccactttcctaagcaaactaatgcaagaacagaaagccaaatactgcatgttctcacttggctttcttttaacccaccagttacaattactaaagttcatgaaaatgtctaccagccaagtaccactcgtaacactgaaacaacgcagggagtcccaagaaccagggaagaccaagaagcatatttataa

SEQ ID NO: 124518 - DNA, 2277 bp, Homo sapiens; identical to SEQ ID NO: 119544

SEQ ID NO: 124519 - DNA, 1064 bp, Homo sapiens
atgaaaacgctgctgattattgacgctaatctcggcacgcgcctatatggcgaagaccctgctggcgcggcggcgcgaaaagcaaaactggaaatcatcgacaatccgaacgacgctgaaatggcgattgttctcggtgattccatcccgaacgacagcgcgctgaacggtaaaaatgtctggctgggcgatatttcccgggcagttgcgcaccctgagctgttcctgagtgaacgcaaaggccatgcgaaaccttacactgcgccggtcgctgcgacagcaccagttggcgccagcggtccgaaacgcgtagttgcggtgactgcttgcccgactggcgtagcacacacctttatggcgctgaagccattgaaaccgaagcgaaaaaacgtggctgggatccccgataccggtcagtattgtgaaacagtacagacgtcatgctgggagcggtggaaacgccgcttcggcaacgatcttccgtcgtctccagtggagtggctgacggataatggttcatgctaccgggctaatgaaacacgccagttcgcccggatgttgggacttgaaccgaagaacacggcggtgcggagtccggagagtaacggaatagcagagagcttcgtgaaaacgataaagcgtgactacatcagtatcatgcccaaaccagacgggttaacggcagcaaagaaccttgcagaggcgttcgagcattataacgaatggcatccgcatagtgcgctgggttatcgctcgccacgggaatatctgcggcagcgggcttgtaatgggcgcgccggagttttatccagcgggactctagagatccccgataccgagctccgattcgaatccatccgctgcccggtgcaaatcatctccgccagtgataatctgctggtgccaacagcatgttccagtgaacttcatgccgccctgcccgatagccagaaaatggtgatgccctatgccggacacgcctgcaacgtgaccgatcccgaaacgtttaatgctctgttactcaacgggcttgccagcctgttacatcaccgtgaagccgccct

SEQ ID NO: 124520 - DNA, 1827 bp, Homo sapiens; identical to SEQ ID NO: 119535

SEQ ID NO: 124521 - DNA, 1662 bp, Homo sapiens
acagcgcggatgagtcagtgtttcatcgcgtttcgcatagccgttttcatcgagctgatagttccaggacgatttttcgtattgacgtttttcagcgtcgtagccgctgaacagaccgtcttcgaaagcaaaatcattgatgaacttttgtaaggagcttatgaaggaaacaagcccgtgccgcagatattcccgtggcgagcgataacccagcgcactatgcggatgccattcgttataatgctcgaacgcctctgcaaggttctttgctgccgttaacccgtctggtttgggcatgatactgatgtagtcacgctttatcgttttcacgaagctctctgctattccgttactctccggactccgcaccgccgtgttcttcggttcaagtcccaacatccgggcgaactggcgtgtttcattagcccggtagcatgaaccattatccgtcagccactccactggagacgacggaagatcgttgccgaagcggcgttccaccgctcccagcatgacgtcctgtactgtttcactgttgaagccgccggtagtgaccgcccagtgcagtgcctcacgatcacagcagtccagcgcgaacgtgacacgcagtctctctccgttatcacagcagaactcgaacccgtcagagcaccatcgctgattgctttctttcacggccactctgcctgtatgtgcccgtttcgatggcggtacagcaggttttcgctcaagcaacagcgcattctggcgcatgatccggtaaacacgtttggcattgatcgcaggcatacccatcaagttctgcctgtctgcgaagcaacgcccatacccgacgataaccatacgttggcagctttccgataaacatggggtatacggagaaggcacatccggaatcaatagtggggacgaactggcggggggccatatcattccaagttcatcgggttcgtgttgggaaaagtgaccgtggccaaatgttttgccatcgccaggacgttccggcagcatatcaacgccgatgatccgttttgcaccgcgacctttcgccagcatcatcgccatcatgccgactgcgcccagaccgaccaccagcacgttatcactgccggaaacttcgccgcgcaaaattccttcatacgctgtaccaacgccgcaactgataaacgcaccatcttcgtagctcagcgcatccggcaggaggatcagatctttgtcttccgccagcaagtattcggcatgaccgccgtcacgctgccagccgtaagccgcttttccttcgccagtacaagaaataggaaaaccgcgacggcagttcgggcaaaaaccacagccagaaatgtgatacaccagcacgcggtcgccctctttaaaatggcggcagccttgccccatcgccacaatctgcccgcacggttcatgaccgttgataaagccctggtataacggtttatcgggtgccgccgctgtggcacggtgttgatgatagatatagtggacatcgcttccgcaaatcccggaggatttcattttgatcagtacctggttaatccccggcgtcggcaccgcaacttcccgcagatcgacggtcgaatttcctggtaaataagctgccagcatcgttttcataaatccctcattaacaatacgattaattttcat

SEQ ID NO: 124522 - DNA, 1992 bp, Homo sapiens
atggccgctttcatggccctacaacatgagccaccattgcctatttggtccttggataaagctaatgttttggcctcttcaagattatggagaaaaactgtggaggaaaccatcaagaacgaattccctacattgaaggttcaacatcaattgattgattctgccgccatgatcctagttaagaacccaacccacctaaatggtattataatcaccagcaacatgtttggtgatatcatctccgatgaagcctccgttatcccaggttccttgggtttgttgccatctgcgtccttggcctctttgccagacaagaacaccgcatttggtttgtacgaaccatgccacggttctgctccagatttgccaaagaataaggtcaaccctatcgccactatcttgtctgctgcaatgatgttgaaattgtcattgaacttgcctgaagaaggtaaggccattgaagatgcagttaaaaaggttttggatgcagtttttagactagtcattggagaacagatgattgatgtcttagggccggagaaacgcagacggcgtaccacacaggaaaagatcgcaattgttcagcagagctttgaaccggggatgacggtctccctcgttgcccggcaacatggtgtagcagccagccagttatttctctggcgtaagcaataccaggaaggaagtcttactgctgtcgccgccggagaacaggttgttcctgcctctgaacttgctgccgccatgaagcagattaaagaactccagcgcctgctcggcaagaaaacgatggaaaatgaactcctcaaagaagccgttgaatatggacgggcaaaaaagtggatagcgcacgcgcccttattgcccggggatggggaacgaaccgatgactggatggatggccgccgcagtcgtcacactgatgatacggatgtgcttctccgtatacaccatgttatcggagagctgccaacgtatggttatcgtcgggtatgggcgctgcttcgcagacaggcagaacttgatggtatgcctgcgatcaatgccaaacgtgtttaccggatcatgcgccagaatgcgctgttgcttgagcgaaaacctgctgtaccgccatcgaaacgggcacatacaggcagagtggccgtgaaagaaagcaatcagcgatggtgctctgacgggttcgagttctgctgtgataacggagagagactgcgtgtcacgttcgcgctggactgctgtgatcgtgaggcactgcactgggcggtcactaccggcggcttcaacagtgaaacagtacaggacgtcatgctgggagcggtggaacgccgcttcggcaacgatcttccgtcgtctccagtggagtggctgacggataatggttcatgctaccgggctaatgaaacacgccagttcgcccggatgttgggacttgaaccgaagaacacggcggtgcggagtccggagagtaacggaatagcagagagcttcgtgaaaacgataaagcgtgactacatcagtatcatgcccaaaccagacgggttaacggcagcaaagaaccttgcagaggcgttcgagcattataacgaatggcatccgcatagtgcgctgggttatcgctcgccacgggaatatctgcggcagcgggcttgtaatggtcaggcaccgtgtatgaaatctaacaatgcgctcatcgtcatcctcggcaccgtcaccctggatgctgtaggcataggcttggttatgccggtactgccgggcctcttgcgggatatcgtccattccgacagcatcgccagtcactatggcgtgctgctagcgctatatgcgttgatgcaatttctatgcgcacccgttctcggagcactgtccgaccgctttggccgccgcccagtcctgctcgcttcgctacttggagccactatcgactacgcgatcatggcgaccacacccgtcctgtggatctacccactagtcaattcaccatcttgttga

SEQ ID NO: 124523 - DNA, 1936 bp, Homo sapiens
atggctgaattgttcgatatcatcgacccgattgctattgccgaagtacgcgaagcactcactcgtactctggcgactgaactggcggatgagctactggctatttacaacgcgaattaccagagcgagtaccgtgttgagcatgaagatattgcaaaacgcactctgcgtaatgcctgcctgcgtttcctcgcttttggtgaaacgcatctggctgatgtgctggtgagcaagcagttccacgaagcaaacaatatgactgatgcgctggcggcgctttctgcggcggttgccgcacagctgccttgccgtgacgcgctgatgcaggagtacgacgacaagtggcatcagaacggtctggtgatggataaatggtttatcctgcaagccaccagcccggcggcgaatgtgctggagacggtgcgcggcctgttgcagcatcgctcatttaccatgagcaacccgaaccgtattcgttcgttgattggcgcgtttgcgggcagcaatccggcagcgttccatgccgaagatggcagcggttacctgttcctggtggaaatgcttaccgacctcaacagccgtaacccgcaggtggcttcacgtctgattgaaccgctgattcgcctgaaacgttacgatgccaaacgtcaggagaaaatgcgcgcggcgctggaacagttgaaagggctggaaaatctctctggcgatctcacccggtcagccatcgctaacgcttcgctcacatcattgcgtccccacctggaagatgcctatatctccagccagcgtaatcatctggaaaacgttgccaacgcgctcgataagcatttgcagtataacgtcgactacggcgagtggtgcaatggtaaacgcctgaccgggatcagttttgctggcacgctgtttgtgctcaaactggggttggccttcggcggcgctcttatcggctggatgctggcttatggcggatatgatgcggcagaaaaagcgcagaacagcgccacgattagcatcattattgcgctattcacgattgttccggcgatctgttatttgctgagcgcgattatcgctaaacgctactactcactcacgacgcacaatctgaaaaccattatggaacagctggctcagggtaaacgccgttgccagcaacaattcacctctcaagaattgcacgtcattctcagacgaaccgatgactggatggatggccgccgcagtcgtcacactgatgatacggatgtgcttctccgtatacaccatgttatcggagagctgccaacgtatggttatcgtcgggtatgggcgctgcttcgcagacaggcagaacttgatggtatgcctgcgatcaatgccaaacgtgtttaccggatcatgcgccagaatgcgctgttgcttgagcgaaaacctgctgtaccgccatcgaaacgggcacatacaggcagagtggccgtgaaagaaagcaatcagcgatggtgctctgacgggttcgagttactgctgtgataacggagagagactgcgtgtcacgttcgcgctggactgctgtgatcgtgaggcactgcactgggcggtcactaccggcggcttcaacagtgaaacagtacaggacgtcatgctgggagcggtggaacgccgcttcggcaacgatcttccgtcgtctccagtggagtggctgacggataatggttcatgctaccgggctaatgaaacacgccagttcgcccggatgttggacttgaacctacatgaactagggcggcctgccaagagagtcgttgtaatctcttactccggggatcgtcctggaaataatcggggtatggatgcaaaggtggagtctggaatgtcggttggcaataccctgtatattcggctggctaccacgggttgttggcgaagaatcgggggcatgacaccggttccggtgtga

SEQ ID NO: 124524 - DNA, 1662 bp, Homo sapiens
atgcagcaaaccgttcatgccgaacaaagcgcgatcagccacgcctggttgagtggtgaaaaagcgcttgcagccatcaccgttaactacacgccttgtggtcactgccgtcagtttatgaatgaactgaacagcggtctggatctgcgtattcatctgccgggccgcgaggcacacgcgctgcgtgactatctgccagatgcctttgggccgaaagatctggagattaaaacgctgctcagtagtaccatgatgaaacgaatgtgtttctccgtatactccatctgccaaacgtatggttatcgtcgggtatgggaactgattcgcagacaggcagaattgaatggaatgcttgcgatcaatgccaaacgtgtttaccggatcatgcgccagaatgcgatgttgcttgagcgaaaacttgctgtaccgccatcgaaacgggcacatacaggcagagtggccgtgaaagaaagcaatcagcgatggtgctctgacgggttcgagttctgctgtgataacggagagagactgcgtgtcacgttcgcgctggactgctgtgatcgtgaggcactgcactgggcggtcactaccggcggcttcaacagtgaaacagtacaggacgtcatgctgggagcggtggaacgccgcttcggcaacgatcttccgtcgtctccagtggagtggctgacggataatggttcatgctaccgggctaatgaaacacgccagttcgcccggatgttgggacttgaaccgaagaacacggcggtgcggagtccggagagtaacggaatagcagagagcttcgtgaaaacgataaagcgtgactacatcagtatcatgcccaaaccagacgggttaacggcagcaaagaaccttgcagaggcgttcgagcattataacgaatggcatccgcatagacgggccggagcacagcgttttcatgcccagccgctgagcgccaatgacacgctgaaaaatatactcctcgccgccttaccgttcaagccaacgggcgcacaggcacgcgtagtggcggagatcgagcgcgatatggcgctggatgtgccgatgatgcgtctggtgcagggcgatgtaggttccggtaaaacgctggtcgccgccctcgccgcgttgcgtgcgattgcccacggcaaacaggtagcattgatggcaccaaccgaattactcgccgagcagcacgccaataacttccgcaactggtttgcaccgctcggtatcgaagtgggctggctcgccggtaagcagaaaggtaaagcacggctggcacagcaggaagccatcgccagcggtcaggtgcagatgattgtcggtacacacgccatcttccaggaacaggtgcagtttaacggcctggcgctggtgattatcgacgaacagcatcgttttggcgtgcatcagcgtctggcattgtgggagaaaggccagcagcagggcttccatccgcatcagttgatcatgaccgccacgccgatcccccgcacgctggcaatgactgcgtatgccgatctcgatacctcggtgatagatgagctgccgccaggccgcacgccagtgactacggtcgctattcctgatacccgccgtaccgacatcattgaccgcgtgcaccacgccatgcatattgtaaccgaaaaataa

SEQ ID NO: 124525 - DNA, 990 bp, Homo sapiens
atgttatcggagagctgccaacgtatggttatcgtcgggtatgggcgctgcttctcagacaggcagaacttgatggtatgcctgcgatcaatgccaatacgtgtttaccggatcatgcgccagaatgcgctgttgcttgagcgaaaacctgctgtaccgccatcgaaacgggcacatacaggcagagtggccgtgaatgaaagcaatcagcgatgttctgctgtgataacggacagatcactgcgtgtcacgttcgcgctggactgctgtgatcgtgaggcactgcactgggcggtcactaccggcggcttcaacagtgaaacagtacaggacgtcatgctgggatcggtggaacgccgcttcggcaacgatcttccgtcgtctccagtggagtggctgacggataatggttcatgctaccgggctaatgaaacacgccagttcgcccggatgttgggacttgaaccgaagaacacggcggtgcggagtccggagagtaacggaatagcagagagcttcgtgaaaacgataaagcgtgactacatcagtatcatgcccaaaccagacgggttaacggcagcaaagaaccttgcagaggcgttcgagcattataacgaatggcatccgcctagtgcgctgggttatcgatcgccacgggaatatctggggcagcgggttgtactgggcatgccatcggtagcggaccatcttcagcgtttttcggcgcaccggtacgcagggtttcacgcacatcggtcacagcaaaagcatgtccacgcggcttgttgtaatcgcgcgagaagggataccccgcccacaggatcaccagccgtggatcttccgccagggcgtcaacacgctctgactgttccgaggtggctttccaggagagatattgatcgggatgctgcggggcaaaggtttcattcttcgcttccacagttacaggttttgcgggagcagccgtttgttcagcgtgaacagaagtga

SEQ ID NO: 124526 - DNA, 1281 bp, Homo sapiens
atgggaggtctaggaggtgcagtggttcgtcggcttggagttgcacttcaggattgctgctccttgccagcaacggcgcaaagcttgacggcggatgagtttgacgagctgacagcagtaggcttcagcagtgtggtaaggcgtgtcggtagtgggctgtggtcctatgtgctggaaggtttctgcggtgaacgtcttgtgaaatgtgagaaatgtgttgtgattcgtgagatgggttgtgttgctaaagttgtaaatttgcatttaaatgataacggagagagactgcgtgtcacgttcgcgctggactgctgtgatcgtgaggcactgcactgggcggtcactaccggcggcttcaacagtgaaacagtacaggacgtcatgctgggagcggtggaacgccgcttcggcaacgatcttccgtcgtctccagtggagtggctgacggataatggttcatgctaccgggctaatgaaacacgccagttcgcccggatgttgggacttgaaccgaagaacacggcggtgcggagtccggagagtaacggaatagcagagagcttcgtgaaaacgataaagcgtgactacatcagtatcatgcccaaaccagacgggttaacggcagcaaagaaccttgcagaggcgttcgagcattataacgaatggcatccgcatacaaggctactggagctaacttcagaacggcaggatttattggaaaatatgcagcaaatcaaagaattaaaggaactattgaaaagcaaggatcagaaatgtggtgctggcgacccagctggtctgcagctcttgagagttgacaggacaccttaccagccccctggatccacttccactggggaggggcagcttcccaaagctgactggggttctatgaccaggaagtggggggctattggacaggcaaaacgatgtctgccacatcccttcatgcaacctacactcatgccgatcagaggatccccaagaaaatctgctggtggagatacaatggtgctcatttatcagcgcatgatgctgcagtcgttaagtaatgaaggtgttctttattatgaaggagcacttgataatctttctgaagaattatcgcttagcttggatgaagatgtcgaaaaaatacaaatgactttagctttcttttcaaaatatggattgatacaaattgatgaagaacaaaatgccgaaatgttacaagttcatgcgattgtagaccaagaaacagactgggctagatataagagaaatcaaagttattttgcatga

SEQ ID NO: 124527 - DNA, 1651 bp, Homo sapiens
atgaagagacagcggtaccctacggtatccgtatcggcctctattctcgtgaataatctcactaatacgctttttaacggccgcctacttgtcaagcttgctgatgcaagcatgcatgcctgcaggtccgtttcccggcaacatggtgtagcacccagccagttatttctctggcgtaagcaataccaggaaggaagtcttactgctgtcgccgccggagaacaggttgttcctgcctctgaacttgctgccgccatgaagcagattaaagaactccagcgcctgctcggcaagaaaacgatggaaaatgaactcctcaaagaagccgttgaatatggacgggcaaaaaagtggatagcgcacgcgcccttattgcccggggatggggattgcacgtcattctcagacgaaccgatgactggatggatggccgccgcagtcgtcacactgatgatacggatgtgcttctccgtatacgccatgttatcggggagctgccaacgtatggttatcgtcgggtatgggcgctgcttcgcacacaggcagaacttgataggtatgcctgcgatcaatgccaaacgtgtttaccggatcatgcgccagaatgcgctgttgctttgagcgaaaacctgctgtaccgccatcgaaacgggcacatacaggcagagtggccgtgaaagaaagcaatcagcgatggtgctctgacgggttcgagttctgctgtgataacggagagagactgcgtgtcacgttcgcgctggactgctgtgatcgtgaggcactgcactgggcggtcactaccggcggcttcaacagtgaaacagtacaggacgtcatgctgggagcggtggaacgccgcttcggcaacgatcttccgtcgtctccagtggagtggctgacggataatggttcatgctaccgggctaatgaaacacgccagttcgcccggatgttgggacttgaaccgaagaacacggcgtgctactacggtcccagggatccgcagcccgtacgctcggctgcggccacgcgcacggcaccgcaggaccaccggagcagcgctgatacccgccggcggctcagcccccgcagacagccgccgcggtcctatttcgggatcgtgcgcgaccaggaaccacgccgagcgaaacgcccgcgccttcaccgagctcgcgtagacgcacgcggacacggcaagggcgcgcagcggcctcggcagcccagtctgcacattggacttcccagacgagagcccgccgcagcgcggggtcagaacggcggaccacgagacccaaacgctgccggggagaacaccggacggcccagacaccagccacagaccaaaagccagagcacgcgccgtgcccacactaaagcgccggcgaacggcgtccacttaactcgatgtcgcgccgtggccatccagtcggacgaatcccaaaacttcaggccagatcactcgagccctccaccactaccgccatcacgacttacgtcagggtacaacgccaaatccggaggcgccaccgcatacttatccctgggaacttggccaggtccaggaggcactgggctccatccccccacagggcgcgggcctcaaatggtggctgctgattggttagaacgtcgggactgtttagatgggtga

SEQ ID NO: 124528 - DNA, 1908 bp, Homo sapiens
atggataaattcctcgacacatacatcctcccaagactaaaccaggaagaagttgaatctctgaacagaccaataacaggctctgaaattgaggcaataatcaatagcttaccaaccaaaaaaagtccgggaccagatggattcacagccgaattctaccagagttacaaagaggagctggtaccattccttctgaaactattccaatcaatagaaaaagagggaatcctccctaactcattttatgaggccagcatcatcctgataccaaagcctggcagagacacaaccaaaaaggagaaatttagaccaatatccttgatgaacatcgatgtaaaaatcctcaataaaatactggcagaccaaatccagcagcacatcaaaaagcttatccaccatgatcaagtgggcttcatccctgggatgcaaggctggttcaacatattgttggaagttctggccagggcaatcaggcaggagaaggaaataaagggtattcaattaggaaaagagaaagtcaaattgtccctgtttgcagatgacatgattgtgtatctagaaaaccccatcgtctcagccccaaatctcctcaagctgataagcaagttcagcaaagtctcaggatacaaaatcaatgtacaaaaatcacaagcattcttatacaccaataacagacaaacagagagccaaatcatgagtgaactcccattcacaactgcttcaaagagaataaaatacctaggaatccaacttacaagggatgtgaaggacctcttcaaggagaactacaaaccactgctcaatgaaattaaagaggatacaaagaaatggaagaacattccatgctcatgggtaggaagaatcaatatcgtgaaaatggccatactgcccaaggtaatttatagattcaatgccatccccatcaagctaccaatgactttcttcacagaattggaaaaaactactttaaagttcatatggaaccaaaaaagagcccgccttgccaagtcaatcctaagccaaaagaacaaagctggaggcatcacgctacctgacttcaaactatactacaaggctacagtaaccaaaacagcatggtaccggtaccaaaacagagatatagaccaatggaacagaacagagccctcagaattaatgccacatatctacaactatctgatctttgacaaacctgagaaaaacaagcaatggggaaaggattccctatttaagaactggtgctgggaaaactggctagccatatgtagaaagctgaaactggatcccttccttacaccttatacaaaaattaattcaagatggattaaagacttaaatgtgagacctaaaaccataaaaaccctagaagaaaacctaggcattaccattcaggacataggcatcggcaaggacttcatgtctaaaacaccaaaagcaatggcagcaaaagccaaaattgacaaatgggatctaattaaactaaagagcttctgcacagcaaaagaaactaccatcagagtgaacaggcaacctacaaaatgggagaaaagttttgcaatctactcatctgacaaagggctaatatccagaatctacaatgaacacaaacaaatttacaagaaaaaaacaaacaaccccatcaaaaagtgggcgaaggttatgaacagacacttctcaaaagaagacatttatgcagccaaaaaacacatgaaaaaatgctcatcatcactggccatcagagaaatgcaaatcaaaaccactatgagataccatctcacagcagttagaatggcaatcattaaaacatcaggaaacaacagatattcagtgttacgggcatatgccaaagaatcacagtcagcctacattgaaaaaaagctggcatttgggaacctgggctatacttga

SEQ ID NO: 124529 - DNA, 2823 bp, Homo sapiens
atgcccttgagagccttcaacccagtcagctccttccggtgggcgcggggcatgactatcgtcgccgcacttatgactgtcttctttatcatgcaactcgtaggacaggtgccggcagcgctctgggtcattttcggcgaggaccgctttcgctggagcgcgacgatgatcggcctgtcgcttgcggtattcggaatcttgcacgccctcgctcaagccttcgtcactggtcccgccaccaaacgtttcggcgagaagcaggccattatcgccggcatggcggccgacgcgctgggctacgtcttgctggcgttcgcgacgcgaggctggatggccttccccattatgattcttctcgcttccggcggcatcgggatgcccgcgttgcaggccatgctgtccaggcagcctaacttcgatcattggaccgctgatcgtcacggcgatttatgccgcctcggcgagcacatggaacgggttggcatggattgtaggcgccgccctataccttgtctgcctccccgcgttgcgtcgcggtgcatggagccgggccacctcgacctgaatggaagccggcggcacctcgctaacggattcaccactccaagaattggagccaatcaattcttgcggagaactgtgaatgcgcaaaccaacccttggcagaacatatccatcgcgtccgccatctccagcagccgcacgcggcgcatctcgggcagcgttgggtcctggccacggtctggaaacgcggaagtcagcgccctgcaccattatgttccggatctgcatcgcaggatgctgctggctaccctgtggaacacctacatctgtattaacgaagcgctggcattgaccctgagtgatttttctctggtcccgccgcatccataccgccagttgtttaccctcacaacgttccataaccgggcatgttcatcatcagtaacccgtatcgtgagcatcctctctcgtttcatcggtatcattacccccatgaacagaaatcccccttacacggaggcatcagtgaccaaacaggaaaaaaccgcccttaacatggcccgctttatcagaagccagacattaacgcttctggagaaactcaacgagctggacgcggatgaacaggcagacatctgtgaatcgcttcacgaccacgctgatgagctttaccgcagctgcctcgcgcgtttcggtgatgacggaaacagctatgaccatgattacgccaagcttgcatgcctgcaggtcgaaggccgtggcggcggcacttttgcccatgaattgctcgctgtggagtacgcaggctggatttctcccgcgtttcggctgaaggtaaaccagacatttatcgactatcgaaccggaagattacaacctgctattccgcagagtctccctgaagctctccgtttggctgccgacctggcagagcaaaagcaacggctggagcaaaaaatgcttatggatgcacctaaagtcgaattcgctgaacgcgttgctaccgccagcggggttctaatcggcaactatgccaaagtgctcggcctgggccaaaactatctcttcacctggttgcgtgataacggaattctgatcgcaaccggtgaacgcaggaacgtccccaaacaagaatacatatctcgtgggtatttcacccttaaagaaaccgtgatcgatacaagcaatggaagcaggatttctttcacgactcgtataaccggcaaagacgtagtaagaaccaccagcattgtaatgctggctaaagtcactttcctgagctgtataacgatgagcgattttactttttctggctatgaattggcctgctttgtaacacactccggtctatcccgtagcgccgggcatatcctgtcgcaatgtgcaaatctcgcggcaacaaccagtgaatacttcattcacaagcctcaccgcctgatcgcggcagaaactggttatagccaatcaaccgtcgttcgtgcattccgtgaagctgtaaacaaaggaattctgtctgtagagattgttatcggcgatcaccgtgaacgtcgcgctaacctgtaccggtttacaccatcctttttggccttcgcacaacaagccaaaaatgcgctgatagaaagcaaattaaagatctcttcagcggcaaccaaggcaaaagcaaaggctgacaatctgcggttatccaaaaaacgcactcaaaaacatgagttcaagcagaaagtagaggcggctgcgcggaaatatgcttacctgaagaacaagcgttcgcctgatattggcgggatatcaaacttcgataacctaccgcattgcatgacgatcctctacgccggacgcatcgtggccggcatcaccggcgccacaggtgcggttgctggcgcctatatcgccgacatcaccgatggggaagatcgggctcgccacttcgggctcatgagcgcttgtttcggcgtgggtatggtggcaggccccgtggccgggggactgttgggcgccatctccttgcatgcaccattccttgcggcggcggtgctcaacggcctcaacctactactgggctgcttcctaatgcaggagtcgcataagggagagcgtcgaggagaacttctaaagatcgtcgttttgccaggtgaccacgttggtcaagaaatcacagccgaagccattaaggttcttaaagctatttctgatgttcgttccaatgtcaagttcgatttcgaaaatcatttaattggtggtgctgctatcgacctgcaggggggggggggaaagccacgttgtgtctcaaaatctctgatgttacattgcacaagataa

SEQ ID NO: 124530 - DNA, 1217 bp, Homo sapiens
atggacagtatgtctggagggggacagtataggaagattaatgggaatccaacatcagtgaagtgccctttgctgctgctgccagccattctgactccagagccggtgaataggtggagacaaagctgcaaagcatttgcacggcattctccgcttgctttcagagtgacaatttcaacaagcaccttttttgacggcttgctggtgacaggactatacacatctacaagtgttcaggcatcacagagcattggaggttccagtgctttcggatttgtgttggaagttctggccagggcaattaggcaggagaaggaaataaagggtattcaattaggaaaagaggaaatcaaattgtccctgtttgcaggcgacatgattgtatatctagaaaaccccattgtctcagcccaaaatctccttaagctgataagcaacttcagcaaagtctcaggatacaaaatcaatgtacaaaaatcacaagcattcttatacaccaacaacagacaaacagagagccaaatcatgagtgaactcccattcacaattgcttcaaagagaataaaatacctaggaatccaacttacaagggatgtgaaggacctcttcaaggagaactacaaaccactgctcaaggaaataaaagaggatacaaacaaatggaagaacattccatgctcatgggtaggaagaatcaatatcgtgaaaatggccatactggccaagaagacagatggatcttggagaatgacagtggattatcgtaagcttaaccttgtggtgagtccagttgcagctgctgtaccagatgtggttgtactgcttgagcaaattaacacatctcctggtactcggtatgcagtcattgacttggcaaatgcctttttctccattcctggccataaggcccaccggaagcaatttgccttcagctggcaaagccagcaatatacctttactgtcctacctcatgggtatatcaactctctgccttggtgtcataatctttttctgagagaccttgatcgcttttcgcttccacaagatatcacactggtccatgacattgatgacattatgctgattggatccagtgagcaagaagtaacaagcacactggacttactcatgagatatttttgtgccagaggatgggaaataaatccaactaaaattcagggaacttctatgtcagtaaaatttctacgggtctggtg

SEQ ID NO: 124531 - DNA, 1134 bp, Homo sapiens
atgtaccaacagtccctgtacgttgttcgtgtgattgttctcatactgttaatctcagcctgtcgcaagtacgatgtaatgactctcaagagccgtgattggacggcctttattgatagcaagcgcccttattgcccggggatggggagtaagcttagtcagccgtgtctccgggtgtcgcgtgcgcagttgcacgtcattctcagacgaaccgatgactggatggatggccgccgcagtcgtcacactgatgatacggatgtgcttctccgtatacaaccatgtttatcggagagctgccaacgtatggttatcgtcgaggtatggtgacgcttcgcagaacaggcagaacgtgaatgatatggcctgcgaatcaatgccaaaccgtgttttaccggaatcgatgcccagagatgcgctgttgcctgaagcgaaaaacctgctgtaccgtccatcgagaccgggcacataccaggcagagtggcccgtgaaagaaaagcaatcaagcgatggtgctctgacgggttcgagttctgctgtgataacggagagagactgcgtggtcacgttcgcgctggactgctgtgatcgtgaggcactgcactgggcggtcactaccggcggcttcaacagtgaaacagtacaggacgtcatgctgggagcggtggaacgccgcttcggcaacgatcttccgtcgtctccagtggagtggctgacggataatggttcatgctaccgggctaatgaaacacgccagttcgcccggatgttgggacttgaaccgaagaacacggcggtgcggagtccggagagtaacggaatagcagagagcttcgtgaaaacgataaagcgtgactacatcagtatcatgcccaaaccagacgggttaacggcagcaaagaaccttgcagaggcgttcgagcattataacgaatggcatccgcatagtggtaccagggggcgaagggcgagattctctgtgcgcgcgacttacgcggccgggcgcttagcgaccatccctgggtaccgcgggggacctctcggcctgatgtgtggacaacccaataggaaacccacggatggtgccaatgagcggctgacgatgatccgcgctgctaccgcgatgagcgaagg

SEQ ID NO: 124532 - DNA, 2607 bp, Homo sapiens
atggccagtgttggcgagtttacccccaccccgttcccactcagggctccgcaaacctcggcacactgcagtgcagtcgacctggaggaggccggcgctggtgacccagcttgtgataaactggtcggccagcgcaactaccggtgcggacatgttaagagggccccggggtgggttttttcggggcacgatctcaggcccgctgatgaccgctgtggtatgaatgaggtcaccgcattcggagaggtggatgtccagatgtggactcaggaaatggcctcatcccgaaagtctcgggctacctcggacgagagcagcctggagaccagcccgccagactcgtcgcagcggccgtccgctaggcccgcgtctccgggctcggacgccgagaaaaggaagaagcggcgggtgctattctccaaggcgcagacgctggagttggagcggcgcttccggcagcagcggtacctgtctgcgcccgagcgcgagcagctggcgagcctgcttcgcctcacgcccacgcaggtcaagatctggttccagaatcatcgctacaagctgaagcgcgctcgcgctccaggggcggcggagtcgcctgacctggcagcatccgccgagctgcacgccgcgcccggcctgctgcgtcgcgtggtggtgccggtgcttgttcgcgacgggcagccgtgcggcggcggcggcggtggcgagagctgctggcgtttcgaataccgaaaagtcaaccctgtggaccacgacagggcagaaggagtttctccggagatgagccggcgaggccagggcctcttgtgcaagcagtcactttctcacagaagcgacgacctcgctcccaggcacccgctgctgggagatgcgccagaggagagcagttggggcatcagagcacaacaagaagagcctaaagaagatgcaggccagcaatgccaaggctgtgagtgtatgtgccgaggctatcaaggccctcgtaaaggccaaggagacatctgttatcacttaacccattacaagcccgctgccgcagatattcccgtggcgagcgataacccagcgcactatgcggatgccattcgttataatgctcgaacgcctctgcaaggttctttgctgccgttaacccgtctgccactccactggagacgacggaagatcgttgccgaagcggcgttccaccgctcccagcatgacgtcctgtactgtttcactgttgaagccgccggtagtgaccgcccagtgcagtgcctcacgatcacagcagtccagcgcgaacgtgacacgcagtctctctccgttatcacagcagaactcgaacccgtcagagcaccatcgctgattgctttctttcacggccactctgcctgtatgtgcccgtttcgatggcggtacagcaggttttcgctcaagcaacagcgcattctggcgcatgatccggtaaacacgtttggcattgatcgcaggcataccatcaagttctgcctgtctgcgaagcagcgcccatacccgacgataaccatacgttggcagctctccgataacatggtgtatacggagaagcacatccgtatcatcagtgtgacgactgcggcggccatccatccagtcatcggttcgtctgagaatgacccagatggcaagcccgtgaagcgcacaatctcaagtgttagtgcggatggtaagaccatagagattaacatcggctttggctttcctgtgaagcctaaaacggtattcgcaatcgaccgcaccgaccttgcgttgcagcagttcgtagttacaaaaatcgacaagggcgatgatgatgaggaatttacctacaaaatcacggcggtggagtacgatcctaataagtacgatgaaattgattacggggttaacatcgacgaccgaccgacaagcatcgttgagccagaacagatccctaagcctgaaaacgtgaaagtgttctcagagtcgagaatcgtccaggggatgagcgtagaaacgatgattgtaagctgggataaagtgccgtacgcagttttctatgacgtacagtggagaaaggataacggcaactggcaaaacgttccgcagacagcaaacaaagaggtttatgttgaagggatttacgctggcaactatcaggttcgcgtgcgccccgtcgctggttcgggcacgacttcaggctggtcaaatatcgtcgcggcaacgttgacgggtaaacagggtgaaccgggccgaccgattaacctcacagctacggatgatgttgtttttggtatccgtacaaaatgggggttctctgatggttctggagatacagcctatacagagttgcaacagtcaccggatggaacagtggataacgcaagtttgctttcattgattccgtatccgcagcatgagtattatcactcaccgatgccgggaggtaatattgtgtggtatcgggtaaggacggttgacaggatcggtaacgtatctcagtggactgattttgtcagaggcatggcatcaacaaacgttgacgatatcatcggggagatttctgtcgatatcgaaaactcgccgggttacgagtggcttgttgtgggagactgcgggagcaactga

SEQ ID NO: 124533 - DNA, 2607 bp, Homo sapiens
atgcccttgagagccttcaacccagtcagctccttccggtgggcgcggggcatgactatcgtcgccgcacttatgactgtcttctttatcatgcaactcgtaggacaggtgccggcagcgctctgggtcattttcggcgaggaccgctttcgctggagcgcgacgatgatcggcctgtcgcttgcggtattcggaatcttgcacgccctcgctcaagccttcgtcactggtcccgccaccaaacgtttcggcgagaagcaggccattatcgccggcatggcggccgacgcgctgggctacgtcttgctggcgttcgcgacgcgaggctggatggccttccccattatgattcttctcgcttccggcggcatcgggatgcccgcgttgcaggccatgctgtccaggcaggtagatgacgaccatcagggacagcttcaaggatcgctcgcggctcttaccagcctaacttcgatcattggaccgctgatcgtcacggcgatttatgccgcctcggcgagcacatggaacggtaaccgggcatgttcatcatcagtaacccgtatcgtgagcatcctctctcgtttcatcggtatcattacccccatgaacagaaatcccccttacacggaggcatcagtgaccaaacaggaaaaaaccgcccttaacatggcccgctttatcagaagccagacattaacgcttctggagaaactcaacgagctggacgcggatgaacaggcagacatctgtgaatcgcttcacgaccacgctgatgagctttaccgcagctgcctcgcgcgtttcggtgatgacggaaacagctatgaccatgattacgccaagcttgcatgcctgcaggtcgaaggccgtggcggcggcacttttgcccatgaattgctcgctgtggagtacgcaggctggatttctcccgcgtttcggctgaaggtaaaccagacatttatcgactatcgaaccggaagattacaacctgctattccgcagagtctccctgaagctctccgtttggctgccgacctggcagagcaaaagcaacggctggagcaaaaaatgcttatggatgcacctaaagtcgaattcgctgaacgcgttgctaccgccagcggggttctaatcggcaactatgccaaagtgctcggcctgggccaaaactatctcttcacctggttgcgtgataacggaattctgatcgcaaccggtgaacgcaggaacgtccccaaacaagaatacatatctcgtgggtatttcacccttaaagaaaccgtgatcgatacaagcaatggaagcaggatttctttcacgactcgtataaccggcaaaggtcagcagtggctgatgaagcgattgcttgatgcaagaaaccgtgatcgatacaagcaatggaagcaggatttctttcacgactcgtataaccggcaaagcgccgggcatatcctgtcgcaatgtgcaaatctcgcggcaacaaccagtgaatacttcattcacaagcctcaccgcctgatcgcggcagaaactggttatagccaatcaaccgtcgttcgtgcattccgtgaagctgtaaacaaaggaattctgtctgtagagattgttatcggcgatcaccgtgaacgtcgcgctaacctgtaccggtttacaccatcctttttggccttcgcacaacaagccaaaaatgcgctgatagaaagcaaattaaagatctcttcagcggcaaccaaggttaaagctgttctcgctaagacattggctttatttaattttttatccacacccccatgtcaaaatgataccccctccccctgtcaggatgacgtggcaataaagaataagaagtcacaagttaaaaaaacaaaaagatcagtttccggcggtgccggaacaaccagcctcaaaaaattgacttcatggatcgctaaggcaaaagcaaaggctgacaatctgcggttatccaaaaaacgcactcaaaaacatgagttcaagcagaaagtagaggcggctgcgcggaaatatgcttacctgaagaacaagcgttcgcctgatattggcgggatatcaaacttcgataacctaccgcattgcatgacggtaaacgaagctcttaatgcggttttagccaaaaataaagataacgaacaatggggtgcggttgctggcgcctatatcgccgacatcaccgatggggaagatcgggctcgccacttcgggctcatgagcgcttgtttcggcgtgggtatggtggcaggccccgtggccgggggactgttgggcgccatctccttgcatgcaccattccttgcggcggcggtgctcaacggcctcaacctactactgggctgcttcctaatgcaggagtcgcataagggagagcgtcgaggagaacttctaaagatcgtcgttttgccaggtgaccacgttggtcaagaaatcacagccgaagccattaaggttcttaaagctatttctgatgttcgttccaatgtcaagttcgatttcgaaaatcatttaattggtggtgctgctatcgacctgcaggggggggggggaaagccacgttgtgtctcaaaatctctgatgttacattgcacaagataa

SEQ ID NO: 124534 - DNA, 2562 bp, Homo sapiens; identical to SEQ ID NO: 116377

SEQ ID NO: 124535 - DNA, 1989 bp, Homo sapiens
atgctgaatggagagaaattagcagttaagcaagaagctcttctggctgccattagtgaaaaagacgccaatatagctctcttggagctttcgtcctctaagaagaagacccaagaggaagtggctgccctgaagcgggagaaggatcgtctggtacagcagcttaagcagcaggtcgaaggccgtggcggcggcacttttgcccatgaattgctcgctgtggagtacgcaggctggatttctcccgcgtttcggctgaaggtaaaccagacatttatcgactatcgaaccggaagattacaacctgctattccgcagagtctccctgaagctctccgtttggctgccgacctggcagagcaaaagcaacggctggagcaaaaaatgcttatggatgcacctaaagtcgaattcgctgaacgcgttgctaccgccagcggggttctaatcggcaactatgccaaagtgctcggcctgggccaaaactatctcttcacctggttgcgtgataacggaattctgatcgcaaccggtgaacgcaggaacgtccccaaacaagaatacatatctcgtgggtatttcacccttaaagaaaccgtgatcgatacaagcaatggaagcaggatttctttcacgactcgtataaccggcaaaggtcagcagtggctgatgaagcgattgcttgatgctgacgtagtaagaaccaccagcattgtaatgctggctaaagtcactttcctgagctgtataacgatgagcgattttactttttctggctatgaattggcctgctttgtaacacactccggtctatcccgtagcgccgggcatatcctgtcgcaatgtgcaaatctcgcggcaacaaccagtgaatacttcattcacaagcctcaccgcctgatcgcggcagaaactggttatagccaatcaaccgtcgttcgtgcattccgtgaagctgtaaacaaaggaattctgtctgtagagattgttatcggcgatcaccgtgaacgtcgcgctaacctgtaccggtttacaccatcctttttggccttcgcacaacaagccaaaaatgcgctgatagaaagcaaattaaagatctcttcagcggcaaccaaggttaaagctgttctcgctaagacattggctttatttaattttttatccacacccccatgtcaaaatgataccccctccccctgtcaggatgacgtggcaataaagaataagaagtcacaagttaaaaaaacaaaaagatcagtttccggcggtgccggaacaaccagcctcaaaaaattgacttcatggatcgctaaggcaaaagcaaaggctgacaatctgcggttatccaaaaaacgcactcaaaaacatgagttcaagcagaaagtagaggcggctgcgcggaaatatgcttacctgaagaacaagcgttcgcctgatattggcgggatatcaaacttcgataacctaccgcattgcatgacggtaaacgaagctcttaatgcggttttagccaaaaataaagataacgaacaatggggtgcggttgctggcgcctatatcgccgacatcaccgatggggaagatcgggctcgccacttcgggctcatgagcgcttgtttcggcgtgggtatggtggcaggccccgtggccgggggactgttgggcgccatctccttgcatgcaccattccttgcggcggcggtgctcaacggcctcaacctactactgggctgcttcctaatgcaggagtcgcataagggagagcgtcgaggagaacttctaaagatcgtcgttttgccaggtgaccacgttggtcaagaaatcacagccgaagccattaaggttcttaaagctatttctgatgttcgttccaatgtcaagttcgatttcgaaaatcatttaattggtggtgctgctatcgacctgcaggggggggggggaaagccacgttgtgtctcaaaatctctgatgttacattgcacaagataa

SEQ ID NO: 124536 - DNA, 3213 bp, Homo sapiens
atgtcaagtgaatgggagtggttgaggtgctcagaagttaaaggtcagagagacgtgaggccagggtgtttggggtgggactttcgtgtgtatattgttgaggacacccaggatgaggacagaacttggagtgtcaaggaagcctgtgagctggtccttagagttcaggaaatgatcatcacaagggtggtagatgctgcaccacaccacacctattccaaaattgaccacatagttggaagtaaagctctcctcagcaaatgtaaaagaacagaaattataacaaactgtctctcagaccacagtgcaatcaaactagaactcaggattaagaatctcactcaaagccgctcaactacatggaaactgaacaacctgctcctgaatgactactgggtacataacgaaatgaaggcagaaataaagatgttctttgaaaccaacgagaacaaagacaccacataccagaatctctgggacgcattcaaagcagtgtgtagagggaaatttatagcactaaatgcctacaagagaaagcaggaaagatccaaaattgacaccctaacatcacaattaaaagaactagaaaagcaagagcaaacacattcaaaagctagcagaaggcaagaaataactaaaatcagagcagaactgaaggaaatagagacacaaaaaacccttcaaaaaatcaatgaatccaggagctggttttttgaaaggatcaacaaaattgatagaccgctagcaagactaataaagaaaaaaagagagaagaatcaaatagacgcaataaaaaatgataaaggggatatcaccaccgatcccacagaaatacaaactaccatcagagaatactacaaacaactctacgcaaataaactagaaaatctagaagaaatggatacattcctcgacacatacactctcccaagactaaaccaggaagaagttgaatctctgaatagaccaataacaggctctgaaattgtggcaataatcaatagtttaccaaccaaaaagagtccaggaccagatggattcacagccgaattctaccagaggtacaaggaggaactggtaccattccttctgaaactattccaatcaatagaaaaagagggaatcctccctaactcattttatgaggccagcatcattctgataccaaagccaggcagagacacaaccaaaaaagagaattttagaccaatatccttgatgaacattgatgcaaaaatcctcaataaaatactggcaaaccgaatccaacagcacatcaaaaagcttatccaccatgatcaagtgggcttcatccctgggatgcaaggctggttcaatatacgcaaatcaataaatgtaatccagcatataaacagagccaaagacaaaaaccacatgattatctcaatagatgcagaaaaggcctttgacaaaattcaacaacccttcatgctaaaaactctcaataaattaggtattgatgggacgtatgtcaaaataataagagctatctatgacaaacccacagccaatatcatactgaatgggcaaaaactggaagcattccctttgaaaactggcacaagacagggatgccctctctcaccgctcctattcaacatagtgttggaagttctggccagggcaatcaggcaggagaaggaaataaagggtattcaattaggaaaagaggaagtcaaattgtccctgtttgcagacgacatgattgtttatctagaaaaccccatcgtctcagcccaaaatctccttaagctgataagcaacttcagcaaagtctcaggatacaaaatcaatgtacaaaaatcacaagcattcttatacaccaacaacagacaaacagagagccaaatcatgggtgaactcccattcacaattgcttcaaagagaataaaatacctaggaatccaacttacaagggatgtgaaggacctcttcaaggagaactacaaaccactgctcaaggaaataaaagaggatacaaacaaatggaagaacattccatgctcatgggtaggaagaatcaatatcgtgaaaatggccatactgcccaaggtaatttatagattcaatgccatccccatcaagctaccaatgactttcttcacagaattggaaaaaactactttaaagttcatatggaaccaaaaaagagcccgcattgccaagtcaatcctaagccaaaagaacaaagctggaggcatcacactacctgacttcaaactatactacaaggctacagtaaccaaaacagcatggtactggtaccaaaacagagatatagatcaatggaacagaacagagccctcagaaataacgccgcatacctacaactatctgatctttgacaaacctgagaaaaacaagcaatggggaaaggattccctatttaataaatggtgctgggaaaactggctagccatatgtagaaagctgaaactggatcccttccttacaccttatacaaaaatcaattcaagatggattaaagatttaaacgttagacctaaaaccataaaaaccctagaagaaaacctaggcattaccattcaggacataggcgtgggcaaggacttcatgtccaaaacaccaaaagcaatggcaacaaaagccaaaattgacaaatgggatctaattaaactaaagagcttctgcacagcaaaagaaactaccatcagagtgaacaggcaacctacaacatgggagaaaattttcgcaacctactcatctgacaaagggctaatatccagaatctacaatgaactcaaacaaatttacaagaaaaaaacaaacaaccccatcaaaaagtgggcgaaggacatgaacagacacttctcaaaagaagacatttatgcagccaaaaaacacatgaaaaaatgctcatcatcactggccatcagagaaatgcaaatcaaaaccactatgagatatcatctcacaccagttagaatggcaatcattaaaaagtcaggaaacaacagccagagaggcttttatgattctataaaaagccccacaaaggaatcctatgcagccataaaaaggaacgagatcatgtcctttgcaggctatggatggagctggacgctgttatccttagcaactaacacaggaacggaaaaccaaacactgcatattttcacttataagtgggagctgaacaatgagagcacatggatacatgaagggatgggg

SEQ ID NO: 124537 - DNA, 2214 bp, Homo sapiens
ttagttcatcaactcctttgccaagtgtgtcacaacatgctttggcatcctccacgcataaaggacgcggatttcttctacgttcaggttgtagcctgaatcattttggtgatttcctgcttcaatgggcagccaagcttcactctctatcaactggtgagaacggcttgcccggcagcttcgatgtgtgcctctgaatcctgccggtataccccattgttcgttatctttatttttggctaaaaccgcattaagagcttcgtttaccgtcatgcaatgcggtaggttatcgaagtttgatatcccgccaatatcaggcgaacgcttgttcttcaggtaagcatatttccgcgcagccgcctctactttctgcttgaactcatgtttttgagtgcgttttttggataaccgcagattgtcagcctttgcttttgccttagcgatccatgaagtcaattttttgaggctggttgttccggcaccgccggaaactgatcttttttgttttttaacttgggacttcttattctttattgccacgtaatcgcggatgaacaggcagacatctgtgaatcgcttcacgaccacgctgatgagctttaccgcagctgcctcgcgcgtttcggtgatgacggtgaaaacctctgacacatgcagctcccggagacggtcacagcttgttggcgctccaatcgcctcgatgggcttctcctccagatacagctgcagatcctgggcgggcacaccgttgagcgtcacctcgtagtgcagattgcactcgttgtcaatggacatccaggccatgccgacggcatgtggattctgtgcatccgtgtgctcctgtcgcttcagcagaatgggttccgccgagtcccgagcatcggccactggacggggcactaggcggccacggatcaggctcgtctcatgctcggtggccacattaacgcccagttcgccggcatacagcgactcgaggaccttgggacccaacttctccacactaccaatggcctggttgaagttgaagctcggcgtcagatcctccagcttggccttccgcttgccctgctcctcaatcaaactgatgttgggcctatcccgggtgttcacgtgctccgtttcgatgttgtaggccagagatccatcggtgttcaagtagacccacgccaaaccgctgctcttggtcgaggattcggcactgtgcggcgccagcagggtctggaagatttcgcagctggctcgggtcacgatgtgtccctggatgcgcagatgtgggtacttcttggactccacggtcagcaggagtttgccacgcgacatcagtcgaagattctgtatggaaatgggcgacgacagctccaggacattgatctcggcagagggtttgcgcacacgtggaatctcatcgaagatcacctccttccgttctgccagctcaattttcacactcagtgctgcatcggcgtacttgttcctgcgttcaccggttgcgatcagaattccgttatcacgcaaccaggtgaagagatagttttggcccaggccgagcactttggcatagttgccgattagaaccccgctggcggtagcaacgcgttcagcgaattcgactttaggtgcatccataagcattttttgctccagccgttgcttttgctctgccaggtcggcagccaaacggagagcttcagggagactctgcggaatagcaggttgtaatcttccggttcgatagtcgataaatgtctggtttaccttcagccgaaacgcgggagaaatccagcctgcgtactccacagcgagcaattcatgggcaaaagtgccgccgccacggccttcgaccaggtgaagagatagttttggcccaggccgagcactttggcatagttgccgattagaaccccgctggcggtacaacgcgttcacgaattcgactttaggtgcatccataagcattttttgctccagccgttgcttttgctctgccaggtcggcagccaaacggagagcttcagggagactctgcggaatagcaggttgtaatcttccggttcgatagtcgataaatgtctggtttaccttcagccgaaacgcgggagaaatccagcctgcgtactccacagcgagcaattcatgggcaaaagtgccgccgccacggccttcgacgcttcgctgtacgatcccggtattttggcactccgcgatgttcat

SEQ ID NO: 124538 - DNA, 3297 bp, Homo sapiens
  misc_feature (1)...(3297): n = a,t,c or g
atgaatttgctcgctgaggagtacgcaggctggatttctccggcgtttcggctgaaggtaaaccagacatttatggactatcgaaccggaagattacaacctgctattccgcagagtctccctgaagctctccgtttggctgccgacctggcagagcaaaagcaacggctggagcaaaaaatgcttatggatgcacctaaagtcgaattcgctgaacgcgttgctaccgccagcggggttctaatcggcaactatgccaaagtgctcggcctgggccaaaactatctcttcacctggttgcgtgataacggaattctgatcgcaaccggtgaacgcaggaacgtccccaaacaagaatacatatctcgtgggtatttcacccttaaagaaaccgtgatcgatacaagcaatggaagcaggatttctttcacgactcgtataaccggcaaaggtcagcagtggctgatgaagcgattgcttgatgctgacgtagtaagaaccaccagcattgtaatgctggctaaagtcactttcctgagctgtataacgatgagcgattttactttttctggctatgaattggcctgctttgtaacacactccggtctatcccgtagcgccgggcatatcctgtcgcaatgtgcaaatctcgcggcaacaaccagtgaatacttcattcacaagcctcaccgcctgatcgcggcagaaactggttatagccaatcaaccgtcgttcgtgcattccgtgaagctgtaaacaaaggaattctgtctgtagagattgttatcggcgatcaccgtgaacgtcgcgctaacctgtaccggtttacaccatcctttttggccttcgcacaacaagccaaaaatgcgctgatagaaagcaaattaaagatctcttcagcggcaaccaaggttaaagctgttctcgctaagacattggctttatttaattttttatccacacccccatgtcaaaatgataccccctccccctgtcaggatgacgtggcaataaagaataagaagtcacaagttaaaaaaacaaaaagatcagtttccggcggtgccggaacaaccagcctcaaaaaattgacttcatggatcgctaaggcaaaagcaaaggctgacaatctgcggttatccaaaaaacgcactcaaaaacatgagttcaagcagaaagtagaggcggctgcgcggaaatatgcttacctgaagaacaagcgttcgcctgatattggcgggatatcaaacttcgataacctaccgcattgcatgacggtaaacgaagctcttaatgcggttttagccaaaaataaagataacgaacaatggggctggatttctccggcgtttcggctgaaggtaaaccagacatttatggactatcgaaccggaagattacaacctgctattccgcagagtctccctgaagctctccgtttggctgccgacctggcagagcaaaagcaacggctggagcaaaaaatgcttatggatgcacctaaagtcgaattcgctgaacgcgttgctaccgccagcggggttctaatcggcaactatgccaaagtgctcggcctgggccaaaactatctcttcacctggttgcgtgataacggaattctgatcgcaaccggtgaacgcaggaacgtccccaaacaagaatacatatctcgtgggtatttcacccttaaagaaaccgtgatcgatacaagcaatggaagcaggatttctttcacgactcgtataaccggcaaaggtcagcagtggctgatgaagcgattgcttgatgctgacgtagtaagaaccaccagcattgtaatgctggctaaagtcactttcctgagctgtataacgatgagcgattttactttttctggctatgaattggcctgctttgtaacacactccggtctatcccgtagcgccgggcatatcctgtcgcaatgtgcaaatctcgcggcaacaaccagtgaatacttcattcacaagcctcaccgcctgatcgcggcagaaactggttatagccaatcaaccgtcgttcgtgcattccgtgaagctgtaaacaaaggaattctgtctgtagagattgttatcggcgatcaccgtgaacgtcgcgctaacctgtaccggtttacaccatcctttttggccttcgcacaacaagccaaaaatgcgctgatagaaagcaaattaaagatctcttcagcggcaaccaaggttaaagctgttctcgctaagacattggctttatttaattttttatccacacccccatgtcaaaatgataccccctccccctgtcaggatgacgtggcaataaagaataagaagtcacaagttaaaaaaacaaaaagatcagtttccggcggtgccggaacaaccagcctcaaaaaattgacttcatggatcgctaaggcaaaagcaaaggctgacaatctgcggttatccaaaaaacgcactcaaaaacatgagttcaagcagaaagtagaggcggctgcgcggaaatatgcttacctgaagaacaagcgttcgcctgatattggcgggatatcaaacttcgataacctaccgcattgcatgacggtaaacgaagctcttaatgcggttttagccaaaaataaagataacgaacaatggggtataccggcaggattcagaggcctacttcactcgtttactaatgctgctggtgagcaaatcactgttacctgctctctgaactacaacattggtcagattgccctgtcgttctccaaagcgccggataaaggcactgagatcgcaattgagacggaaatcaatattgaagccgctcctgagctgatcccgctgatcaaccacgaaatgaagaaatacaccctgttcccaagtcagttcgttatcgcggctgagcacacggtacaggcggcgtatgaagcacagcgtgaatttggtctggacctgggttccctacagttccgcaccctgaaggaatacctgtctcatgaacaggatatgctgcgtcttcgcatcatgatctggcgcactcttgcgaccgacacctttgaccngcctctgccggttaaccagtcctttgatgtatgggcaaccatcattcgtggcaaattccagactgtatatcgcgacattattgagcgcgttaaatcttctggtccgatgggcatgtttgctgggtcgatgcagcatctttcttcaaacagttgccgcaaggatttcttccagccagccgaagactatatccagactccgtatgttcactacatcggtaccccatttaggaccacccacagcacctaa

SEQ ID NO: 124539 - DNA, 2266 bp, Homo sapiens
ccaggccatgaccttagagggaagatggcagcaatcccagagaagttctacaaaacagagagatgggacttcttttcccatggtagagcccacaaagactgaagagcccttcatgagctccctgccccctcatcctaaccaggccgcagagtggcaaagtggaagacctagaccaaaaacaggagctgaaattgtggcaataaccaatagcttaccaaccaaaaagagtccaggaccagatggattcacagcagaattctaccagaggtacaaggaggaactggtaccattccttctgaaactattccaatcagtagaaaaagagggaatcctccctaactcattttatgaggccagcatcatcctgctaccaaagccaggcagagacaaaaccaaaaaagagaattttagaccaatatccttgatgaacattgatgcaaaaatcctcaataaaatactggcaaaccgaattcagcagcacatcaaaaagcttatccaccatgatcaagtgggcttcgtccctgggatgcaaggctggttcaatatacgcaaatcaataaatgcaatccagcatataaacagaaccaaagacaaaaaccacatgattatctcaatagatgcagaaaaggcctttgacaaaattcaacaacccttcatgctaaaaactctcaataaattaggtattgatgggaagtatctcaaaataataagagctttctatgacaaacccacagccaatatcatactgaatgggcaaaaactggaagcattccctttgaaaactggcacaagacagggatgccctctctcaccactcctattcaacatagtgttggaagttctggacagggcaattaggcaggagaaggaaataaagggtattcaattaggaaaagaggaagtcaaattgtccctgtttgcagatgacatgattgtatatctagaaaaccccattgtctcagcccaaaatctccttaagctgataagcaacttcagcaaagtctcaggatacaaaatcaatgtacaaaaatcacaagcattcttacacaccaataacagacaaacagagagccaaatcatgagtgaactcccattcacaattgcttcaaagagaataaaatacctaggaatccaaattacaagggacgtgaaggacctcttcaaggagaactacaaaccactgctcaaggaaataaaagaggatacaaacaaatggaagaacattccatgctcatgggtaggaagaatcaatattgtgaaaatagccatactgcccaagataatttacagattaaatgccatccccatcaagctactaatgactttcttcacagaattggaaaaaactactttaaagttcatatggaaccaaaaaagagcccgcatcgccaagtcaatcctaagccaaaagaacaaagctggaggcatcacgctacctgacttcaaactatactacaagcctacagtaaccaaaacagcatggtactggcaccaaaacagagctatagagcaatggaacagaacagagccctcagaaataacgacacatatctacaactatctgacctttgacaaacctgagaaaaacaagcaatggggaaaggattccctatttaataaatggtgctgggaaaactggctagccatatgtagaaagctgaaactggatcccttccttacaccttatacaaaaatcagttcaaaatggattaaagacttaaacgttagacctaaaaccataaaaacccaagaagaaaacctaggcattaccattcaggacataggcatgggcaaggacttcatgtctaaaacacaaaaagcaatggcaacaaaagccaaaattgacaaaggggatctaattaaactaaagagcttctgcacagcaaaagaaactagcagcagtgtgaacaggcaacctacaaaatgggagaaaatttttgcaacctactcatctgacaaagggctaatatccagaatctacaatgaactcaaacaaattcacaagaaaaaaacaaacaaccccatcaaaaagtgggcaaaggatatgaacagacacttctcaaaagaagacatttatgcagccaaaaaacacatgaaaaactgttcaccatcactggccatcagagaaatgcaaatcaaaaccacaatgagataccatctcacaccacttagaatggcaatcattaaaaagtcaggaaacaacagctggtcatatcctgaagactttagaactctggccacatgttacccagaagatgacagatga

SEQ ID NO: 124540 - DNA, 2211 bp, Homo sapiens
tcatgcagcagtttggcaattcgtttgtattcggtatggatggaggtaacggaagcagtaatcttccagttcccatttcagttgtccgattccgagacggttagccagcggtgcgtagatgttggtacactcttttgccgccagtacacgttcatcttccggcgcatcttttacttcgcgcagatgagccatacgctccgccagtttgatgactacgcagcgaaaatcatcgaccatcgccaataacatccggcgaacgttatcgacctgttcggaggaaacagaatcagtgtgcgtcgctttcagctggcggatcgccgccatatcacgcacgccgtgaataaggttaacgaccgacttaccgacgctctcacgcagcacatcttcgctgactacgttggcatctggatttgccctatgcggatgccattcgttataatgctcgaacgcctctgcaaggttctttgctgccgttaacccgtctggtttgggcatgatactgatgtagtcacgctttatcgttttcacgaagctctctgctattccgttactctccggactccgcaccgccgtgttcttcggttcaagtcccaacatccgggcgaactggcgtgtttcattagcccggtagcatgaaccattatccgtcagccactccactggagacgacggaagatcgttgccgaagcggcgttccaccgctcccagcatgacgtcctgtactgtttcactgttgaagccgccggtagtgaccgcccagtgcagtgcctcacgatcacagcagtccagcgcgaacgtgacacgcagtctctctccgttatcacagcagaactcgaacccgtcagagcaccatcgctgattgctttctttcacgggcactctgggcgttatctcttcgaaacggacgattttgccgtcgcgcattccctgataaagcggggcagggaccagcgcttccgttgacggaccatgattgataagcagggcgtagttccagccatacttgatttgatcttcggtggtagatgccccgccctggatggttaacccggcatcgccgctaatagcggttgccagtaattcagaaagaagagattttgcggtacccggttcccccaccaacatcaaaccgcggccggtagcaagagtgactaacatacgttcgacagcggaggggctaatcaccactttacggctgatattttgcgcttcgtcgccaaggataaaagcacgggccgcaggcaaacttaactgccaaccgggcgggcaaggtgcgttatcattttgttttaattttgccagttcatcggcgtataacacagcagcaggcggacgctgcaaatgattattcagacggcgcactttaggcaagcgtgtaatatccagccgcgcttcggtaataaaggccagcgtcccttctgaacccgtcagaatgcgcgtcaggtcgaactcggtcatctcatcgttaaagacatgacgcagatcgtaaccggtaagaaagcggttaagtttggggaagttgtcgataattaactggcgttgctgacggcaacgttgataaaccgtgttataaattcgcccgattgtggtattggatttacccagcgtttccgccaattcgacgggtaaaggttgcgtatcgagaatatcgccccccaacaacaccgcgcgtacgccaagtacgtgatctgacgttttgccatagaccagcgatccctgaccggatgcatcggtattgatcatcccaccgagcgttgcccggttgctggtcgaaagttccggcgcaaaaaagtagccgaacggtttcaggtactgattgagttgatcttttatcaccccgggctcaacgcgcacccagccctcttcagggttaatttcgatgatgcggttcatatggcgggacatatcaacaataatcccctggttgagcgcctgaccgttagtgccggtgccgccgccgcggggggtaaagatcagcgatgaatagcgttcctgcgcggcaagacgggcgatcagcgccacatctgcggttgaacgcggaaataccaccgcatcggggagaagttggtaaatactgttgtcggtcgacattgtcagacgatcggcataacttgtcgccgtatcgccggtaaaaccttgttgctccagctctggcaaaaaattaagcaccagttgaacgacgccgggtgcctgggaaatctgtggaatcat

SEQ ID NO: 124541 - DNA, 2026 bp, Homo sapiens
tcacacagccaggtggtggtagagctgggctttgaacccagagcgcgtgtcctcagcccccagccctgatgccctggacctggcgtggtggccagcggggacgggccctcttgggcactcacctcgctgccgcacttggatggtcctgagcgccagtacattctgctcatccgacaggaactgcttcatcttgatgaagggctccttgccctattaaccgtgaagctttcgccaagggcttgggccgggctaggatctcgctgaccgagccctgcgacagccccagcacgtaatgcccaaacacccgctgcccgatgttgtgtttcagcagctgctccttcacctggaaggcgatctctgccgtgtccagctgctcctcctctgccccgggccccgccgctccgcccccaccaccatccgcgggctcaggaccgcccagtggctcagggccaggggccggggtggcaggggctgtggggggcttggcgccatagaaggctggggggaacaccagcaggccgcccgcctctcccttgaaggcggctgggggcatcatcagtctctcccctgatgccaggctggggaagggggacagcgagaaagtccgagtgccgtcaggccccaagctggggcccagcaggggctgcccggggctgggagacagggggtcttctggccctggtggaggtgggagctgctgaggggaggggtaggactgctccgtgcccagtgaatccttgatggaatcgtcctctgatgggtcttcctcagggctggccaggaggctgggcttctccagaaggaatttctgcgtggggaagaaggcctcctttgcaataagcagtgagtcttcaggcttggccatgccctgggggaggctgcaggtgctggaggccagcttcatggctttcaggatgctcagctccgttttaatttcctcatagtcagactgggcctggagcttctcttccagcttttctatggcctcggacttggccgtgagctgccgctccaggtcggcgatctggttggcggatgcctcctccagctcctgcagtgagctctggaggtgctgcacgtccttcagcagccgcaggatctccctgtccttggaggccagcgcggcctccagccgagggcccgagcacagagtgaagttcaccttatcccagtcagctccttccggtgggcgcggggcatgactatcgtcgccgcacttatgactgtcttctttatcatgcaactcgtaggacaggtgccggcagcgctctgggtcattttcggcgaggaccgctttcgctggagcgcgacgatgatcggcctgtcgcttgcggtattcggaatcttgcacgccctcgctcaagccttcgtcactggtcccgccaccaaacgtttcggcgagaagcaggccattatcgccggcatggcggccgacgcgctgggctacgtcttgctggcgttcgcgacgcgaggctggatggccttccccattatgattcttctcgcttccggcggcatcgggatgcccgcgttgcaggccatgcaacccttggcagaacatatccatcgcgtccgccatctccagcagccgcacgcggcgcatctcgggcagcgttgggtcctggccacgggtgcgcatgatcgtgctcctgtcgttgaggacccggctaggctggcggggttgccttagcgagcgaacgtgaagcgactgctgctgcaaaacgtctgcgacctgagcaacaacatgaatggtcttcggtttccgtgtttcgtaaagtctggaaacgcggaagtcagcgccctgcaccattatgttccggatctgcatcgcaggatgctgctggctaccctgtggaacacctacatctgtattaacgaagcgctggcattgaccctgagtgatttttctctggtcccgccgcatccataccgccagttgtttaccctcacaacgttccagtaaccgggcatgttcatcatcagtaacccgtatcgtgagcatcctctctcgtttcatcggtatcat

SEQ ID NO: 124542 - DNA, 3520 bp, Homo sapiens
atgccagtgacggtaacccgcaccaccatcacaaccaccacgacgtcatcttcgggcctggggtcccccatgatcgtggggtcccctcgggccctgacacagcccctgggtctccttcgcctgctgcagctggtgtctacctgcgtggccttctcgctggtggctagcgtgggcgcctggacggggtccatgggcaactggtccatgttcacctggtgcttctgcttctccgtgaccctgatcatcctcatcgtggagctgtgcgggctccaggcccgcttccccctgtcttggcgcaacttccccatcaccttcgcctgctatgcggccctcttctgcctctcggcctccatcatctaccccaccacctatgtccagttcctgtcccacggccgttcgcgggaccacgccatcgccgccaccttcttctcctgcatcgcgtgtgtggcttacgccaccgaagtggcctggacccgggcccggcccggcgagatcactggctatatggccaccgtacccgggctgctgaaggtgctggagaccttcgttgcctgcatcatcttcgcgttcatcagcgaccccaacctgtaccagcaccagccggccctggagtggtgcgtggcggtgtacgccatctgcttcatcctagcggccatcgccatcctgctgaaccttggccctgtgggttcggaaacgggcaccatcaccctggccaccctggctgcctccatcccagccctgtgggctcggaaacgggcaccatcacctggccacctggctgcctccatcccagggctgggcggacgctccgggccgcgggccccgcagccgcatgaccggccccgaggcttcccccggccgccgccgccgccaccggggtcgccgcctcctcagttgtcggccctggaaggtgcccagcggcggcagcgccagacgcgccccgttagctcagcgtcgctgagcatccgcagccgccaccaggccccgcccagcggccgcagccagccaggccgcgcccgggacgactgcagagcgcgccctccaaccccacccagccctcagacccttccagctgccgctgtcgtctttgcttcagccgcagtcagccactggctgcctgagggttgccgtaagctgcacgcggaggaccatggaacgtaccagggcggatcccagaatgagaccgcatctcgagcttcggtccggcacatcgagcatatcccgctcagagacgtacctgccggcgatctcttaagtctaaacacctctaatgtgggaagtcgggagaaaggtcgctgtgtggcctcagaatattttcttgaaccggagatcaatttggtgacggaaaacacggagaatattctgaagacagtgcgcacggccacccccttccccatggtcagcctcttcctcgtgttcacggccttcgtcatcagcaacatcggccacatccgcccgcagaggaccattctggcttttgtctctggcatcttcttcatactatcgggctggtcattggtggagttgtccccatggcctggtattgttggagttgccccagctctggtcattggtggagttgccccaggtctggtcattgttggagtttccccaggtctggtcattggtggagttgcctcaggtctggtcattggtggacttgccccaggtctggtcattggtggacttgccccaggccggtcattggtggagtcgtccccaggtctggtcattggtggagttgccccaggtctggtcattggtggagttgccccaggctggtcattggtggagttgcacccaggctggtcattggtggagttgtccccaggcctggtcattggtggagttgccccaggtctggtattggtggagttgccccaggtctggtcattggtggagttgccccaggctggtcattggtggagttgcacaccaggtctggtcattggtggacttgctccaggtctggtcattggtggagctgtcaccaggctggtcattggtggagttgccccaggtctggtcattggtggagttgccaccaggctggtcattggtgacattgccaccagactggtcattggtggatatagtccacaacctggacccccaacctctgcgagccacagggggcctgcgctctctgaccctcctcccgcagggcccagactagtcattggagaacagatgattgatgtcttagggccggagaaacgcagacggcgtaccacaacaggaaaagatcgcaattgttcagcagagctttgaaccggggatgacggtctccctcgttgcccggcaacatggtgtagcagccagccagttatttctctggcgtaagcaataccaggaaggaagtcttactgctgtcgccgccggagaacaggttgttcctgcctctgaacttgctgccgccatgaagcagattaaagaactccagcgcctgctcggcaagaaaacgatggaaaatgaactcctcaaagaagccgttgaatatggacgggcaaaaaagtggatagcgcacgcgcccttattgcccggggatggggaacgaaccgatgactggatggatggccgccgcagtcgtcacactgatgatacggatgtgcttctccgtatacaccatgttatcggagagctgccaacgtatggttatcgtcgggtatgggcgctgcttcgcagacaggcagaacttgatggtatgcctgcgatcaatgccaaacgtgtttaccggatcatgcgccagaatgcgctgttgcttgagcgaaaacctgctgtaccgccatcgaaacgggcacatacaggcagagtggccgtgaaagaaagcaatcagcgatggtgctctgacgggttcgagttctgctgtgataacggagagagactgcgtgtcacgttcgcgctggactgctgtgatcgtgaggcactgcactgggcggtcactaccggcggcttcaacagtgaaacagtacaggacgtcatgctgggagcggtggaacgccgcttcggcaacgatcttccgtcgtctccagtggagtggctgacggataatggttcatgctaccgggctaatgaaacacgccagttcgcccggatgttgggacttgaaccgaagaacacggcggtgcggagtccggagagtaacggaatagcagagagcttcgtgaaaacgataaagcgtgactacatcagtatcatgcccaaaccagacgggttaacggcagcaaagaaccttgcagaggcgttcgagcattataacgaatggcatccgcatagtgcgctgggttattggcgaacagtggatgcatgagggggcgatagccacaggaaccgtcattaatgataagggctggcaggtcgtcaagcccggtacagtggcaacggataccgttgttaataccggggcggaagggggaccggatgcagaaaacggtgataccgggcagtttgttcgcggggatgccgtacgcacaaccatcaataaaaacggaacttgctggctaatccagcgatccatctg

SEQ ID NO: 124543 - DNA, 1082 bp, Homo sapiens
cttgacttgcaggatgatggggatgatggtcgttgctggactgccttgttgatggactgtgcccctgggggctgtgccaccagtgaggatgcatgaaggattgggttgctggtgcaagttgaacggtgaggtctgcatgtcgggaatgtgcttgctgtgctggtgtgattgtgactgacgacatgacctgaaagccaacctggacagactgatgaatgtgtgtcaggatggccgcaagagatgatgtgtgtggcacaatgattgacatggttgcttgtgcagcccctggctgcatgatggcctggctgggtgcacctgtgctggaaaatgggagtaccctggatgctgtgttgggtgtctgtgactccccatccccgggcaataagggcgcgtgcgctatccacttttttgcccgtccatattcaacggcttctttgaggagttcattttccatcgttttcttgccgagcaggcgctggagttctttaatctgcttcatggcggcagcaagttcagaggcaggaacaacctgttctccggcggcgacagcagtaagacttccttcctggtattgcttacgccagagaaataactggctggctgctacaccatgttgccgggcaacgagggagaccgtcatccccggttcaaagctctgctgaacaattgcgatcttttcctgtgtggtacgccgtctgcgtttctccggccctaagacatcaatcatctgttctccaatgactagtctgacactgtctgagcgcgaggagatacgagctggtttgtcagccaaaatgagcattcgtgcgatacgtactggcgctgaatcgcagtccttcgacgatctcacgtgaagttcagcgtaatcggggcagacgctattacaaagctgttgatgcatgatggtggataaagcattctgtgagtccacggatggtagtctttataaaagcattgcgtacaggataggtaaacctatatctggagtaagtgtctattccagtgagggcaagctgctgccctttccttgatggaagagatccaatataatcaacctgccaccaagtagctggctgatcacc

SEQ ID NO: 124544 - DNA, 3117 bp, Homo sapiens
atgaaaggcctgatgaattacaaatctcaagggactgccttctccctgggctgctgttttgaaaagaaaaaaacaagaaaatttgaggatactatgcctggagaggtggttgaaaataggtacaatgaacaagggctctgtcatcctgggaccctctatcctaggaaacaagtggaacaaatcaaaagatttatactaactgaagaatataaaactatcagacagaagaatttcccagaaagcagcagcaaagaaaaagaaaatgtaagagaaatctgctgggaatattgtcagcagacagccccttcaaggattgcctcaggttcagaaagcctgcttgctcatggttatgtcccttccctgggagctctaacagtggaaaccacagtcactcaactacaacatttaaatacagtgggaataattggattccgaggtggcaggggccaagtggcagcagtcaactgtcaaaagcgagatatccagccttttaccagggtaactgtgcattggggaaagagaaatgatcagacatttcaagcactagtggacactggccttgagctgacattgattcccggggacccaaaacatcattgtgatcctccagttaaagtaggggcttatggacatcaggtaattaatggagttttagctcagattcaaattacagtaggtccagtgggtccctggactcaccctgtggtcattttcacagtgcctaaatgcataattgacatagacatacttaggtggcagaactcccacactggctccctgactggtaggatgaaggctattatggtgggaagggccaaatggaagccgttagagctgcctctgcctagaaaaacagtaaaccagaaaccatatcacacccctgtagggactgcagaaattagtgccaccatgaaggacttgaaagatgcaggggtggtgattccaaccacaaccctgttcaactctcctatttggtctgtgcagaagacaggtggatcttggagaatgacagtggattattgtatgcttaaccaagttgtgtctgcagttgaagctattgtactagatgtggtttcattgcttgagcaaattaacacatctcctgccatagagtgggtcatgcacagcagcattccatcatcaaatggaagtggtacatacatgatcgggctcaagcaggtcctaaaggcacaacctgcaccaatggcctcatggggagtttcctatgatcagtggacagaggaagagaagactacggcctggttcacagacggttcttcacgatatgctagcaccacccgaaactggacagctgcagcactacagtccctttctaggatatccctgaaggacagctgtgaagggaaatcttcccaccacccgtgtcatggaggcaaggatggaggttatgcatgggctcagcaacatggactttcactcaccaaggttgacctggctatggccactgctgagtgcccaatttgccagcagcagagaccaacactgagccctcgatatggcaccattcctcagggtgatcagccagctacctggtggcaggttgattatatgggacctcttccatcatggaaagggcagagcaccataaatcttagaggaagctctaatttgtcctgctatggaccgtccctcaaccaatcacttgggaaagaagtttccgactggctgtccctgggttacacatctacggttgtggagggattagagggggagagaaggctactagtcattggagaacagatgattgatgtcttagggccggagaaacgcagacggcgtaccacacaggaaaagatcgcaattgttcagcagagctttgaaccggggatgacggtctccctcgttgcccggcaacatggtgtagcagccagccagttatttctctggcgtaagcaataccaggaaggaagtcttactgctgtcgccgccggagaacaggttgttcctgcctctgaacttgctgccgccatgaagcagattaaagaactccagcgcctgctcggcaagaaaacgatggaaaatgaactcctcaaagaagccgttgaatatggacgggcaaaaaagtggatagcgcacgcgcccttattgcccggggatggggaacgaaccgatgactggatggatggccgccgcagtcgtcacactgatgatacggatgtgcttctccgtatacaccatgttatcggagagctgccaacgtatggttatcgtcgggtatgggcgctgcttcgcagacaggcagaacttgatggtatgcctgcgatcaatgccaaacgtgtttaccggatcatgcgccagaatgcgctgttgcttgagcgaaaacctgctgtaccgccatcgaaacgggcacatacaggcagagtggccgtgaaagaaagcaatcagcgatggtgctctgacgggttcgagttctgctgtgataacggagagagactgcgtgtcacgttcgcgctggactgctgtgatcgtgaggcactgcactgggcggtcactaccggcggcttcaacagtgaaacagtacaggacgtcatgctgggagcggtggaacgccgcttcggcaacgatcttccgtcgtctccagtggagtggctgacggataatggttcatgctaccgggctaatgaaacacgccagttcgcccggatgttgggacttgaaccgaagaacacggcggtgcggagtccggagagtaacggaatagcagagagcttcgtgaaaacgataaagcgtgactacatcagtatcatgcccaaaccagacgggttaacggcagcaaagaaccttgcagaggcgttcgagcattataacgaatggcatccgcatagtgcgctgggttatcgctcgccacgggaatatctgcggcagcgggcttgtaatgggggcaaatccagttgtgcaccacgcgatgaccgtaaagttcgcgtgatggcagccgattatgaaaatcagctcgacgagttttccctcgatgcgcccattgtcgcacatgaaaactatcaatgggctaactacgttcgtggcgtggtgaaacatctgcaactgcgtaacaacagcttcggcggcgtggacatgagatcagcggcaatgtgccgcagg

SEQ ID NO: 124545 - DNA, 1227 bp, Homo sapiens
atggaggctgcccagacactggaagttaagtccaatgaacctctgtgtgtgcccgtgcttgctctggtttctgaagagctgtccttgcgttgtccataccttggtgcacatattgtggcttcctggcttctgcaagtggactcctcctttgagccctggctgatgcgcgtgacgccagccactgacgtaattgttttttatcgactttcccgaccgccgtcagcggaagtgaatccacacactccacgcgatccgagcgtggcgctgggatcggccgccagaacaaccgttcctccggcaagaaagacgcccagcaatcctgatccatgtgcttctcgtatacaccatgttatcggagagctgccaacgtatggttatcgtcgggtatgggcgctgcttcgcagacaggcagaacttgatggtatgcctgcgatcaatgccaaacgtgtttaccggatcatgcgccagaatgcgctgttgcttgagcgaaaacctgctgtaccgccatcgaaacgggcacatacaggcagagtggccgtgaaagaaagcaatcagcgatggtgctctgacgggttcgagttctgctgtgataacggagagagactgcgtgtcacgttcgcgctggactgctgtgatcgtgaggcactgcactgggcggtcactaccggcggcttcaacagtgaaacagtacaggacgtcatgctgggagcggtggaacgccgcttcggcaacgatcttccgtcgtctccagtggagtggctgacggataatggttcatgctaccgggctaatgaaacacgccagttcgcccggatgttgggacttgaaccgaagaacacggcggtgcggagtccggagagtaacggaatagcagagagcttcgtgaaaacgataaagcgtgactacatcagtatcatgcccaaaccagacgggttaacggcagcaaagaaccttgcagaggcgttcgagcattataacgaatggcatccgcataacccgactctcgaatggttcttgtctcattgccacattcataagtacccatccaagagcacgcttattcaccagggtgaaaaagcggaaacgctgtactacatcggtaaaggctctgtggcagtgctgatcaaagacgaagagggtaaagaaatgatcctctcctatctgaatcagggtgatacaattggcgacctgggcctgtttgaagagggccaggaacgtagcgcatgg

SEQ ID NO: 124546 - DNA, 2128 bp, Homo sapiens
atgagtcatcaacttaccttcgccgacagtgaattcagcagtaagcgccgtcagaccagaaaagagattttcttgtcccgcatggagcagattctgccatggcaaaacatggtggaagtcatcgagccgttttaccccaaggctggtaatggccggcgaccttatccgctggaaaccatgctacgcattcactgcatgcagcattggtacaacctgagcgatggcgcgatggaagatgctctgtacgaaatcgcctccatgcgtctgtttgcccggttatccctggatagcgccttgccggaccgcaccaccatcatgaatttccgccacctgctggagcagcatcaactggcccgccaattgttcaagaccatcaatcgctggctggccctaggcgtcatgatgactcaaggcaccttgttcgatgccaccatcattgaggcacccagctctaccaagaacaaagagcagcaacgcgatccggagatgcatcagaccaagaaaggcaatcagtggcactttggcatgaaggcccacattggtgtcgatgccaagagtggcctgacccacagcctggtcaccaccgcggccaacgagcatgacctcaatcagctgggtaatctgcttcatggagagaagcaatttgtctcagcgatgccggctaccaaggagccacagcgcgaggagctggccgaggtggatgtggacctgctgatcgccgagcgtcccggcaaggtaaaaaccttgaagcagaatccgcgcaagaacaaaacggccatcaacatcgaatacatgaaagccagcatccgtgccagggtggagcacccgtttcgcatcatcaagcggcagttcggcttcgtgaaagccagatacaaggggctgctgaaaaacgataaccaactggcgatgttattcaccctggccaacctgtttcgggtggaccaaatgatacagctgccaacgtatgagttatcgtcgggtataggcgctgttcgcagacaggcagaacttgatggtacgcctgcgatcaattccaaacgtgtttaccggatcatgcgccagaatgcgctgttgcttgagcgaaaacctgctgtaccgcccatcgaaacgggcacatacaggcagagtggccgtgaaagaaagcaatcagcgatggtgctcctgacgggttcgagttctgctgtgataacggagagagactgcgtgtcacgttcgcgctggactgctgtgatcgtgaggcactgcactgggcggtcactaccggcggcttcaacagtgaaacagtacaggacgtcatgctgggagcggtggaacgccgcttcggcaacgatcttccgtcgtctccagtggagtggctgacggataatggttcatgctaccgggctaatgaaacacgccagttcgcccggatgttgggacttgaaccgaagaacacggcggtgcggagtccggagagtaacggaatagcagagagcttcgtgaaaacgataaagcgtgactacatcagtatcatgcccaaaccagacgggttaacggcagcaaagaaccttgcagaggcgttcgagcattataacgaatggcatccgcatagtattcgatctgttcgttaacctcgacgcgaccgacgagcagctggacttcccgatcgtttacgcttctgcgctgaacggtatcgcgggtctggaccacgaagatatggcggaagacatgaccccgctgtaccaggcgattgttgaccacgttcctgcgccggacgttgaccttgacggtccgttccagatgcagatttctcagctcgattacaacagctatgttggcgttatcggcattggccgcatcaagcgcggtaaagtgaagccgaaccagcaggtcactatcatcgatagcgaaggcaaaacccgcaacgcgaaagtcggtaaagtgctgggccacctcggtctggaacgtatcgaaaccgatctggcggaagctggcgatatcgttgcgatcacgggccttggcgaactgaacatttctgacaccgtttgcgacacgcaaaacgttgaagcgctgccggcactctccgttgatgagccgaccgtttctatgttcttctgcgttaacacctcgccgttctgcggtaaagaag

SEQ ID NO: 124547 - DNA, 3156 bp, Homo sapiens
atgcccttgagagccttcaacccagtcagctccttccggtgggcgcggggcatgactatcgtcgccgcacttatgactgtcttctttatcatgcaactcgtaggacaggtgccggcagcgctctgggtcattttcggcgaggaccgctttcgctggagcgcgacgatgatcggcctgtcgcttgcggtattcggaatcttgcacgccctcgctcaagccttcgtcactggtcccgccaccaaacgtttcggcgagaagcaggccattatcgccggcatggcggccgacgcgctgggctacgtcttgctggcgttcgcgacgcgaggctggatggccttccccattatgattcttctcgcttccggcggcatcgggatgcccgcgttgcaggccatgctgtccaggcaggtagatgacgaccatcagggacagcttcaaggatcgctcgcggctcttaccagcctaacttcgatcattggaccgctgatcgtcacggcgatttatgccgcctcggcgagcacatggaacgggttggcatggattgtaggcgccgccctataccttgtctgcctccccgcgtttgcgtcgcggtgcatggagccgggccacctcgacctgaatggaagccggcggcacctcgctaacggattcaccactccaagaattggagccaatcaattcttgcggagaactgtgaatgcgcaaaccaacccttggcagaacatatccatcgcgtccgccatctccaacaaccgcacgcggcgcatctcgggcagcgttgggtcctggccacgggtgcgcatgatcgtgctcctgtcgttgaggacccggctaggctggcggggttgccttactgcgaacgtgaagcgactgctgctgcaaaacgtctgcgacctgagcaacaacatgaatggtcttcggtttccgtgtttcgtaaagtctggaaacgcggaagtcagcgccctgcaccattatgttccggatctgcatcgcaggatgctgctggctaccctgtggaacacctacatctgtattaacgaagcgctggcattgaccctgagtgatttttctctggtcccgccgcatccataccgccagttgtttaccctcacaacgttccataaccgggcatgttcatcatcagtaacccgtatcgtgagcatcctctctcgtttcatcggtatcattacccccatgaacagaaatcccccttacacggaggcatcagtgaccaaacaggaaaaaaccgcccttaacatggcccgctttatcagaagccaaaaattaacgcttctgaagaaactcaacgagctggaggcgaatgaacaggcagacatctgtgaatcgcttcacgaccacgctgatgagctttaccgcagctgcctcgcgcgtttcggtgatgacggtgaaaactctgacacatgcagctcccggagacggtcacagcttgtctgtaagcggatgccgggagcagacaagcccgtcaggctgttcacgggatgttggcgggtgtcggggcgcagcatgacccagtcacattacaacctgctattccgcagagtctccctgaagctctccgtttggctgccgacctggcagagcaaaagcaacggctggagcaaaaaatgcttatggatgcacctaaagtcgaattcgctgaacgcgttgctaccgccagcgggggttctaatcggcaactatgccaaagtgctcggcctgggccaaaactatctcttcacctggttgcgtgataacggaattctgatcgcaaccggtgcacgcaggaacgtccccaaacaagaatacatatctcgtgggtatttcacccttaaagaaaccgtgatcgatacaagcaatggaagcaggatttctttcacgactcgtataaccggcaaaggtcagcagtggctgatgaagcgattgcttgatgctggtgtgctggtacctgtcgcggcaacgctaacagacgtagtaagaaccaccagcattgtaatgctggctaaagtcactttcctgagctgtataacgatgagcgattttactttttctggctatgaattggcctgctttgtaacacaactccgcgccgggcatatcctgtcgcaatgtgcaaatctcgcggcaacaaccagtgaatacttcattcacaagcctcaccgcctgatcgcggcagaaactggttatagccaatcaaccgtcgttcgtgcattccgtgaagctgtaaacaaaggaattctgtctgtagagattgttatcggcgatcaccgtgaacgtcgcgctaacctgtaccggtttacaccatcctttttggccttcgcacaacaagccaaaaatgcgctgatagaaagcaaattaaagatctcttcagcggcaaccaaggatgacgtggcaataaagaataagaagtcacaagttaaaaaaacaaaaagatcagtttccggcggtgccggaacaaccagcctcaaaaaattgacttcatggatcgctaaggcaaaagcaaaggctgacaatctgcggttatccaaaaaacgcactcaaaaacatgagttcaagcagaaagtagaggcggctgcgcggaaatatgcttacctgaagaacaagcgttcgcctgatattggcgggatatcaaacttcgataacctaccgcattgcatgacgatcctctacgccggacgcatcgtggccggcatcaccggcgccacaggtgcggttgctggcgcctatatcgccgacatcaccgatggggaagatcgggctcgccacttcgggctcatgagcgcttgtttcggcgtgggtatggtggcaggccccgtggccgggggactgttgggcgccatctccttgcatgcaccattccttgcggcggcggtgctcaacggcctcaacctactactgggctgcttcctaatgcaagagtcgcataagggagagcgtcgaggagaacttctaaagatcgtcgttttgccaggtgaccacgttggtcaagaaatcacagccgaagccattaaggttcttaaagctatttctgatgttcgttccaatgtcaagttcgatttcgaaaatcatttaattggtggtgctgctatcgacctgcaggggggggggggaaagccacgttgtgtctcaaaatctctgatgttacattgcacaagataa

SEQ ID NO: 124548 - DNA, 2866 bp, Homo sapiens
atggtaaagggatcaattcaacaagaggagctaactatcctaaatatttatgcacccaatacaggagcacccagattcataaagcaagtcctgagtgacctacaaagagacttagactcccacacattaataatggaagactttaacaccccactgtcaacattagacagatcaacgagacagaaagtcaacaagaatacccaggaattgaactcagctctgcaccaagcagacctaatagacatctacagaactctccaccccaaatcaacagaatatacatttttttcagcaccacaccacacctattccaaaattgaccacatagttggaagtaaagctctcctcagcaaatgtaaaagaacagaaattataacaaactatctctcagaccacagtgcaatcaaactagaactcaggattaagaatctcactcaaagccgctcaactacatggaaactgaacaacctgctcctgaatgactactgggtacataacgaaatgaaggcagaaataaagatgttctttgaaaccaacgagaacaaagacaccacataccagaatctctgggacgcattcaaagcagtgtgtagagggaaatttatagcactaaatgcctacaagagaaagcaggaaagatccaaaattgacaccctaacatcacaattaaaagaactagaaaagcaagagcaaacacattcaaaagctagcagaaggcaagaaataactaaaatcagagcagaactgaaggaaatagagacacaaaaaacccttcaaaaaatcaatgaatccaggagctggttttttgaaaggatcaacaaaattgatagaccgctagcaagactaataaagaaaaaaagagagaagaatcaaatagacacaataaaaaatgataaaggggatatcaccaccgatcccacagaaatacaaactaccatcagagaatcctacaaacacctctacgcaaataaactagaaaatctagaagaaatggatacattcctggacacatacactctcccaagactaaaccaggaagaagttgaatctctgaatagaccaataacaggctctgaaattgtggcaataatcaatagtttaccaaccaaaaagagtccaggaccagatggattcacagccgaattctaccagagagctatctatgacaaacccacagacaatatcatactgaatgggcaaaaactgcaagcattccctttgaaaactggcacaagacagggatgccctctctcaccactcctattcaacatagtgttggaagttctggccagggcaatcagccaggagaaggaaataaagggtattcaattaggaaaagaggaagtcaaattgtccctgtttgcagacgacatgattgtttatctagaaaaccccatcgtctcagcccaaaatctccttaagctgataagcaacttcagcaaagtctcaggatacaaaatcaatgtacaaaaatcacaagcattcttatacaccaacaacagacaaacagagagccaaatcatgagtgaactcccattcacaattgcttcaaagagaataaaatacctaggaatccaacttacaagggatgtgaaggacctcttcaaggagaactacaaaccactgctcaaggaaataaaagaggacacaaacaaatggaagaacattccatgctcatgggtaggaagaatcaatatcgtgaaaatggccatacttgcccaaggtaatttacagattcaatgccatccccatcaagctaccaatgactttcttcacagaattggaaaaaactactttaaagttcatatggaaccaaaaaagagcccgcatcgccaagtcaatcctaagccaaaagaacaaagctggaggcatcacactacctgacttcaaactatactacaaggctacagtaaccaaaacagcatcggtactggtaccaaaacagagatatagatcaatggaacagaacagagccctcagaaataatgccgcatatctacactattctgatcctttggacaaacctgagaaaaacaagcatgggggaaaggcatccctaatttataaaatggctgctggggaaaactggctagcccatatgtaggaagctgaaactggatcccttccttacaccttatacaaaaatcaattcaagatggattaaagatttaaacgttagacctaaaaccataaaaaccctagaagaaaacctaggcattaccattcaggacataggcgtgggcaaggacttcatgtccaaaacaccaaaagcaatggcaacaaaagccaaaattgacaaatgggatctaattaaactaaagagcttctgcacagcaaaagaaactaccatcagagtgaacaggcaacctacaacatgggagaaaatttttgcaacctactcatctgacaaagggctaatatccagaatctacaatgaactcaaacaaatttacaagaaaaaaacaaacaaccccatcaaaaagtgggcgaaggacatgaacagacacttctcaaaagaagacatttatgcagccaaaaaacacatgaagaaatgctcatcatcactggccatcagagaaatgcaaatcaaaaccactatgagatatcatctcacaccagttagaatggcaatcattaaaaagtcaggaaacaacagaatcagaaggcatttccagccaagatcagccatgttcttctgctgctgccctgggggcgagggctcagggctgcagtgggagctgctgctggcagcatggactgtgctcccctacccctgccctgcagccacagttgggagattcctcaagcaggcacagactgctgaccattccttcctgggccatgtttggagggtgcccagcagcag

SEQ ID NO: 124549 - DNA, 2454 bp, Homo sapiens
atggatgaagctggaaacaatcattctcatcaaactaacacaggaacagaaaatcaagcaccgcatgttctcactcataagtgggagttgtacaatgagaacacatggacacagggaggggaaaatcacactgaggactgtcgggggatgcggggaggaatagcattagtagaaatacctaatgtagatgacgggttgatgcatgcagcaaactaccatggcacggcatgtgatgggggtgtggctcacttatgtggtgccctgctgctccagcccctaggacaagccacagttctgacttttacgactgcacttctggcaggaggagcgactcaagccttcgcgaaagaaaataaccaaaaagcatacaaagaaacgtacggcgtctctcatattacacgccatgatatgctgcagatccctaaacagcagcaaaacgaaaaataccaagtgcctcaattcgatcaatcaacgattaaaaatattgagtctgcaaaaggacttgatgtgtgggacagctggccgctgcaaaacgctgacggaacagtagctgaatacaacggctatcacgttgtgtttgctcttgcgggaagcccgaaagacgctgatgacacatcaatctacatgttttatcaaaaggtcgaaggccgtggcggcggcacttttgcccatgaattgctcgctgtggagtacgcaggctggatttctcccgcgtttcggctgaaggtaaaccagacatttatcgactatcgaaccggaagattacaacctgctattccgcagagtctccctgaagctctccgtttggctgccgacctggcagagcaaaagcaacggctggagcaaaaaatgcttatggatgcacctaaagtcgaattcgctgaacgcgttgctaccgccagcggggttctaatcggcaactatgccaaagtgctcggcctgggccaaaactatctcttcacctggttgcgtgataacggaattctgatcgcaaccggtgaacgcaggaacgtccccaaacaagaatacatatctcgtgggtatttcacccttaaagaaaccgtgatcgatacaagcaatggaagcaggatttctttcacgactcgtataaccggcaaaggtcagcagtggctgatgaagcgattgcttgatgctgacgtagtaagaaccaccagcattgtaatgctggctaaagtcactttcctgagctgtataacgatgagcgattttactttttctggctatgaattggcctgctttgtaacacactccggtctatcccgtagcgccgggcatatcctgtcgcaatgtgcaaatctcgcggcaacaaccagtgaatacttcattcacaagcctcaccgcctgatcgcggcagaaactggttatagccaatcaaccgtcgttcgtgcattccgtgaagctgtaaacaaaggaattctgtctgtagagattgttatcggcgatcaccgtgaacgtcgcgctaacctgtaccggtttacaccatcctttttggccttcgcacaacaagccaaaaatgcgctgatagaaagcaaattaaagatctcttcagcggcaaccaaggttaaagctgttctcgctaagacattggctttatttaattttttatccacacccccatgtcaaaatgataccccctccccctgtcaggatgacgtggcaataaagaataagaagtcacaagttaaaaaaacaaaaagatcagtttccggcggtgccggaacaaccagcctcaaaaaattgacttcatggatcgctaaggcaaaagcaaaggctgacaatctgcggttatccaaaaaacgcactcaaaaacatgagttcaagcagaaagtagaggcggctgcgcggaaatatgcttacctgaagaacaagcgttcgcctgatattggcgggatatcaaacttcgataacctaccgcattgcatgacggtaaacgaagctcttaatgcggttttagccaaaaataaagataacgaacaatggggtgcggttgctggcgcctatatcgccgacatcaccgatggggaagatcgggctcgccacttcgggctcatgagcgcttgtttcggcgtgggtatggtggcaggccccgtggccgggggactgttgggcgccatctccttgcatgcaccattccttgcggcggcggtgctcaacggcctcaacctactactgggctgcttcctaatgcaggagtcgcataagggagagcgtcgaggagaacttctaaagatcgtcgttttgccaggtgaccacgttggtcaagaaatcacagccgaagccattaaggttcttaaagctatttctgatgttcgttccaatgtcaagttcgatttcgaaaatcatttaattggtggtgctgctatcgacctgcaggggggggggggaaagccacgttgtgtctcaaaatctctgatgttacattgcacaagataa

SEQ ID NO: 124550 - DNA, 9896 bp, Homo sapiens
gcgtgtgcacaggcagctccactcggcacatcgtgacctttgatgggcagaatttcaagctgactggcagctgttcttatgtcctatttcaaaacaaggagcaggacctggaggtgattctccataatggtgcctgcagccctggagcaaggcagggctgcatgaaatccatcgaggtgaagcacagtgccctctccgtcgagctgcacagtgacatggaggcttttaggttcttggtgcatggccacccgtacagtattacaacagcctgttttctggtcaagctctgtaaagtcaagctctgttttctagtcaagctcttctttatcttagaagagctgccgacaaatatcaaggtgacggtgaatgggagactggtctctgttccttacgtgggtgggaacatggaagtcaacgtttatggtgccatcatgcatgaggtcagattcaatcaccttggtcacatcttcacattcactccacaaaacaatgagttccaactgcagctcagccccaagacttttgcttcaaagacgtatggtctgtgtgggatctgtgatgagaacggagccaatgacttcatgctgagggatggcacagtcaccacagactggaaaacacttgttcaggaatggactgtgcagcggccagggcagacgtgccagcccatcctggaggagcagtgtcttgtccccgacagctcccactgccaggtcctcctcttaccactgtttgctgaatgccacaaggtcctggctccagccacattctatgccatctgccagcaggacagttgccaccaggagcaagtgtgtgaggtgatcgcctcttatgcccacctctgtcggaccaacggggtctgcgttgactggaggacacctgatttctgtgctatgtcatgcccaccatctctggtctacaaccactgtgagcatggctgtccccggcactgtgatggcaacgtgagctcctgtggggaccatccctccgaaggctgtttctgccctccagataaagtcatgttggaaggcagctgtgtccctgaagaggcctgcactcagtgcattggtgaggatggagtccagcaccagttcctggaagcctgggtcccggaccaccagccctgtcagatctgcacatgcctcagcgggcggaaggtcaactgcacaacgcagccctgccccacggccaaagctcccacgtgtggcctgtgtgaagtagcccgcctccgccagaatgcagaccagtgctgccccgagtatgagtgtgtgtgtgacccagtgagctgtgacctgcccccagtgcctcactgtgaacgtggcctccagcccacactgaccaaccctggcgagtgcagacccaacttcacctgcgcctgcaggaaggaggagtgcaaaagagtgtccccaccctcctgccccccgcaccgtttgcccacccttcggaagacccagtgctgtgatgagtatgagtgtgcctgcaactgtgtcaactccacagtgagctgtccccttgggtacttggcctcaactgccaccaatgactgtggctgtaccacaaccacctgccttcccgacaaggtgtgtgtccaccgaagcaccatctaccctgtgggccagttctgggaggagggctgcgatgtgtgcacctgcaccgacatggaggatgccgtgatgggcctccgcgtggcccagtgctcccagaagccctgtgaggacagctgtcggtcgaacaccgtaccctataaattactaggtaaatgtcaagtaacctcttggggaagcccaaatctgcacgttggtgagcagtattgggatcgagtgttcgtcttgtatgggaggctagccctgcgagagtggagactggatcccagtcatcctgagtgtgcctcccgggcttcacttacgttctgcatgaaggcgagtgctgtggaaggtgcctgccatctgcctgtcggctcccagtgggcctccccggagaacccctgcctcatcaatgagtgtgtccgagtgaaggaggaggtctttatacaacaaaggaacgtctcctgcccccagctggaggtccctgtctgcccctcgggctttcagctgagctgtaagacctcagcgtgctgcccaagctgtcgctgtgagcgcatggaggcctgcatgctcaatggcactgtcattgggcccgggaagactgtgatgatcgatgtgtgcacgacctgccgctgcatggtgcaggtgggggtcatctctggattcaagctggagtgcaggaagaccacctgcaacccctgccccctgggttacaaggaagaaaataacacaggtgaatgttgtgggagatgtttgcctacggcttgcaccattcagctaagaggaggacagatcatgacactgaagcgtgatgagacgctccaggatggctgtgatactcacttctgcaaggtcaatgagagaggagagtacttctgggagaagagggtcacaggctgcccaccctttgatgaacacaagtgtctggctgagggaggtaaaattatgaaaattccaggcacctgctgtgacacatgtgaggagcctgagtgcaacgacatcactgccaggctgcagtatgtcaaggtgggaagctgtaagtctgaagtagaggtggatatccactactgccagggcaaatgtgccagcaaagccatgtactccattgacatcaacgatgtgcaggaccagtgctcctgctgctctccgacacggacggagcccatgcaggtggccctgcactgcaccaatggctctgttgtgtaccatgaggttctcaatgccatggagtgcaaatgctcccccaggaagtgcagcaagggagacactggaatttttctgaagtggtcctgcattcctgccgagaaggggctgcagacctctggggcctgggtagaggcagcagatatacccctgctccctggctccccacgccggctgagccctcaggcagggtccagagggggccagggccccaaacatggacagcagtgtctcaagatgccaggtccccgggccccaggtctgcagggcggttccaacagagatcctggccagccctgcggtggagagagcacccgcagcagctctgtcatcaacaactatctggatgccaatgagcctgtgtccttggaggcccgtcttagccgcatgcacttccatgacagtcagaggaaggtcgactatgtacttgcctaccactaccggaaacgcggggtgcacctggcccaaggcttccctggccactcgctggctatcgtctccaatggggagacaggcaaggagcctcatgctgggggcccaggtgacattgagctgggaccgctcgatgccctggaggaggagaggaaggagcagcgggaggaatttgagcacaatctgatggaggctggactggagcttgagaaggacttggaggtctggcagagcctggatgtctggcatctcaacctgaattgcagcactgagtcaaagggggatatcttgggacaggtgccggcagcgctctgggtcattttcggcgaggaccgctttcgctggagcgcgacgatgatcggcctgtcgcttgcggtattcggaatcttgcacgccctcgctcaagccttcgtcactggtcccgccaccaaacgtttcggcgagaagcaggccattatcgccggcatggcggccgacgcgctgggctacgtcttgctggcgttcgcgacgcgaggctggatggccttccccattatgattcttctcgcttccggcggcatcgggatgcccgcgttgcaggccatgctgtccaggcagcctaacttcgatcattggaccgctgatcgtcacggcgatttatgccgcctcggcgagcacatggaacgggttggcatggattgtaggcgccgccctataccttgtctgcctccccgcgttgcgtcgcggtgcatggagccgggccacctcgacctgaatggaagccggcggcacctcgctaacggattcaccactccaagaattggagccaatcaattcttgcggagaactgtgaatgcgcaaaccaacccttggcagaacatatccatcgcgtccgccatctccagcagccgcacgcggcgcatctcgggcagcgttgggtcctggccacggtctggaaacgcggaagtcagcgccctgcaccattatgttccggatctgcatcgcaggatgctgctggctaccctgtggaacacctacatctgtattaacgaagcgctggcattgaccctgagtgatttttctctggtcccgccgcatccataccgccagttgtttaccctcacaacgttccataaccgggcatgttcatcatcagtaacccgtatcgtgagcatcctctctcgtttcatcggtatcattacccccatgaacagaaatcccccttacacggaggcatcagtgaccaaacaggaaaaaaccgcccttaacatggcccgctttatcagaagccagacattaacgcttctggagaaactcaacgagctggacgcggatgaacaggcagacatctgtgaatcgcttcacgaccacgctgatgagctttaccgcagctgcctcgcgcgtttcggtgatgacgaacagtggttccgggaggtccggcatgagaacagatgtgtggccctggaaaggtgtccctgcttccatcagggcaaggagtatgcccctggagaaacagtgaagattggctgcaacacttgtgtctgtcgggaccggaagtggaactgcacagaccatgtgtgtgatgccacgtgctccacgatcggcatggcccactacctcaccttcgacgggctcaaatacctgttccccggggagtgccagtacgttctggtgcaggattactgcggcagtaaccctgggacctttcggatcctagtggggaataagggatgcagccacccctcagtgaaatgcaagaaacgggtcaccatcctggtggagggaggagagattgagctgtttgacggggaggtgaatgtgaagaggcccatgaaggatgagactcactttgaggtggtggagtctggccggtacatcattctgctgctgggcaaagccctctccgtggtctgggaccgccacctgagcatctccgtggtcctgaagcagacataccaggagaaagtgtgtggcctgtgtgggaattttgatggcatccagaacaatgacctcaccagcagcaacctccaagtggaggaagaccctgtggactttgggaactcctggaaagtgagctcgcagtgtgctgacaccagaaaagtgcctctggactcatcccctgccacctgccataacaacatcatgaagcagacgatggtggattcctcctgtagaatccttaccagtgacgtcttccaggactgcaacaagctggtggaccccgagccatatctggatgtctgcatttacgacacctgctcctgtgagtccattggggactgcgcctgcttctgcgacaccattgctgcctatgcccacgtgtgtgcccagcatggcaaggtggtgacctggaggacggccacattgtgcccccagagctgcgaggagaggaatctccgggagaacgggtatgagtgtgagtggcgctataacagctgtgcacctgcctgtcaagtcacgtgtcagcaccctgagccactggcctgccctgtgcagtgtgtggagggctgccatgcccactgccctccagggaaaatcctggatgagcttttgcagacctgcgttgaccctgaagactgtccagtgtgtgaggtggctggccggcgttttgcctcaggaaagaaagtcaccttgaatcccagtgaccctgagcactgccagatttgccactgtgatgttgtcaacctcacctgtgaagcctgccaggagccgggaggcctggtggtgcctcccacagatgccccggtgagccccaccactctgtatgtggaggacatctcggaaccgccgttgcacgatttctactgcagcaggctactggacctggtcttcctgctggatggctcctccaggctgtccgaggctgagtttgaagtgctgaaggcctttgtggtggacatgatggagcggctgcgcatctcccagaagtgggtccgcgtggccgtggtggagtaccacgacggctcccacgcctacatcgggctcaaggaccggaagcgaccgtcagagctgcggcgcattgccagccaggtgaagtatgcgggcagccaggtggcctccaccagcgaggtcttgaaatacacactgttccaaatcttcagcaagatcgaccgccctgaagcctcccgcatcgccctgctcctgatggccagccaggagccccaacggatgtcccggaactttgtccgctacgtccagggcctgaagaagaagaaggtcattgtgatcccggtgggcattgggccccatgccaacctcaagcagatccgcctcatcgagaagcaggcccctgagaacaaggccttcgtgctgagcagtgtggatgagctggagcagcaaagggacgagatcgttagctacctctgtgaccttgcccctgaagcccctcctcctactctgccccccgacatggcacaagtcactgtgggcccggggctcttgggggtttcgaccctggggcccaagaggaactccatggttctggatgtggcgttcgtcctggaaggatcggacaaaattggtgaagccgacttcaacaggagcaaggagttcatggaggaggtgattcagcggatggatgtgggccaggacagcatccacgtcacggtgctgcagtactcctacatggtgaccgtggagtaccccttcagcgaggcacagtccaaaggggacatcctgcagcgggtgcgagagatccgctaccagggcggcaacaggaccaacactgggctggccctgcggtacctctctgaccacagcttcttggtcagccagggtgaccgggagcaggcgcccaacctggtctacatggtcaccggaaatcctgcctctgatgagatcaagaggctgcctggagacatccaggtggtgcccattggagtgggccctaatgccaacgtgcaggagctggagaggattggctggcccaatgcccctatcctcatccaggactttgagacgctcccccgagaggctcctgacctggtgctgcagaggtgctgctccggagaggggctgcagatccccaccctctcccctgcacctgatcctattggatgtcaggttgtaggcctggtggccattgtccctgctggcacctgtgtgctcaccttcctggttgtctttgcagactgcagccagcccctggacgtgatccttctcctggatggctcctccagtttcccagcttcttattttgatgaaatgaagagtttcgccaaggctttcatttcaaaagccaatatagggcctcgtctcactcaggtgtcagtgctgcagtatggaagcatcaccaccattgacgtgccatggaacgtggtcccggagaaagcccatttgctgagccttgtggacgtcatgcagcgggagggaggccccagccaaatcggggatgccttgggctttgctgtgcgatacttgacttcagaaatgcatggtgccaggccgggagcctcaaaggcggtggtcatcctggtcacggacgtctctgtggattcagtggatgcagcagctgatgccgccaggtccaacagagtgacagtgttccctattggaattggagatcgctacgatgcagcccagctacggatcttggcaggcccagcaggcgactccaacgtggtgaagctccagcgaatcgaagacctccctaccatggtcaccttgggcaattccttcctccacaaactgtgctctggatttgttaggatttgcatggatgaggatgggaatgagaagaggcccggggacgtctggaccttgccagaccagtgccacaccgtgacttgccagccagatggccagaccttgctgaagagtcatcgggtcaactgtgaccgggggctgaggccttcgtgccctaacagccagtcccctgttaaagtggaagagacctgtggctgccgctggacctgcccctgtcagaaggccgtgagcggcggcacttttgcccatgaattgctcgctgtggagtacgcaggctggatttctcccgcgtttcggctgaaggtaaaccagacatttatcgactatcgaaccggaagattacaacctgctattccgcagagtctccctgaagctctccgtttggctgccgacctggcagagcaaaagcaacggctggagcaaaaaatgcttatggatgcacctaaagtcgaattcgctgaacgcgttgctaccgccagcggggttctaatcggcaactatgccaaagtgctcggcctgggccaaaactatctcttcacctggttgcgtgataacggaattctgatcgcaaccggtgaacgcaggaacgtccccaaacaagaatacatatctcgtgggtatttcacccttaaagaaaccgtgatcgatacaagcaatggaagcaggatttctttcacgactcgtataaccggcaaagacgtagtaagaaccaccagcattgtaatgctggctaaagtcactttcctgagctgtataacgatgagcgattttactttttctggctatgaattggcctgctttgtaacacactccggtctatcccgtagcgccgggcatatcctgtcgcaatgtgcaaatctcgcggcaacaaccagtgaatacttcattcacaagcctcaccgcctgatcgcggcagaaactggttatagccaatcaaccgtcgttcgtgcattccgtgaagctgtaaacaaaggaattctgtctgtagagattgttatcggcgatcaccgtgaacgtcgcgctaacctgtaccggtttacaccatcctttttggccttcgcacaacaagccaaaaatgcgctgatagaaagcaaattaaagatctcttcagcggcaaccaaggttaaagctgttctcgctaagacattggctttatttaattttttatccacacccccatgtcaaaatgataccccctccccctgtcaggatgacgtggcaataaagaataagaagtcacaagttaaaaaaacaaaaagatcagtttccggcggtgccggaacaaccagcctcaaaaaattgacttcatggatcgctaaggcaaaagcaaaggctgacaatctgcggttatccaaaaaacgcactcaaaaacatgagttcaagcagaaagtagaggcggctgcgcggaaatatgcttacctgaagaacaagcgttcgcctgatattggcgggatatcaaacttcgataacctaccgcattgcatgacggtaaacgaagctcttaatgcggttttagccaaaaataaagataacgaacaatggggtgcggttgctggcgcctatatcgccgacatcaccgatggggaagatcgggctcgccacttcgggctcatgagcgcttgtttcggcgtgggtatggtggcaggccccgtggccgggggactgttgggcgccatctccttgcatgcaccattccttgcggcggcggtgctcaacggcctcaacctactactgggctgcttcctaatgcaggagtcgcataagggagagcgtcgaggagaacttctaaagatcgtcgttttgccaggtgaccacgttggtcaagaaatcacagccgaagccattaaggttcttaaagctatttctgatgttcgttccaatgtcaagttcgatttcgaaaatcatttaattggtggtgctgctatcgacctgcaggggggggggggaaagccacgttgtgtctcaaaatctctgatgttacattgcacaagataa

SEQ ID NO: 124551 - DNA, 3031 bp, Homo sapiens
ttatcttgtgcaatgtaacatcagagattttgagacacaacgtggctttcccccccccccctgcaggtcgatagcagcaccaccaattaaatgattttcgaaatcgaacttgacattggaacgaacatcagaaatagctttaagaaccttaatggcttcggctgtgatttcttgaccaacgtggtcacctggcaaaacgacgatctttagaagttctcctcgacgctctcccttatgcgactcctgcattaggaagcagcccagtagtaggttgaggccgttgagcaccgccgccgcaaggaatggtgcatgcaaggagatggcgcccaacagtcccccggccacggggcctgccaccatacccacgccgaaacaagcgctcatgagcccgaagtggcgagcccgatcttccccatcggtgatgtcggcgatataggcgccagcaaccgcaccccattgttcgttatctttatttttggctaaaaccgcattaagagcttcgtttaccgtcatgcaatgcggtaggttatcgaagtttgatatcccgccaatatcaggcgaacgcttgttcttcaggtaagcatatttccgcgcagccgcctctactttctgcttgaactcatgtttttgagtgcgttttttggataaccgcagattgtcagcctttgcttttgccttagcgatccatgaagtcaattttttgaggctggttgttccggcaccgccggaaactgatctttttgtttttttaacttgtgacttcttattctttattgccacgtcatcctgacagggggagggggtatcattttgacatgggggtgtggataaaaaattaaataaagccaatgtcttagcgagaacagctttaaccttggttgccgctgaagagatctttaatttgctttctatcagcgcatttttggcttgttgtgcgaaggccaaaaaggatggtgtaaaccggtacaggttagcgcgacgttcacggtgatcgccgataacaatctctacagacagaattcctttgtttacagcttcacggaatgcacgaacgacggttgattggctataaccagtttctgccgcgatcaggcggtgaggcttgtgaatgaagtattcactggttgttgccgcgagatttgcacattgcgacaggatatgcccggcgctacgggatagaccggagtgtgttacaaagcaggccaattcatagccagaaaaagtaaaatcgctcatcgttatacagctcaggaaagtgactttagccagcattacaatgctggtggttcttactacgtctttgccggttatacgagtcgtgaaagaaatcctgcttccattgcttgtatcgatcacggtttctttaagggtgaaatacccacgagatatgtattcttgtttggggacgttcctgcgttcaccggttgcgatcagaattccgttatcacgcaaccaggtgaagagatagttttggcccaggccgagcactttggcatagttgccgattagaaccccgctggcggtagcaacgcgttcagcgaattcgactttaggtgcatccataagcattttttgctccagccgttgcttttgctctgccaggtcggcagccaaacggagagcttcagggagactctgcggaatagcaggttgtaatcttccggttcgatagtcgataaatgtctggtttaccttcagccgaaacgcgggagaaatccagcctgcgtactccacagcgagcaattcatgggcaaaagtagccgccgccacggccttcgacctgcaggcatgcaagcttggcgtaatcatggtcatagctgtttccgtcatcaccgaaacgcgcgaggcagctgcggtaaagctcatcagcgtggtcgtgaagcgattcacagatgtctgcctgttcatccgcgtccagctcgttgagtttctccagaagcgttaatgtctggcttctgataaagcgggccatgttaagggcggttttttcctgtttggtcactgatgcctccgtgtaagggggatttctgttcatgggggtaatgataccgatgaaacgagagaggatgctcacgatacgggttactgatgatgaacatgcccggttatggaacgttgtgagggtaaacaactggcggtatggatgcggcgggaccagagaaaaatcactcagggtcaatgccagcgcttcgttaatacagatgtaggtgttccacagggtagccagcagcatcctgcgatgcagatccggaacataatggtgcagggcgctgacttccgcgtttccagaccgtggccaggacccaacgctgcccgagatgcgccgcgtgcggctgctggagatggcggacgcgatggatatgttctgccaagggttggtttgcgcattcacagttctccgcaagaattgattggctccaattcttggagtggtgaatccgttagcgaggtgccgccggcttccattcaggtcgaggtggcccggctccatgcaccgcgacgcaacgcggggaggcagacaaggtatagggcggcgcctacaatccatgccaacccgttccatgtgctcgccgaggcggcataaatcgccgtgacgatcagcggtccaatgatcgaagttaggctgcctggacagcatggcctgcaacgcgggcatcccgatgccgccggaagcgagaagaatcataatggggaaggccatccagcctcgcgtcgcgaacgccagcaagacgtagcccagcgcgtcggccgccatgccggcgataatggcctgcttctcgccgaaacgtttggtggcgggaccagtgacgaaggcttgagcgagggcgtgcaagattccgaataccgcaagcgacaggccgatcatcgtcgcgctccagcgaaagcggtcctcgccgaaaatgacccagagcgctgccggcacctgtcctacgagttgcatgataaagaagacagtcataagtgcggcgacgatagtcatgccccgcgcccaccggaaggagctgactgggttgaaggctctcaagggcat

SEQ ID NO: 124552 - DNA, 3477 bp, Homo sapiens
atgagtcatcaacttaccttcgccgacagtgaattcagcagtaagcgccgtcagaccagaaaagagattttcttgtcccgcatggagcagattctgccatggcaaaacatggtggaagtcatcgagccgttttaccccaaggctggtaatggccggcgaccttatccgctggaaaccatgctacgcattcactgcatgcagcattggtacaacctgagcgatggcgcgatggaagatgctctgtacgaaatcgcctccatgcgtctgtttgcccggttatccctggatagcgccttgccggaccgcaccaccatcatgaatttccgccacctgctggagcagcatcaactggcccgccaattgttcaagaccatcaatcgctggctggccgaagcaggcgtcatgatgactcaaggcaccttggtcgatgccaccatcattgaggcacccagctcgaccaagaacaaagagcagcaacgcgatccggagatgcatcagaccaagaaaggcaatcagtggcactttggcatgaaggcccacattggtgtcgatgccaagagtggcctgacccacagcctggtcaccaccgcggccaacgagcatgacctcaatcagctgggtaatctgctgcatggagaggagcaatttgtctcagccgatgccggctaccaaggggcgccacagcgcgaggagctggccgaggtggatgtggactggctgatcgccgagcgccccggcaaggtaagaaccttgaaacagcatccacgcaagaacaaaacggccatcaacatcgaatacatgaaagccagcatccgggccagggtggagcacccatttcgcatcatcaagcgacagttcggcttcgtgaaagccagatacaaggggttgctgaaaaacgataaccaactggcgatgttattcacgctggccaacctgtttcgggcggaccaaatgatactcccatctgtggaaaaattgccttccatgaaactggtccgtgatgccaaaaaggttggggaccactggtctaggacttacccggaaaattctgcaaagtggaattactgggtcaaagggaatgtaaacctgagcaaagtagatggtagtgtgaatgaaaaagcaaatcagctggagtgcagtggtgcacacgcctcacactgtgacacagcgggagagcccagagcgacagctgttggaatgactgcactcttcctgctcaagtctgacctttccaagaaacatagcagcagcagagatgtcgctattgtgatcagaattactttgaagcacaaggactttaatttgaaacctgattacatatttgaaattgctggtgttcctgactttagcttcttggcagaaatgccagctgagtgtgcacatagcacaggtggtcgatggcaaacaagacacctcacagctgcaggcaaggagctgcttctaagggcatacagtctggacagtgccaaggcagataggcatcatacaaagagagaggacaggctgcaatttgggggttttgtcattattagatggatggaggctggcagggattcgccttcatcctgtgattcagcaatgcaggctcctccacccgtggtagcgccgtgtcaatacgtagcttctcaggtcgaaggccgtggcggcggcacttttgcccatgaattgctcgctgtggagtacgcaggctggatttctcccgcgtttcggctgaaggtaaaccagccatttatcgactatcgaaccggaagattacaacctgctattccgcagagtctccctgaagctctccgtttggctgccgacctggcagagcaaaagcaacggctggagcaaaaaatgcttatggatgcacctaaagtcgaattcgctgaacgcgttgctaccgccagcggggttctaatcggcaactatgccaaagtgctcggcctgggccaaaactatctcttcacctggttgcgtgataacggaattctgatcgcaaccggtgaacgcaggaacgtccccaaacaagaatacatatctcgtgggtatttcacccttaaagaaaccgtgatcgatacaagcaatggaagcaggatttctttcacgactcgtataaccggcaaaggtcagcagtggctgatgaagcgattgcttgatgctggtgtgctggtacctgtcgcggcaacgctaacagacgtagtaagaaccaccagcattgtaatgctggctaaagtcactttcctgagctgtataacgatgagcgattttactttttctggctatgaattggcctgctttgtaacacactccggtctatcccgtagcgccgggcatatcctgtcgcaatgtgcaaatctcgcggcaacaaccagtgaatacttcattcacaagcctcaccgcctgatcgcggcagaaactggttatagccaatcaaccgtcgttcgtgcattccgtgaagctgtaaacaaaggaattctgtctgtagagattgttatcggcgatcaccgtgaacgtcgcgctaacctgtaccggtttacaccatcctttttggccttcgcacaacaagccaaaaatgcgctgatagaaagcaaattaaagatctcttcagcggcaaccaaggttaaagctgttctcgctaagacattggctttatttaattttttatccacacccccatgtcaaaatgataccccctccccctgtcaggatgacgtggcaataaagaataagaagtcacaagttaaaaaaacaaaaagatcagtttccggcggtgccggaacaaccagcctcaaaaaattgacttcatggatcgctaaggcaaaagcaaaggctgacaatctgcggttatccaaaaaacgcactcaaaaacatgagttcaagcagaaagtagaggcggctgcgcggaaatatgcttacctgaagaacaagcgttcgcctgatattggcgggatatcaaacttcgataacctaccgcattgcatgacggtaaacgaagctcttaatgcggttttagccaaaaataaagataacgaacaatggggtgcggttgctggcgcctatatcgccgacatcaccgatggggaagatcgggctcgccacttcgggctcatgagcgcttgtttcggcgtgggtatggtggcaggccccgtggccgggggactgttgggcgccatctccttgcatgcaccattccttgcggcggcggtgctcaacggcctcaacctactactgggctgcttcctaatgcaggagtcgcataagggagagcgtcgaggagaacttctaaagatcgtcgttttgccaggtgaccacgttggtcaagaaatcacagccgaagccattaaggttcttaaagctatttctgatgttcgttccaatgtcaagttcgatttcgaaaatcatttaattggtggtgctgctatcgacctgcaggggggggggggaaagccacgttgtgtctcaaaatctctgatgttacattgcacaagataa

SEQ ID NO: 124553 - DNA, 1694 bp, Homo sapiens
atgattaatatgttaaaggatttagtggaaaatgtggaccacatgcacgaacatatacagaatttcagcagagatggaaatgattcaaaaaagaataaattggatacactagacatgaaaaacatgttattatggatgaggaattccttcaattgccttatcagcagactagagatagaagaaagaattagtaaacttgactacagactagtcattggagaacagatgattgatgtcttagggccggagaaacgcagacggcgtaccacacaggaaaagatcgcaattgttcagcagagctttgaaccggggatgacggtctccctcgttgcccggcaacatggtgtagcagccagccagttatttctctggcgtaagcaataccaggaaggaagtcttactgctgtcgccgccggagaacaggttgttcctgcctctgaacttgctgccgccatgaagcagattaaagaactccagcgcctgctcggcaagaaaacgatggaaaatgaactcctcaaagaagccgttgaatatggacgggcaaaaaagtggatagcgcacgcgcccttattgcccggggaatggggattgcacgtcattctcagacgaaccgatgactggatggatggccgccgcagtcgtcacactgatgatacggatgtgcttctccgtatacaaccatgtttatcggagagctgccaacgtatggttatcgtcgaggtatggtgacgcttcgcagaacaggcagaacgtgaatgatatggcctgcgaatcaatgccaaacgctgtttaccggatcatgcgccagaatgcgctgttgcttgagcgaaaacctgctgtaccgccatcgaaacgggcacatacaggcagagtggccgtgaaagaaagcaatcagcgatggtgctctgacgggttcgagttctgctgtgataacggagagagactgcgtgtcacgttcgcgctggactgctgtgatcgtgaggcactgcactgggcggtcactaccggcggcttcaacagtgaaacagtacaggacgtcatgctgggagcggtggaacgccgcttcggcaacgatcttccgtcgtctccagtggagtggctgacggataatggttcatgctaccgggctaatgaaacacgccagttcgcccggatgttgggacttgaaccgaagaacacggcggtgcggagtccggagagtaacggaatagcagagagcttcgtgaaaacgataaagcgtgactacatcagtatcatgcccaaaccagacgggttaacggcagcaaagaaccttgcagctcgttttggtgcgtacgattacaggaactgcaaggagagccagtacagcccgccggaaagcagtaccgcagccggaagggtaaacacccaggccatcagaatgctggtcacggttttacgatgtaagccgccaccatctaccaccatcgtccccgcgacagaagaggagatcgttgccacacggcgccagccaatcatcgtaccgatacctaacgccagcgcgaccgccatgatgatccacaccggtgcatactcgatggtgctatgccagacccggcaagcctaccggcatagtgcgattaagataacgttgatgcaggcagtaaaccgtcagcaccagggaaataatcgggaatacagaaaatggcacaatggagctaaacagcgctgcgaaa

SEQ ID NO: 124554 - DNA, 7457 bp, Homo sapiens
atgtaccaagcaaatggaaaacaaaaaaaggcaggggttgcaatcctagtctctgataaaacagactttaaaccaacaaagatcaaaagagacaaagaaggccattacataatggtaaagggatcaattcaacaagaagagctaactatcctaaatatatatgcacccaatacaggagcacccacattcatacagcaagtcctgagtgatctacaaagagacttagactcccacacattaataataggagactttaacaccccactgtcaacatcagacagatcaacgagacagaaagtcaacaaggatacccaggaattgaactcagctctgcaccaagcagacctaatagacatctacagaaccctccaccccaaatcaacagaatatacatttttttcagcaccacaccacacctattccaaaattgaccacatacttggaagtaaagcactcctcagcaaatgtaaaagaacagaaattataacaaactatctctcagaccacagtgcaatcaaactagaactcatgattaagaatctcactcaaaaccactcaaccatatggaaactgaacaacctgctcctgaatgactactgggtacataaggaaatgaaggcagaaataaagatgttctttgaaaccaacgagaacaaagacacaacataccagaatctctgggacacattcaaagcagtgtgtagagggaaatttatagcactaaatgcccacaagagaaagcaggaaagatccaaaattgacaccctaacatcacaattaaaagaactagaaaagcaagagcaaacactttcaaaagctagcagaaggcaagaaataactaaaatcagagcagaactgaaggaaatagagacacaaaaaacccttcaaaaaattaacgaatccaggagcaggttttttgaaaggatcaacaaaattgatagcctgctagcaagactaataaagaaaaaaagagagaagaatcaaatagatgcaataaaaaatgataaaggggatatcaccaccaatcccacagaaatacaaactaccatcagagaatactacaaacacctctacgcaaataaactagaaaatctagaagaaatggataaattcctcgacacatacactctcccaagactaaaccaggaagaagttgaatctctgaatagaccaataacgggagctgaaattgtggcaataatcaatagcttaccaaccaaaaagagtccaggaccagatggattcacagccgaattctaccagaggtacaaggaggaacaggtaccattccttctgaaactattccaatcaatagaaaaagagggaatcctccctaactcattttatgtgtccagcatcatcctgataccaaagccgggcagagacacaaccaaaagagagaattttagaccaatatccttgatgaacattgatgcaaaaatcctcaataaaatactggcaaaccgaatccagcagcacatcaaaaagcttatccaccatgatcaagtgggcttcatccctgggatgcaaggctggttcaatatatgcaaatcaataaatgtaatccagcatataaacagaaccaaagacaaaaaccacatgattatctcaatagatgcagaaaaggcctttgacaaaattcaacaacctttcatgctaaaaactctcaataaattagtgttggaagttctggccagggcaattaggcaggagaaggaaataaagggtattcaattaggaaaagaggaagtcaaattgtccctgtttgcagacgacatgattgtatatctagaaaaccccattgtctcagcccaaaatctccttaagctgataagcaacttcagcaaagtctcaggatacaaaatcaatgtacaaaaatcacaagcattcttatacaccaacaacagacaaacagagagccaaatcatgagtgaactcccattcacaattgcttcaaagagaataaaatacctaggaatccaacttacaagggatgtgaaggacctcttcaagggagaactacaaaccactgctcaaggaaataaaagaggatacaaacaaatggaagaacattccatgctcatgggtaggaagaatcaatatcgtgaaaatggccatactgcccaaggtaatttatagattcaatgccatccccatcaagctaccaatgactttcttcacagaattggaaaaaactacttttaagttcatatggaaccaaaaaagagcccacatcgccaagtcaaacctaagccaaaagaacaaagctggaggcatcacactacctgacttcaaactatactacaaggctacagtaaccaaaacaacatgatactggtaccaaaacagagataatagatcaatggaacagaacagagccctcagaaataacgccgcatatctacaactatctgatctttgacaaacctgagaaaaagaagcaatggggaaaggattccctatttaataaatggtgctgggaaaactggctagccatatgtagaaagctgaaactggatcccttccttacaccttatacaaaaattaattcaagatggattaaagacttaaacgttagacctaaaaccataaaaaccctagaagaaaacctaggcaataccattcagaacataggcatgggcaaggacttcatgtctaaaacaccaaaagcaatggcaacaaaagacaaaattgacaaatgggatctaattaaactaaagagcttctgtacagcaaaagaaactacaatcagagtgaacaggcaacctacaaaatgggagaaaatttttgcaacctactcatctgacaaagggctaatatccagaatctacaatgaactcaaacaaatttacaagaaaaaaacaaacaaccccatcaaaaagtggacaaaggacatgaacagatacttctcaaaagaagacatttatgcagccaaaaagcacatgaaaaaatgctcatcatcactagccatcagagaaatgcaaatcaaaaccacaatgagataccatctcacaccagttagaatggcaatcattaaaaagtcaggaaacaacagtcttgctagtggtctatcaattgacaaaattcaacaacccttcatgctaaaaactctcaataaattaggtattgatgggacgtatttcaaaataataagagctatctatgacaaacccacagccaatatcatactgaatgggcaaaaactggaagcattccctttgaaaactggcacaagacagggatgccctctctcaccgctcctattcaacatagtgttggaagttctggccagggcaatcaggcaggagaaggaaataaagggtattcaattaggaaaagaggaagtcaaattgtccctctttgcagacgacatgattgtttatctagaaaaccccatcgtctcagcccaaaatctccttaagctgataagcaacttcagcaaagtctcaggatacaaaatcaatgtacaaaaatcacaagcattcttatacaccaacaacagacaaacagagagccaaatcatgagtgaactcccattcacaattgcttcaaagagaataaaatacctaggaatccaacttacaagggatgtgaaggacctcttcaaggagaactacaaaccactgctcaaggaaataaaagaggatacaaacaaatggaagaacattccatgctcatgggtaggaagaatcaatatcgtgaaaatggccatactgcccaaggtaatttatagattcaatgccatccccatcaagctaccaatgactttcttcacagaattggaaaaaactactttaaagttcatatggaaccaaaaaagagcccgcattgccaagtcaatcctaagccaaaagaacaaagccggaggcatcacactacctgacttcaaactatactacaaggctacagtaaccaaaacagcatggtactggtaccaaaacagagatatagatcaatggaacagaacagagccctcagaaataacgccgcttacctacaactatctgatctttgacaaacctgagaaaaacaagcaatggggaaaggattccctatttaataaatggtgctgggaaaactggctagccatatgtagaaagctgaaactggatcccttccttacaccttatacaaaaatcaattcaagatggattaaagatttaaacgttagacctaaaaccataaaaaccctagaagaaaacctacgcattaccattcaggacatagggatgggcgaggacttcatgtccaaaacaccaaaagcaatggcaacaaaagccaaaattgacaaatgggatctaattaaactaaagagcttctgcacagcaaaagaaactaccatcagagtgaacaggcaacctacaaaatgggagaaaattttcgcaacctactcatctgacaaagggctaatatccagaatctacaatgaactcaaaccaatttacaagaaaaaaacaaacaaccccatcaaaaagtgggcgaaggacatgaacagacacttctcaaaagaagacatttatgcagccaaaaaacacatgaaaaaatgctcatcatcactggccatcagagaaatgcaaatcaaaaccacaatgagatatcatctcacaccagttagaatggcaatcattaaaaagtcaggaaacaacagtacgtttgactttggacaacatgagtttgaactacacaggtccacttatacgcggattgttttcagtaaaattacaccaatattggaagttctggccagggcaattaggcaggagaaggaaataaagggtattcaattaggaaaagaggaagtcaaattgtccctgtttgcagatgacatgattgtatatctagaaaaccccattgtctcagcccaaaatctcctcaagctgataggcaacttcagcaaagtctcaggatacaaaatcaatgtacaaaaatcacaagcattcttatacaccaataacagacaaacagagagccaaatcatgagtgaactcccattcacaattgcttcaaagagaataaaatacctaggaatccaacttacaagggacgtgaaggacctcttcaaggagaactacaaaccactgctcaatgaaataaaagaggatacaaacaaatggaagaacattccatgctcatgggtaggaagaatcaatattgtgaaaatggccatactgcccaaggtaatttatagattcaatgccatccccatcaagctacccatgactttcttcacagaattggaaaaaactactttaaagttcatatggaaccaagaaagagcccgcatcgccaagtcaatcctaagccaaaagaacaaagctggaggcatcatgctacctgacttcaaactatactacaaggctacagtaaccaaaacagcatgtcttgctagcggtctatcaattttgtccagggcaatcaggcaggagaaagaaacaaaaggtactcaattaggaaaagaggaagtcaaattgtccctgtttgcagacgacatgattgtgtatctaaaaaacccaatcgtctcagcgcaaaatctcctcaagctgataagcaacttcagcaaagtctcaggatacaaaatcaatgtagaaaaatcacaagcattcttatacaccaataacagacaaacagagagccaaatcatgagtgaactcccattcacacttgcttcaaagagaataaaatacctaggaatccaacttacgagtgacgtgaaggacctcttcaaggagaactacaaaccactgctcaaggaaataaaagaggatacaaacaaatggaagaacattccatgctcatgggtaggaagaatcaatatcgtgaaaatggccatactgcccaagcccccagacaaccacttgcatcagtatcacccaaaagaagcagattcctgggccccaacttctaccactgaatcagaacctctatggaagataaaccctgcgctgcctgaggaaacagtgatggcctcccctgaggcagttgccaggaaagataatgtagagtctcctcaggacccatctccaacacccctgtttgcttctagacctataactggactaaagtcccagtgggcccctagagtgccagaatgcataattagcacagacatacttagcaactggcagaacccccacattggctccccaactggtggggtgagggctgttatggtgggaaaggccaaatggaagccattagaggtgcctctacctagaaaaatagtaaatcaaaaacaatgtcacatccctggagggattgcagagattagtgctgccattaaggccttaaaagatgcaggggcaatgattcctacaatatccctgttcgactctactcagcctgtgcagaagacaggtggattttggagaatgacagtggattattgtaagcttaaccaagtggtgtctccaattgcagctgctgtaccagatgtggtttcattgcttgagcaaattaacacaccttcgggagtatatcaactctccagcttggtgtttaatcttcagagagaccttgatcgcctttcccttccacaagatatcacactggtccattacattgataacactatactgattggatccagtgacagagaagtagcaaacacactggacttattgcgcatttatcgagtgactggaaaggctgccagttttgagtggggtctacaacaggagaaggctctgcagcaggtccaggctgctctgccgcttgcgccatatgatccagcagatccaatggtgcttgaggtgtcagtggcagacagggatgctgtttggagcctttggcagcccgccataggtgaatcacagtggaggcctccaggattttggagcaaggccctattttctgcagataactgctctccttttgagaaacagctcttggcctgttactgggctttggtagaaactgaacgtttgattatgggtcaagtcacaaggggaccagaactgcctatcatgaactgggtgctttctgacccattagccataaagtgggtcatgaacagcaatattccatcatcaagtggaaatggtatatatgtggtcaggcaccagcaggtcctgagggcacaaggtgatcagccagctacttggtggcaggttgattatattggatctcttccatcaaggaaagggcagcagcttgccctcactggaatagacacttactccagatataggtttacctatcctgtacgcaatgcttttataaagactaccatccgtggactcacagaatgctttatccaccatcatggtattccacatagcattgcctctgaccaaggcactcactttatggctaaagtagtgtggcagtgggctcacactcatggaattcactggtcttaccatgttccccatcatcctgaagccgctagattgatagaacagtggaatggtctcctgaagtcacaattacaatgccatctaggcgacaatactttgtag

SEQ ID NO: 124555 - DNA, 7783 bp, Homo sapiens
ttatcttgtgcaatgtaacatcagagattttgagacacaacgtggctttcccccccccccctgcaggtcgatagcagcaccaccaattaaatgattttcgaaatcgaacttgacattggaacgaacatcagaaatagctttaagaaccttaatggcttcggctgtgatttcttgaccaacgtggtcacctggcaaaacgacgatctttagaagttctcctcgacgctctcccttatgcgactcctgcattaggaagcagcccagtagtaggttgaggccgttgagcaccgccgccgcaaggaatggtgcatgcaaggagatggcgcccaacagtcccccggccacggggcctgccaccatacccacgccgaaacaagcgctcatgagcccgaagtggcgagcccgatcttccccatcggtgatgtcggcgatataggcgccagcaaccgcaccccattgttcgttatctttatttttggctaaaaccgcattaagagcttcgtttaccgtcatgcaatgcggtaggttatcgaagtttgatatcccgccaatatcaggcgaacgcttgttcttcaggtaagcatatttccgcgcagccgcctctactttctgcttgaactcatgtttttgagtgcgttttttggataaccgcagattgtcagcctttgcttttgccttagcgatccatgaagtcaattttttgaggctggttgttccggcaccgccggaaactgatctttttgtttttttaacttgtgacttcttattctttattgccacgtcatcctgacagggggagggggtatcattttgacatgggggtgtggataaaaaattaaataaagccaatgtcttagcgagaacagctttaaccttggttgccgctgaagagatctttaatttgctttctatcagcgcatttttggcttgttgtgcgaaggccaaaaaggatggtgtaaaccggtacaggttagcgcgacgttcacggtgatcgccgataacaatctctacagacagaattcctttgtttacagcttcacggaatgcacgaacgacggttgattggctataaccagtttctgccgcgatcaggcggtgaggcttgtgaatgaagtattcactggttgttgccgcgagatttgcacattgcgacaggatatgcccggcgctacgggatagaccggagtgtgttacaaagcaggccaattcatagccagaaaaagtaaaatcgctcatcgttatacagctcaggaaagtgactttagccagcattacaatgctggtggttcttactacgtctttgccggttatacgagtcgtgaaagaaatcctgcttccattgcttgtatcgatcacggtttctttaagggtgaaatacccacgagatatgtattcttgtttggggacgttcctgcgttcaccggttgcgatcagaattccgttatcacgcaaccaggtgaagagatagttttggcccaggccgagcactttggcatagttgccgattagaaccccgctggcggtagcaacgcgttcagcgaattcgactttaggtgcatccataagcattttttgctccagccgttgcttttgctctgccaggtcggcagccaaacggagagcttcagggagactctgcggaatagcaggttgtaatcttccggttcgatagtcgataaatgtctggtttaccttcagccgaaacgcgggagaaatccagcctgcgtactccacagcgagcaattcatgggcaaaagtgccgccgccacggccctgggaggcaccaggctgctggcccactgcctggccgagctggtcagagagccacagctgcatgcggatgaagggctcccgccccttctgcgtcagcttgctccatggcttcggccgggacagcatgtcgctcacgctgccctgtgacaggcccagcaccttctccccgaagatcctctggcagatgccgttcttggccagcttctccttgacctggcgggtgagctccagcgtgtctacctcacggtacatgtacagctcgtactgctcgggggtcagcggcggcacggtgggcttcagggtgcgcggcacgtaggccgggtagtagggcagccgcgcgcccgcctcggccgtcgcgccctcagccttgagctcgcccgtcctggggggttcgtcctccgcccctgccgccgcctcgtcctcggggggcacaggggcctcgtccccgcggggccaggcgcggccgttgggctggccagagtagccagaggaggaggaggaggacagcgagggcgacacggaggcgtaggggcggctgagcaggccgcggtcggaggcccagtggtggtcgaagtagccggcgtcgccgatctcggacttgacttgcggatgatgcgggagcggcgcctgcgcggggcccccgctgccctcctcctgcttcaccaaggccggggccccgttctggctcgcggtggccagtgatggccgctccgggggcgaggggggcaccgagcggcccctgggcgccacctccatctccagcagcgcctgctgttgcgcctgcatctcacggcgtgcctgctccaggatgctcttgatggcgtcctccgaggtgctggcgggggtcgtgccgttggcgatgctcagcggggccaccgaggtcttgggctcgccgcccttctgcgactcgatctccttcttggcctgctctagaatgctcttgatggcgtcgtctgagcctgtctcaggcgtgcggattctcggggtgatgctgcctcgctgccgcacttggatggtcctgagcgccagtacattctgctcatccgacaggaactgcttcatcttgatgaagggctccttgcccttcaccgtgagcttgcgccagggcttgggccgggctaggatctcgctgaccgagccctgcgacagccccagcacgtaatgcccaaacacccgctgcccgatgttgtgtttcagcagctgctccttcacctggaaggcgatctctgccgtgtccagctgctcctcctctgccccgggccccgccgctccgcccccaccaccatccgcgggctcaggaccgcccagtggctcagggccaggggccggggtggcaggggctgtggggggcttggcgccatagaaggctggggggaacaccagcaggccgcccgcctctcccttgaaggcggctgggggcatcatcagtctctcccctgatgccaggctggggaagggggacagcgagaaagtccgagtgccgtcagccccaagctggggcccagcaggggctgcccggggctgggagacagggggtcttctggccccattacaacgcccgctcccgcagatattcccgtggcgagcgataacccagcgcactatgcggatgccattcgttataatgctcgaacgcctctgcaaggttctttgctgccgttaacccgtctggtttgggcatgatactgatgtagtcacgctttatcgttttcacgaagctctctgctattccgttactcgtccggactccgcaaccgcccgtgttctttcggtttcaagtccccaacatcccgggcgaactggcgtgtttcattagcccggtagcatgaaccattatccgtcagccactccactggagacgacggaagatcgttgccgaagcggcgttccaccgctcccagcatgacgtcctgtactgtttcactgttgaagccgccggtagtggcccgcccagtgcagtgcctcacgatcacagcagtccagcgcgaacgtgacacgcagtctctctccgttatcacagcagaactcgaacccgtcagagcaccatcgctgattgctttctttcacggccactctgcctgtatgtgcccgtttcgatggcggtacagcaggttttcgctcaagcaacagcgcattctgggcgcatgatccggtaaacacgtttggcattgatcgcaggcataccatcaagttctgcctgtctgcgaagcagcgcccatacccgacgataaccatacgtttgggcagctctccgataacatggtgtatacggagaagcacatccgtatcatcagtgtgacgactgcgggcggccatcccatccagtcatcggttcgttccccatccccgggcaataagggcgcgtgcgctatccacttttttgcccgtccatattcaacggcttctttgaggagttcattttccatcgttttcttgccgagcaggcgctggagttctttaatctgcttcatggcggcagcaagttcagaggcaggaacaacctgttctccggcggcgacagcagtaagacttccttcctggtattgcttacgccagagaaataactggctggctgctacaccatggttgccgggcaacgagggagaccgtcatccccggttcaaagctctgctgaacaatttgcgatcttttccttgatgccatcaacattctcaatccacacgccgaagtggatgtgatgagccgctatccggtcagttcttcctggctgctcaaccgcccggtaatgggcgatccgctgttcgacgccattatccaggtcggcggatcgttttttgtcgatctctatggcgtgccgcagtttgaacatgcactttgcacgtttatggcgaaaaagccgctgtttatgattggtcacagtgttggcccgttccaggatgagcaatttaaccaactggcgaactacgtttttggtcactgcgacgcgctgatcctgcgcgaatcggtcctctttgaacgcctgagacatgcagtaccgccagcattgcccccccacccccaacatggcacatgtatacatatgtaacaaacctgcatgttgtgctttgaatttgatcaggatggagttagcgatacctttttcgataccttctttcaggatcttggtgttggttacgaacaggtcgtcaccaaccagctggattttgtcgcccagaactttggtctggtatgcgaaaccgtcccagtcagattcgtccagaccgtcttcgatagaaacgatcgggtactgtttggtcagttcttccaggaagtgagtgaattcttcagaggtgaacgctttgttgccttcgccagccagaacgtatttaccatctttgtagaattcagaagctgcgcagtccatcgccaaagtgatgtctttgcccagttcataaccagcagctttaacagcttcagcgataacagccagagcttcagcgttggaacccaggttcggcgcatagccaccttcgtcaccaacagcagtgttcatgcctttcgctttcagaacttttgccaggtgatggaaaacttcagaacccatgcggatggcttctttcacagttttcgcgccaaccggctgaatcatgaattcctggatatcaacgttgttgtcagcgttctcaccaccgttcatgatgttgatcatcggaacagagttgagaggcaagggattgagctgattcaggggtacgatgccagccagctcgagccgcagccggatctggtgattattggcaacgccatgacccgtggaaatccgtgtgtggaagcggtactggagaaaaatatccttttttttatcgaatcggatgagtatgactgcgcctttttcgacaaacgctctaaatttgttcattactgcccgcgtacgctgatcctcaacaaccttgagttcgatcacgccgatatctttgacgacctgaaagcgatccagaaacagttccaccatctggtgcgtatcgttccggggcagggccgtattatctggccggaaaatgacatcaacctgaaacagaccatggcgatgggctgctggagcgagcaggagctggtgggtgagcagggtcactggcaggcgaaaaagctgaccaccgatgcttccgaatgggaagttttgctggatggcgaaaaagtgggcgaagtgaaatggtcgctggtaggcgaacataatatgcacaatggcctgatggcgattgcagcggctcgccatgttggtgtagcgccggcagatgccgctaacgcgctgggttcgtttattaatgctcgtcgccgtctggagttgcgtggtgaagcgaatggcgtcacggtatatgacgattttgcccatcacccgacggcgattctggcaacgctggcggctctgcgtggcaaggccggtggtacggcgcttttggaaattgagagcaatgtgtgtatcacgggctgtaactactactccggtggtaatattcagttcacccgtgcctaattggatttgcccatatatttccagacatctgttatcacttaacccattacaagcccgctgccgcagatattcccgtggcgagcgataacccagcgcactatgcggatgccattcgttataatgctcgaacgcctctgcaaggttctttgctgccgttaacccgtctggtttgggcatgatactgatgtagtcacgctttatcgttttcacgaagctctctgctattccgttactctccggactccgcaccgccgtgttcttcggttcaagtcccaacatccgggcgaactggcgtgtttcattagcccggtagcatgaaccattatccgtcagccactccactggagacgacggaagatcgttgccgaagcggcgttccaccgctcccagcatgacgtcctgtactgtttcactgttgaagccgccggtagtgaccgcccagtgcagtgcctcacgatcacagcagtccagcgcgaacgtgacacgcagtctctctccgttatcacagcagaactcgaacccgtcagagcaccatcgctgattgctttctttcacggccactctgcctgtatgtgcccgtttcgatggcggtacagcaggttttcgctcaagcaacagcgcattctggcgcatgatccggtaaacacgtttggcattgatcgcaggcataccatcaagttctgcctgtctgcgaagcagcgcccatacccgacgataaccatacgttggcagctctccgataacatggtgtatacggagaagcacatccgtatcatcagtgtgacgactgcggcggccatccatccagtcatcggttcgttccccatccccgggcaataagggcgcgtgcgctatccacttttttgcccgtccatattcaacggcttctttgaggagttcattttccatcgttttcttgccgagcaggcgctggagttctttaatctgcttcatggcggcagcaagttcagaggcaggaacaacctgttctccggcggcgacagcagtaagacttccttcctggtattgcttacgccagagaaataactggctggctgctacaccatgttgccgggcaacgagggagaccgtcatccccggttcaaagctctgctgaacaattgcgatcttttcctgtgtggtacgccgtctgcgtttctccggccctaagacatcaatcatctgttctccaatgactagtccactggaagtcttgaaacgtatttcctgagggtaagggaggactgctctacttggatttcccacagcattgttccatttcccctcttcctctttctcctcctcttcctcctctttcccccctcctcctcctccttctccttctttgatggagctccacaccatagccagcatggagacactggcttctttgggcagagatggcagagccaacattctctgaggctcttgggaaatacattgctgtcttcgcagcacttgcaacaagccagaattatagaggatggttggagcagccaatgtccgcagaaatgcgggcctggacaacattgcctccat

SEQ ID NO: 124556 - DNA, 11087 bp, Homo sapiens
acacagactggcaaattggataaagagtcaagacccatcagtgtgctatattccggaaacccatctcacgtgcagagacacacataggctcaaaataaaaggatggaggaagatctaccaagccaatggaaaacaaaaacaggcaggggttgcaatccacatctctgataaaacagactttaaaccaacaaagatcaaaagagacaaagaaggccattacataatggtaaagggatcaattcaacaagaaaagctaactatcctaaatgtatatgcacccaacacaggagcacccagattcataatgcaagtcctgagtgacctacaaagagacttagactcccacacattaataatgggagactttaacaccccactgtcaacattagacagattaacgagacagaaagtcaacaaggatacccaggaattgaactcagctctgcaccaagtggacctaatagacatctatagaactctccaacccaaatcaacagaatatacattgttttcagcaccacaccacacctattccaaaattgaccacatacttggaagtaaagctctcctcagcaaatgtaaaagaacagaaattataacaaactatctctcagaccacagtgcaatcaaactagaactcaggattaagaaactcactcaaatccgctcaactgcatggaaactgaacaacctgctcctgaatgactactgggtacataacgaaatgaaggcagaaataaagatgttctttaaaaacaatgagaataaagacgcaacatgccagaatctctgggacacattcaaagcagtgtgtagagggaaattcttagcactaaatgcccacaagagaaagcaggaaagatccaaaatcaacaccctaacatcacaattaaaagaactagaaaagcaagagcaaacacattccaaagctagtagaaggcaagaaataactaaaatcagagcagaactgaaggaaatagagacacaaaaaacccttcaaaaaattaatgaatccaggagctggttttttgaaaggatcaacaaaattgatagaccactagcaagactaataaagaaaaaaagagagaagaatcaaatagacacaataaaaaatgataaaggggatatcaccaccgatcccacagaaatacaaactaccgtcagagaatactacaaacacctctacgcaaataaactagaaaatctagaagaaatggataaattcctcgacacatacacactcccaagactaaaccaggaagaatttgaatctctgaatagaccagtaacaggatctgaaattgtggcaataatcaatagcttaccaacgaaaaagagtccaggaccagatggattcacagccgaattctaccggaggtacaaggaggaactgcatataaacagagccaaagacaaaaaccacatgattatctcaatagatgcagaaaaagcctttgacaaaattcaacaacccttcatgctaaaaactctcaataaattaggtactgctgggacgtatttcaaaataataagagctatctatgacaaacccacagccaatatcatactgaatggggccaaaaactggaagcattcccctttgaaaaactggcacaagaacagggatgcccctctctcacccactccctattcaacatagtgttggaagttctggcccgggcaattaggcaggataaggaaataaagggtattcaattaggaaaagaggaagtcaaattgtccctgtttgcagacgacatgactgtatgtatagaaaaccccattgtctcagcccaaaatctccttaagctgataagcaacttcagcaaagtctcaggatacaaaatcaatgtacaaaaatcacaagcattcttatacaccgataacagacaaacagagagccaaatcatgagtcaactcccattcacaattgcttcaaagagaataaaatacctaggaatccaacttacaagggatgtgaaggacctcttcaaggagaactacaaaccactgctcaaggaaataaaagaggatacaaacaaatggaagaacattccatgctcatgggtaggaagaatcaatatcgtgaaaatggccatactgcccaaggtaatttacagattcaatgccatccccatcaagctaccaatgactttcttcacagaattggaaaaaactactttaaagttcatatggaaccaaaaaagagcccgcatcgccaagtcaatcctaagccaaaagaacaaagctggaggcatcacactacctgacttcaaactatactacaaggctacagtaaccaaaacagcatggtactggtaccaaaacagagatatagatcaatggaacaaaacagagccctcagaaataacgccacatatctacaactatctgatctttgacaaacctgaggaaaacaagcaatggggaaaggattccctatttaataaatggtgctgggaaaactggctagccatatgtagaaagctgaaactggatcccttccttacaccttatacaaaaatcaattcaagatggattaaagacttaaacgttagacctaaaaccataaaaaccctagaagaaaagctaggcattaccattcaggacataggcattggcaaggacttcatgtctaaaacaccaaaagcaatggcaacaaaagacaaaattgacaaatgggatctaattaaactaaagagcttctgcacagcgaaagaaactaccatcagagtgaacaggcaacctacaaaatgggaggaaattttcgcaacctactcatctgacaaagggctaatatccagaatctacaatgggctcaaacaaatttacaagaaaaaaacaaacaaccccatcaaaaagtgggcgaaggacatgaacagacacttctcaaaagaagacatttatgcagctaaaaaacacgtgaaaaaatgctcatcatcactggccatcagagaaatgcaaatcaaaaccacaatgagataccatctcacaccagttagaatggcaatcattaaaaagtcaggaagcaacagatgctggagaggatgtggagaaataggaacacttttacactgttggtgggactgtaaactagttcaaccattgtggaagtcagtgtggcgattcctcagggatctagaactagaaataccatttgacccagccatcccattactgggtatatacccaaacgactataaatcatgctgctataaagacacatgcacattgagtctaccagaaatccgcaactgcccaacgaaaagtgtcccagtccccttctctgttgatgaaactcagtatcatgttgaagatactagtcctgtaagctggcaagtaaaagttctaggcaagcatatacatcagggaagcagctatgaagatgtttggctgcctcagcgcatgcaaggaaaactaacaaacagaaaggacatccacaccaaaaacccatctgtacatcaccatcatcaaagaccaaaagtagataaaaccacaaagatggggaaaaaacagaacagaaaaactggaaactctaaaaagcagagcgcctctcctcctccaaaggaacgcagttcctcaccagcaatgcaacaaagctggacggagaatgactttgacgagctgagagaagaaggcttcagacgatcaaattactctgagctacgggaggacattcaaaccaaaggcaaagaagttgaaaactttgaaaaaaatttagaagaatgtataactagaataaccaatacagagaagtgcttaaaggagctgatggagctgaaaaccaaggctcgagaactacgtgaagaatgcagaagcctcaggagccaatgcgatcaactggaagaaagggtatcagcaatggaagatgaaatgaatgaaatgaagcaagaagggaagtttagagaaaaaagaataaaaagaaacgagcaaagcctccaagaaatatgggactatgtgaaaagaccaaatctacgtctgattggtgtacctgaaagtgatgcggagaatggaaccaagttggaaaacactctgcaggatattatccaggagactttccccaatctagcaaggcaggccaacgttcagattcaggaaatacagagaacgccacaaagatactcctcgagaagagcaactccaagacacataattgtcagattcaccaaagttgaaatgaaggaaaaaatgttaagggcagccagagagaaaggtcgagttaccctcaaagggaagcccatcagactaacagcggatctctcggcagaaaccctacaagccagaagagagtgggggccaatattgaacattcttaaagaaaagaattttcaacccagaatttcatatccagccaaactaagcttcataagtgaaggagaaataaaatactttacagacaagcaaatgctgaccgattttgtcaccagcaggcctgccctaaaagagctcctgaaggaagcgctaaacatggaaaggaacaaccggtaccagccactgcaaaatcatgccaaaatgtaaagaccatcgagactaggaagaaactgcatcaactaacgagcaaaatcaccagctaacatcataatgacaggatcaaattcacacataacaatattaactttaaatgtaaatggactaaattctccaattaaaagacacagactggcaagttggataaagagtcaagacccatcagtgtgctgtattcaggaaacccatctcatgtgcagagacacacataggctcaaaataaaaggatggaggaagatctaccaagcaaatggaaaacaaaaaaaggcaggggttgcaatcctagtctctgataaaacagactttaaaccaacaaagatcaaaagagacaaagaaggccattacatgatggtaaagggatcaattcaacaagaggagctaactatcctaaatatgtatgcacccaatacaggagcacccagattcataaagcaagtcctgagtgacctacaaagagacttagactcccacacattaataatgggagactttaacaccccactgtcaacattagacagatcaacgagacagaaagtcaacaaggatacccaggaattgaactcagctctgcaccaagcagacctaatagacatctacagaactctccaccccaaatcaacagaatatacatttttttcagcaccacaccacagctattccaaaattgaccacatacttggaagtgaagctctcctcagcaaatgtaaaagaacagaaattataacaaactatctctcagaccacagtgcaatcaaactagaactcaggattaagaatctcactcaaagccgctcaactacatggaaactgaacaacctgctcctgaatgactactgggtacataacgaaatgaaggcagaaataaagatgttctttgaaaccaacgagaacaaagacacaacataccagaatctctaggacgcattcaaagcagtgtgtagagggaaatttatagcactaaatgcccacaagagaaagcaggaaagatccaaaattgacaccctaacatcacaattaaaagaactagaaaagcaagagcaaacaacattcaaaagctagcagaaggcaagaaataactaaaatcagagcagaactgaaggaaatagagatacaaaaaacccttcaaaaaattaatgaatccaggagctggtttttttgaaaggatcaacaaaattgatagaccgctagcaagactaacaaagagaaaaagagagaagaatcaaatacacgcaataaaaaatgataaaggggatatcaccaaccgatcccacagaaatacacactaccatcagagaatactataaaaacctctacgcaaagaaactagaaaatctagaagaaatggataaattcctggagacatacaccctcccaagaccaaaccaggaagaagttgaatctctgaatagaccaataacaggatctgaaattgtggcaataatcaatagcttaccaactaaaaaagagtccaggatcagaaggcttcacagccgaattctaccagaggtacaaggaggaactggtaccattccttctgaaactattccaatcaatagaaaaagagggaatcctccctaactcattttatgaggccagcatcattctgataccaaagccgggcagagacacaaccaaaaaagagaattttagaccaataaccttgacgaacattgatgcaaaaatcctcaataaaatactggcaaaccgaatccagcagcacatcaaaaagcttatccaccatgatcaagtgggcttcatccctgggaatgcaaggctggttcaatatatgcaaatcaataaatgtaatccagcatataaacagaaccaaaggcaaaaaccacatgattatctcaatagatgcagaaaaggcctttgacaaaattcaacaacccttcctgctaaaaactctcaataaattaggtattgatgggacgtatctcaaaataataagagctatctatgacaaacccatagccaatatcatactgaatgggcaaaaactggaagcattccctttgaaaactggcacaagacagggatgccctctctcaccactcctattcaacatagtgttggaagttctggctagggcaattaggcaggagaaggaaataaagggtattcagttacaaaaagaggaagtcaaattgtcccctctttgcagatgacatgattgtatatgtagaaaaccccttcgtctcagcccccatatctccctcaagctgataagcaacttcagcaaactctcaggatacaaaatcaatgtacaaaaatcaccaagcattcctatacaccaacaacagacaaacagagagccaaatcatgagtgaactcccattctgttattgcttcaaagagaataaaatacctaggaatccaacttacaagggatgtgaaggacctccttcaaggagacctacaaaccactgctcaacgaaataaaaagaggacacaaacaaatggaagaacattccatgctcatgggtaggaggaagaatcaatctcgtgaaaatggccatactgcccaaggtaaatttatagattcaatgccatccccatcaagctaccaatgactgttttcacagaattggaaaaaaactactttaaagttcatatggaaccaaaaaaagagccctggcaaaaaattgccaagtcaatcctaagccaaaagaacaaagctggaggaggcatcatgctacctgacttcaaactatactacaaggctacagtaaccaaaacagcatggtactggtaccaaaacagcatggtactggtaccaaaacagagatatagatcaatggaacagaacagagccctcagaaataacgccgcatatctacaactatctgacatctttgacaaacctttgcttgagaaaaacaagcaatgggggaaaggattccctatttaataaatggtgctgtgaaaactggctagccatatgtagaaagctgaaactggatcccttccttgcaccttatacaaaaatcaattcaagatggattaaagatttaaacgttagacctaaaaccataaaaaccctagaagaaaacctagacattaccattcaggacataggcgtgggcaaggacttcatgtccaaaacaccaaaagcaatggcaacaaaagccaaaattgacaaatgggatctaattaaactaaagagcttctgcacatctgcacagcaaaagaaactaccatcagagtgaacaggcaacctacaacatgggggaaaattttcgcaacctactcatctgacaaagggctaatatccagaatctacaatgaactcaaacaaatttacaagaaaaaaaaaaaaacaaccccatcaaaaagtggacgaaggcacatgaacagacacttctcaaaagaagacatttatgcagccaaaaaacacatgaaaaaatgctcaccatcactggccatcagagaaatgccaatcaaagcctcaatgagataccgtctcacaccagttagaatggcaatcattaaaaagtcaggaaacaacagagacgttggcaatgtggttgaagccatgtatggggaccttcctcctccaattatgctgattggacatagcatgggtggtgctattgcagtccacacagcatcatccaacctggtaccaagcctcttgggtctgtgcatgattgatgttgtagaaggtacagctatggatgcacttaatagcatgcagaatttcttacggggtcgtcctaaaaccttcaagtctctggagaatgctattgaatggagaaatatcaaagatctatcttgggcagatagcatcaagaatgtagctgctgccagcttggcttgtatctcaggtgccctgcctgcttccgcagtaacaacaagcccagataataagaggatggccaggaatgtcttgaaatatgaaaggctcttggcagagagccccaaccacgtggtagctgaggctgtcatccagaggcccaatataccccacctgcagaccagagacacctacgaggggctatgtcagaccctgggttcccagcccactctctaccagatccctagcctctactgttcctatgagaccaattccaacgcctacctgctgctccagcccatccggaaggaggtcatccacctggagccctacattgctctctaccatgacttcgtcagtgactcagaggctcagaaaattagagaacttgcagaaccatgggaacagagctcctcaccagcaacggaacaaagctggatggagaatgactttgatgagttgagagaagaaggcttcagacgatcaaactactccgagctacaggaggaaattcgaaccaatggcaaagaagttaaaagctttgaaaaaaaattagacgaatggataactagaataaccaatgcagagaagtccttaaaggacctgatggagctgaaaaccaaggcacgagagctacgtgacgaatgcagaagcctcagtagccgatgcaatcaactggaagaaagggtatcagtgatggaagacgaaatgaatgaaacgaagcgaggagagaagtttagagaaaaaagaataaaaagaaatgagcaaagcctccaagaaatatgggactatgtgaaaagaccaaatctacgtctgattggtgtacctgaaagtgatggggagaatggaaccaagttggaaaacactctgcaggatattatccaggagaacttccccaatctagcaaggcaggccaaccatataaacagagccaaagacaaaacccacatgattatctcaatagatgcagaaaaagcctttgacaaaattcaacaactcttcatgctaaaaactctcaataaattaggtattgatgggacgtatttcaaaataataagagctatctatgacaaacccacagccaatatcatactgaatgggcaaaaactggaagcattccctttgaaaactggcacaagacagggatgccctctctcaccgctcctattcaacatagtgttggaagttctggccagggcaatcaggcaggagaaggaaataaagggtattcaattagcaaaagaggaagtcaaattgtccctgtttgcagacgacatgattgtttatctagaaaaccccatcgtctcagcccaaaatctccttaagctgataagcaacttcggcaaagtctcaggatacaaaatcaatgtacaaaaatcacaagcattcttatacaccaacaccagacaaacagagagccaaatcatgagtgaactcccattcacaattgcttcaaagagaataaaatacctaggaatccaacttacaagggatgtgaaggacctcttcaaggagaactacaaaccactgctcaaggaaataaaagaggacacaaacaaatggaagaacattccatgctcatgggtaggaagaatcaatatcgtgaaaatggccatactgcccaaggtaatttacagattcaatgccatccccatcaagctaccaatgactttcttcacagaattggaaaaaactactttaaagttcaaatggaaccaaaaaagagcctgcattgccaagtcaatcctaagccaaaagaacaaagctggaggcatcatgctacccgacttcaaactatactacaaggctacagtaatcaaaacagcatggtactggtaccaaaacagagatatagaccaatggaacagaacagagccctcagaaataatgccgcatatctacaactatctgatcttcgacaaacctgaccaaaacaagcaatggggaaaggattccctatttaataaatggtactgggaaaactgcctagccatatgtagaaagctgaaactagatcccttccttacaccttatacaaaaattaattcaagatggattaaagacttaaatgttagacttaaaaccataaaagccctagaagaaaacctaggcaataccattcaggacataggcatgggcaaggacttcatgtctaaaacaccaaaagcaatggcaacaaaagacaaaattgacaaatgggatctaattaaaccaaagagcttctgcacagcaaaagaaactaccatcagagtgaacaggcaacctacaaaatgggagaaaattttcgcaacctactcatctgacaaagggctaatatccagaaactacaatgaactcaaacaaatttacaagaaaaaaacaatcggccccatcaaaaagtgggcagaggatatgaacaggcacttctcaaaagaagacacttatgcagccaaaaaacacatgaaaaaatgctcatcatcactggccatcagagaaatgcaaatcaaaaccacaatgagataccatctcacaccagttagaatggtgatcattaaaaagtcaggaaacaacaggtgctggagaggatgtggagaaacaggaacactttcacactgttggtgggactgtaaactaatcaaccattgtggaatttttgagagattaaggaccgaagactggtggggactcataaatgatacaagtaaagtattagccacaacagaagaaaaaggggtgcccaaacgcataatcttgaaatttgatgtctgtgctgtcattaatagca

SEQ ID NO: 124557 - DNA, 501 bp, Homo sapiens
atgttcgccaaaaggaggcccagggcttcccggcatcaacagggacaccaggatttatttattctgcgaagtgatcttccgtcacaggtatttattcgctttatttttttggagcggcgtaaccggcgcacacgaaggacagagaaagcgcggatctgggaagggacggacagaacggtcaagacctggattggggaggcggttgccgccgctgctgctgacggtgtgacgttctctgttccggtcacaccacatacgttccgccattcctatgcgatgcacatgctggatgccggtataccgctgaaagttctgccaagcctgatgggacataaatccatcagctcaacgggagtgtacacgaaggtttttgcgcttgaggtggctgcccggcaccgggtgcaatttgcgatgccggaatctgatgccgttgccatgctgaacaattatcctgagaataaatgccttggcccttatatggaaatgccgcaactgagttga

SEQ ID NO: 124558 - DNA, 3678 bp, Homo sapiens
atgtgggcgttattcatgataagaaatgtgaaaaaacaaagacctgttaatctggacctacagaccatccggttccccatcacggcgatagcgtccattctccatcgcgtttccggtgtgatcacctttgttgcagtgggcatcctgctgtggcttctggagtacagactctcttacctgaagggttcgagcaagcttcgcgattatgggcagctcttgactctagagatcccggctgctctcttgcctatccataccggcattgttaaccagaatatcaactgtaccgaaacgctcacagcaagcagcgataatcttctgcggcgcgccttctgcggtgatacccacctgcatgaagtccacctcaacaccctgtttttcaatcatttcctttgtttcgccgttatctttgacgaaactaggaataaagatatttgcgccacgtctggccagcacgctcactttgtcgataagaaacgcaaacgcgaattgctgtcgcacatgattgggaaagggaactggcagcaggtgctggtgtttacccgtaccaaacacggcgctaaccatctggctgaacagctcaataaagatggcatccgtagtgcggcgatccacggcaataaatcgcaaggtgcgcgtactcgtgcgctggctgattttaaatcgggcgatattcgtgtactggtggcaactgacatcgctgcggcggcctggatattgaagagctgccgcacgtcgtcaactatgaactgccaaacgtacctgaagattatgtccaccgtatcgggcgtaccggtcgtgcggctgctaccggtgaagcgttgtcgctggtccgtagtttcttcgattggtgcgatgattgcgccgccgctggtggtatgggcaatcgtaatgcacagctggcagatggcatttatcatctccggtgcattgagctttatctgggcgatggcatggctgattttctataaacatccgcgcgaccagaagcatctgaccgatgaagaacgcgactatactattaatggtcaggaagcccagcaccaggtgagcacggcgaagaaaatgtccgttggtcagatcctgcgtaaccgtcagttctggggtatcgcgctgccggtgttcctggcagaaccggcctggggtacttttgacgcgtggatcccgctgttcatgtttaaagtttacggctttaacctgatagagatcgcgatgttcgcctggatgccgatgctgtttgctgacctcggttgtatcctcggtggttacctgccgccgctgttccagcgttggtttgatggtcgtaacgctgggtacagtgctgatgattgccccggtatgatcggcctgttcacaacccgtatgtcgccattatgccgcctttatcggtggtttttcccacaggcactgtctggctccctgaataccgtcttcccaatctggctgcgggtatttaccgtcgcgaagcatctccagagggcgggttattgtcatggcatctgtaccggcgaagggctggaaattgtcggacagggtgactgtgtcattgtgcagtgggatgcgaacagtaacggtatctgggatcgcgaaccggtaaaagagtccgaccagattggatttcgtctgaaggagcatgtgctggaaacgctacgcggtgcgacatcctgtgaaggtaagggctgggataaagtcactaatccggatgccatcattatcgacacttttcaggtcgtacgtcaggatgtcagcggcttctcgccggtgttgacggttaatatgcgtgctgccagaatgagccaacaggatcgcagttttgcctctcgcgtgagcatggaaagtcagtcattgcgccgccaggccatcgttcagtcggcgctggcgtggggaaaaatgcactgctggcagacgcagccagcagttcagtgctcgcagtacgctgaaaccgatgcccagtccgcgttcttgcgccagtatcgggctttatcacaactacccgcatgcattgcaccgaagccgcatttatatctccgtgactggatggtagtcgactatctgcccggcgcggtaataacgtatttgccggataccaacgaactggcaggcttgctgtattatctacatcaacaaccacgttttggctggcgaataacgcctgtttccgttactggaactgtactggcagcaaagcaatccggcgcggcggacatgggttggctgcgaatgtttagacgtctgcgcaaatcgggcaagccacggcctttacccttaagtccattgcatatggatgtccacgccggaaatttagtgcatagcgcgtcagggctaaaactcatcgactgggagtatgccggagatggggatatcgcgctggaatctggcggcggtggtggtttgagtaccgctggcgacaaaccggcgatcgacaatttatcaggctggccgatgacagctggcggcagctacaataggagcaataaggagagcagtgtgggtccagtaatgttggatgtcgaaggttacgaactggacgcggaagcgcgtgaaatactggcgcatccgctggtgggagggctgagtctctttacgcgtaaccatcatgatcctgccccaggtccgtggttaattcctgatgatgcaaagttacatcgcaaactgttgcgctggtacagctcggtgcaaacaggtatggcggaactcattcctgtcgctcaacagtggcaaacggaagaaccagaaagcgaagatgcccgggcggtgatggctatcgccggagccacaacggctgcgatgacggtcgcgggattcagcctgccgattgttttgttaagcgccctgggcaccggcatcctggcgggattgtggaacggcatactgatcgtcacgtttaactcgccggatctctcatggttcggcagtggatcgctgttgttcctgccaacgccggtcattatcgcggtgctgacgcttatcctgttctggctgttgacccgcaaaacggcgctggggatgtttatcgaagccgttggtatcaacattcgggcggcaaaaaatgccggggtaaacacgcgaatcatcgtcatgctcacttatgtgttgagcgggctgtgtgcggcgattgcgggcattatcgtggcggcggatattcgcggtgccgatgccaacaacgctgggttatggctggagctggacgccattctcgcggtggtgattggcggcggatcgctgatgggcgggcgctttaacctgctactttcggtggtgggggcgctgattattcaggggatgaacaccggaattttgctttcgggctttccgccagagatgaaccaggtggtgaaagcggtggtggtgctttgcgtgctgattgttcagtcgcaacgctttatcagtctgattaaaggagtacgtagccgtgataaaacgcctggtttctggtgcttatatcgctttgatccgcgtcgtgccgatgaaggcaaactgccgctggccttggattcacgcccgccgtcagaagcaccggaagaaacgttacttcacgagcaacgtttccgtcggctgaattcgcagcagccagaagtggcagaacagttatggaaagatgctgcagctgatttgcaaaaacgctatgacttcctggcacaaatggccggaaaagcggaaaaaagcaacaccgattaa

SEQ ID NO: 124559 - DNA, 2862 bp, Homo sapiens
atgtctttcgattctttgggtttaagccctgatatcctgcgcgccgttgccgagcagggttaccgtgaacccacccctattcagcagcaggcgatccctgcggtgctggaaggccgcgacctgatggctagcgcccagaccggcaccggcaaaacagcgggctttacgctgccgctgttgcaacacctgatcactcgccagccgcacgccaaagggcgtcgtccggtacgtgcgctcattcttaccccgacccgtgaactggcggcgcagattggcgaaaacgtccgtgattacagcaaatacctgaacattcgttcgctggtggtgtttggtggtgtgagtattaacccgcagatgatgaaactggcgtggcggcgttgatgtgctggtggcaaccccgggacgtttgctggacctggaacatcagaatgcagtgaagctggatcaggttgaaatcctcgtcctcgatgaagctgaccgcatgctcgacatgggctttatccacgatatccgtcgcgtgttaacaaaactacctgcgaagcgccagaacctgttattctccgcgaccttctctgacgatattaaagccctggcggaaaaactgttgcacaacccgctggaaatcgaagtggcacgccgcaataccgcgtctgatcaggtgacccagcacgttcactttgtcgataagaaacgcaaacgcgaattgctgtcgcacatgattgggaaagggatactggcagcaggtgctggtgtttacccgtaccaaacacggcgctaaccatctggctgaacagctcaataaagatggcatccgtagagcggcgaaacacggaaataaatgcaagtgcgcgtactccaagttccagaaaccgtcaccccacattttcaccatgctgatcggcgtttgtggtgttaaccaaagcgcgatcacgaatgttagcaatgtcagcaacatggcaaagatcagtggatcgggaagccaccggctgacaaaacgcgtcataaaacgcgatatgcgaccaatcataaatcaccccgttgcgtattcagatcggcggcgacttcaaaccgagcttctgttttggcacgcacggtggctaaatcacacccgtcggcaatttcgaattaaagagggcgataacggcggccagtgcttcctcttcctgtggaccggtcgcttcaacttcaatctgccgtcctttggcagaatccaacatcagcagcgcaataacgctgttggcttcagcctcggtgccttcgtcattaccttcattgcaggccgggcatgcatgcccagcttgtttgtgatttcaacagtttgcttgacggtcatggtttacgtttttccagcgtacgatggcgtgactggacgtttttaccgcgcgagcggaagtagtctgccagttgctctgcaatatacaccgaacggtgcttcccgccggtacaaccaatggcgaccgtcaaggatgttgtcgtccctgaaaaagcaaaaatggagaaaaggaatgagtgaatcattacatctgacccgcaatggatcaattctggaaattacccttgatcgtccaaaagcgaatgctattgatgcaaaaaccagctttgaaatgggcgaagtatttctaaatttccgtgacgatccgcaattacgtgtcgccattattaccggtgccggagagaagttcttttccgcgggctgggatttaaaagcggcagcagaaggcgaagcaccggatgctgactttggtccgggtggttttgcgggattaaccgaaattttcaatctcgacaaaccggttatcgcagctgtgaacggctatgcctttggcggcggctttgaactggcgctggcggcagattttattgtttgtgccgataacgccagcttcgccctgccggaagccaaactgggcatcgttcctgacagcggcggtgtgctgcgtctgccgaagatcctgccgcctgccatcgtcaatgaaatggtgatgaccggcagacgaatgggcgcagaagaggcgctgcgttgggggatagtcaaccgcgtggttagccaggcggaactgatggataacgcccgcgaactggctcagcagctggttaacagcgccccgctggcgattgcggcgctgaaagagatctaccggactagccaacgacctgccggtagacagaagcgtatcgctatattcgcagcggcgtgttgaaacactatccatcggttctgcattcggaagatgccattgaagggccgctggcgtttgccgagaagcgcgatccggtgtggaaaggacgttaacaaccgtgagctattacgcctttgaggggttaattccggtggttcacccgacggcgtttgtccatcccagtgccgtcttgattggcgatgtgattgtgggagccggtgtttacatcggcccactcgcctcactgcgtggtgaatacgggcggttgatcgtgcaagcgggagccaatattcaggatggctgcactacgcatggctactgcgacactgacactatcgttggggaaaacggccatatcgggcacggagcgatcctgcatggttgtttgattggtcgcgatgcattggtcgggatgaacagcgtgattatggatggcgcggtcattggcgaagagagcattgttgccgccatgagctttgtcaaagcgggctttcgcggcgagaaacgccagttgttgatgggtacgccagcccgcgctgtacgcaatgttagtgacgacgagttacactggaaacggttgaataccaaagagtatcaaggatcttgtcgggcgcttgcatgtatcggttacatgaaaaggaagcactgaggcaattggaggaaaaatcgccccccgtttgcc

SEQ ID NO: 124560 - DNA, 290 bp, Homo sapiens
atgtgcgagaaaaatcttgcctacgcgcacaaggtgaaggccgcactggaaaaaggcgcatcgccgggcgacttcccgcgcgaggactatgaaacaaactgggaaggkacgctttacgcttgccgacctcaacattcacggtaagcgagcgttgggcatggatgtttgagaattaatggaagtgaattgatgtgggattaagaaaatcgattcgacgttactcagattgctgacaaatgcgctttgttaatgcctgatgcggcgttaacgccttatccggcctacaaagt

SEQ ID NO: 124561 - DNA, 3861 bp, Homo sapiens
atgatgaccccggtcacttttgaacccgctaccctgcggcgcgccttgacgaccgttatttgcgaccctcatgaaatcgtcaacgtgatgggcgaagccggattcgcctggtttgcccgctgtgccgaacaggcaaggcaaaaccagtacttacaggtcagctcttgcgtacccgccctggaaggctgcgatgttaacggtgccagttttacccttgaacagatgctcgcctggcgggaccatccgcaggttaccggccttgcagaaatgatggactaccctggcgtaattagcgggcagaatgcgctgctcgataaactggatgcatttcgccacctgacgctggacggtcactgcccgggtttgggtggtaaagaacttaacgcctatattactgcgggtattgaaaactgccacgaaagttatcagctggaagaaggacgccggaaattacaactcggcatgtcgttgatgatccgcgaagggtccgctgcccgcaatctcaacgcgctggcaccgttgatcaacgaatttaacagcccgcaatgcatgctctgtaccgatgaccgtaacccgtgggagatcgcccatgaaggacacatcgatgccttaattcgccgcctgatcgaacaacacaatgtgccgctgcatgtggcatatcgcgtcgccagctggtcgacggcgcgccactttggtctgaatcacctcggcttactggcacccggcaagcaggccgatatcgtcctgttgagcgatgcgcgtaaggtcacggtgcagcaggtactggtgaaaggcgagccgattgatgcgcaaaccttacaggcggaagagtcggcgagactggcacaatccgctccgccatatggcaacaccattgcccgccagccagtttccgccagcgactttgccctgcaatttacgcccggaaaacgctatcgggtcattgacgtcatccataacgaattgattacgcactcccactccagcgtctacagcgaaaatggttttgatcgcgatgatgtgagctttattgccgtacttgagcgttacgggccacggctggctccggcttgtggtttgcttggcggctttggactgaatgaagtccccggcagctgctgccagaactgctccgtgctaaataaaagttgcgaccaggaccgttcatcactggcattaagcgccgcccgggttagcggtattcccattgccatcacccagcgaacctgcgttcagcagttctgccaggctggcagatgcgtcttctgcagtcacctgcggtgcagccggagcttcacccgcagcacggcgacgcatacgatcctggtggtacgcgtaaccggtacctgccgggatcagacgacccacgataacgttctctttcaggccgcgcagttcgtcgcgtttgcccgcaacggctgcttcggtcagcacgcgagtggtctcctggaacgatgccgcggagatgaaggactcggttgccagagacgctttggtgatacccagcagatcgcgggagtaagttgcacccactttgccgttcgcttccagttcgcggtttgcgatcttgacgcgagagtattcaacctgttcgccttccaggaagtcggagctacccgcgttaacgatggtagctttacgcagcatctgacgaacgataacttcgatgtgtttatcgttaatcttaacgccctgcagacggtatacgtcctgtacttcgttaacgatgtaacgagtaacagcatgaacaccacgcagacgcagaatgtcgtgcggcgcttccggaccgtcggaaattacgtcaccacgttctacacgttcaccttcgaacacgttgagctgacgccatttcggaatcatctcttcgtacggatcgctaccgtctaccggggtgataaccagacgacgtttacctttggtttctttaccgaaggaaacgataccgctgatttcagccaggattgccggctctttcggacgacgtgcttcgaacaggtccgcaacgcgcggcagaccaccggtgatgtccttggtaccgccggattcctgcggaaacgcgccagggtgtcaccagacattgcttcacccgacgtggtggagttctctgctttttaccactgtcccctgtgctgcttgttttgtgtgagtgtgctaacgtttatcttctttaagcccctggtagaagcaatgaagacgtttttcagaacagtgttattcggcagcctgatggccgtctgcgcaaacagttacgcgctcagcgagtctgaagccgaagatatggccgatttaacggcagtttttgtctttctgaagaacgattgtggttaccagaacttacctaacgggcaaattcgtcgcgcactggtctttttcgctcagcaaaaccagtgggacctcagtaattacgacaccttcgacatgaaagccctcgaaatattgaccgtgcatccgcggtcaatgttagctattatgttgcgccctttttttacgggtgttaacaaaggaggtatcaacccatggccgaaaaaaaacagtggcatgaaacgctacacgaccagtttgggcagtactttgcgtagatacgttcggtccaggctactctatgtgtatgggagaacagccagaataggccgattaacgtggtggggcaaagacgcctgttatcggggaacggccggtaaggtgtgtgccgggaacaaaatcccagggcttaaattcccgcatggtcaaaagaactgcgcgcaatgctgccggattgctgaaagcgatccttttggtcatgagcttggggctttacacggtgccagcgcccagcgtatcggtcgttttgaactggcggataaaagctccctgttcctcgacgaagtgggcgatatgccactggagttacagccgaagttgctgcgtgtattgcaggaacaggagtttgaacgtctcggcagcaacaaaatcattcagacggacgtgcgtctaatcgccgcgactaaccgcgatctgaaaaaaatggtcgccgaccgtgagttccgtagcgatctctattaccgcctgaacgtattcccgattcacctgccgccactacgcgagcgtccggaagatattccgctgctggcgaaagcctttaccttcaaaattgcccgtcgtctggggcgcaatatcgacagcattcctgccgagacgctgcgcaccttgagcaacatggagtggccgggtaacgtacgcgaactggaaaacgtcattgagcgcgcggtattgctaacacgcggtaacgtgctgcagctgtcattgccagatattgttttaccggaacctgaaacgccgcctgccgcaacggttgtcgccctggagggcgaagatgaatatcagttgattgtgcgcgtgctgaaagaaaccaacggcgtggctggtaacagtgcaccggacactgcttacaggctggtttctcttcgccgaacacacatttatccagccgcttttgcgcgtaaacaaacaacgcctcgtaatgctccgctccgctacgcctgcggtaccgacttgacgtgcgcgtatgttatcggcgggatgaagcgccgtttaatgattgcccgtgcgttaatgcatgaacctaaactactgattctcgacgaaccgaccgcaggcgtggatattgaacttcgccgctcaatgtggggctttttgaaggatttaaacgacaaaggcaccaccatcattctcaccacacactacctggaagaagcagaaatgctgtgccgcaatatcggcattattcaacacggtgagctggtggaaaatacctcgatgaaggcgctgctggcgaagctgaaatcggaaacctttattctcgatctcgcacgcggaatatag

SEQ ID NO: 124562 - DNA, 7410 bp, Homo sapiens
atgccgcatccgggctgcaaaaccaatgggctgacgacttaccccaactgcttacgcgcattgcggaaaatgcgcatccatgggccatcctcgccccagttttccggatgccaggagttgctgacagtacggaaaacacgttccgggtgcggcatcataatggtgactcgaccactttcagtcgtgactgccgtaataccgttcggtgaaccgttcgggttagccggtgactttgccgaagttatcgacatagcgcagtgccaccagccctttgctttccagtgccgccagatgcgccgcatcacgcacttccacgcgcccttcaccatgagagacagcaatcggcatttgcgagcccaacatcccctgcaacagcagagacgggctttgggttacttcaaccaggctgaaacgcgcttcaaagcgatcggaggtattgcgcacaaaacgtggccacaactcactacctgggatcagttcacgcagattagacatcatctggcaaccgttacatacccccagcgccagcgtttgcggacggtggaagaaggttgcaaactcatcgcgtacacgcacatcaccgtaggagaaaccaccgcacgcgaccagggcgtggaaatcttccaggcccgtgcgtccggtcagcaggtcactcatatgcacgtcgatagcatcaaagcctgcacggtggaaagctgccgccatttcaacatgcgagttcacgccctgctcacgcagtacggcaactttcggacgtgcgccagtggcaatatacggtgctgccacatcttcgttgatatcgaacgacagttttacattcaggcccggatcggcgtcgttagatttcgcctgatgctcctgatcggcacactccgggttgtcacgcaggcgctgcatctgccaggtagtttctgcccaccagacacgcaacgtggtgcggctttcgctgaatacagtctgcccgttggcggtaatcacaaaacggtcaccggaaaccgcctgccctacataatggacacaatcagcaagcccatgctgtgccagtacggactcgaccgcttcacggtcagcggcacgaacctgaatcaccgcacccagttcttcgttaaacaacgccgccaggcgatcgtcacccagagtggcgatatccgcgtcaatgccacaatgaccagcaaaggccatttccgccagcgttaccagcaggccgccatcagagcggtcgtgatacgccagcagcttacgctgtgcaaccagcgcctgaatcgcgtcatagaagcctttcagttgcgcgacatcgcgtacatctgccggtttgtcgccaagctgacgataaacctgcgccagcgccgttgcgcccagcgcgttattgcctttgcccaaatcaatcagcagcagtgcgtatcttcggtagaaagctgcggcgtgatggcgtcagcggagccggagcattacgaggcgttgtttgtttacgcgcaaaagcggctggataaatgtgtgttcggcgaagagaaaccagcctacgctcggtaccgagctgatctgaccggggagaagatacgccccaacacatcgtccacttccgccagcggctggcagagattttcccaggtgtacggtgccccttgcgctactacgcgctccacgttttcgcggcagtcgttcaatgccttagtcacggctggaacgacatgttccgggagaattttagaaaacggaggcaattcaaagggagtcagtaacggattcgtcattcgcgcagtcctggttaaagagagcctgatcatcgagtcgctgaaagagaaagataaaccgtttctctatctcgacacccacgcaggggccgggcgttatcagttaggcagcgaacatgccgagcgtaccggcgaatatctcgaaggcatcgcccgtatctggcagcaggacgatttgcccgcagaactggaggcgtacatcaatgtggtaaaacacttcaaccgtagcggtcagttgcgttactaccccggttcgccgttgattgctcgcctgctactgcgtgaacaggacagcctgcaactgaccgaactgcacccgagcgattacccgttgttgcgttctgaatttcagaaagatagccgtgcgcgtgtcgaaaaagccgacggtttccagcagcttaaggccaaactgccgccggtttcccgccgtggtttaatccttatcgacccgccgtatgacatgaaaactgactatcaagcggtggtcagcgggatagcagaaggttacaaacgtttcgccactggtatttacgcactgtggtatccggtggtgctgcgtcagcaaattaagcgcatgatccacgatctggaagcgaccggtattcgcaaaattctgcaaattgaactggcggtactgccagacagcgatcgccgtggcatgaccgcttccggcatgattgtgattaacccgccgtggaaactggaacaacagatgaataacgtgctgccgtggctgcacagcaaactggttccggcaggcaccgggcacgccaccctggatcgtgccggagtaattgcagccattgctggcacctattacgtctcgcgctacaatcgcggacactttgtcatgactaaacactatgattacatcgccatcggcggcggcagcggcggtatcgcctccatcaaccgcgcggctatgtacggccagaaatgtgcgctgattgaagccaaagagctgggcggcacctgcgtaaatgttggctgtgtgccgaaaaaagtgatgtggcacgcggcgcaaatccgtgaagcgatccatatgtacggcccggattatggttttgataccactatcaataaattcaactgggaaacgttgatcgccagccgtaccgcctatatcgaccgtattcatacttcctatgaaaacgtgctcggtaaaaataacgttgatgtaatcaaaggctttgcccgcttcgttgatgccaaaacgctggagtgcgatcccttttatatattttctgcattgttattctttattccattcgccttaatgatggctgaaatgggagctgcttatcgcaaagaagaaggcggtatctattcctggatgaataatagtgtcggaccacgttttgccttcattggtacgtttatgtggttttcctcttatatcatctggatggtgagtacctccgcgaaagtttgggtaccgttctcaacattcctctatggtagcgacatgacccagcactggcgtattgccggactggagcctacgcaggtggttggtctgctggctgtggcatggatgattctggtcaccgtcgttgcttctaaggggattaataaaattgcccgcattactgcggtgggcggtattgcagtaatgtgtctgaatttagtattgctgttagtaagcattactattttgttattaaatggtgggcatttcgcgcaggatattaatttccttgcatcaccgaacccgggttatcagtccggtctggcaatgctatcgtttgtggtatttgccatttttgcctatggcggaattgaagcggttggtggtctggtcgataaaacggaaaatccagaaaagaactttgccaaaggtattgtttttgccgctattgttatttcaatcggttattcgctggcaatatttttatggggcgtcagcacaaactggcagcaggtattaagtaatggttccgttaacctcggcaatattacctatgtgctgatgaagagccttgggatgacgctgggtaatgcactgcatttgtcacctgaagcgtcattgtcgctgggcgtatggtttgcgcgtattactggactttcgatgttcctcgcctataccggtgcgttctttacgctttgctattcaccgttgaaagccatcatccaggggacgccgaaagcattgtggccggaaccgatgacgcgcctgaatgcgatggggatgccgtctatcgccatgtggatgcagtgcgggttggttactgtcttcatcctgctggtttcgtttggtggcggtaccgcatcggcgttctttaacaagctgacgctgatggcgaacgtgtctatgacgcttccttacctgttcctcgcgctggctttcccgttctttaaagcacgtcaggatctcgacagaccgtttgtgattttcaaaacgcatttgtcggcaatgattgcgacagtggttgtcgtactggtggtgacatttgcgaacgtcttcaccatcattcaacctgtggttgaagccggagactgggatatggtatcagctcggtacctgcaacatatcgtcgtgcggcacttctcctttcaacgcgtgagagttgaaatcgcagtacgggcatttctgcacgcaccacgggatgtgaatgtagagactcagcggagcgtccagcagcagtttcaacgcctgaccacggtgggaaatggcgctcttttcttcgcgggtcagttcggcggcggttttcccttcggaaggtacgaagaagattggatcataaccaaagccaccagtgcccgctggttcacgagtaatcacgcccggccagctaccgtggcataccagcggagtgggatcttccgcgtgacgcagatataccagcacgcagtggaaacgcgcctgacgttggtcgtccggtacgtctttcattgtttccagcagtttttgcagattcttttgatcggtcgcgtcttcaccggaataacgcgcggagtaaatgcccggcgcgccgccaagcacatctaccgccagaccagagtcgtcggcaattgccggactggtgaaggcgtggacgtgctgcgtaaccatctcaaacagagcatgggctttgacaccaacatggaaggcggcttcctggcgcgtcgtcgccacctacaggcgctggaacaggcagcggaacatctacaacagggcaaagcgcaactgttgggagcctgggcaggtgaactgctggcggaagagttgcgtctggcacagcagaacttaagcgaaatcaccggggaatttacttcagacgacctgctggggcggattttctccagcttctgtattgaggcaattattaaatccggtatgaacccgttcctgctggatagcgaagatgtttttatcgatttactgaccgacagcggcaccggggcggtgacgcagagcatgcaggctgcgatgatgcgcggcgacgaagcctacagcggcagtcagacgaacaatgacaacgcggcgcatgagctggaaagtcaggccgctacttcagttactaatggcgcacatatttatcctttcaaaacttctcacataggcgagctggctaccgtgaatcctggaaccgatctcaccgtcgttgatgccagtggcaaacagccgatcgttctgttgcagggttatcaaatgcagggcagtgaaaacacgctctacctggcggcaggtcaacggctggcgctagccacattaagtgaagaaggtatcaaggcgctcactgtaaacggggaatggcaggctgacgaatacggcaatcaatggcgtcaggcgtctttacagggtgcgcttaccgatcccgcattagcggaccgtaaaccgctatggcaatacgctgaaaaacttgacgatacctattgcgctggttgtcatgcccctattgccgccgaccattacaccgtcaatgcgtggccgtccattgccaaaggaatgggggcacgaaccagcatgagcgaaaacgaactggacattttaacgcggtatttccagtacaacgccaaagatattaccgagaaacacggtattgccgctggagcgctggtggtgacatcggcagcaccgctccccgcatgggcagaagagaagggcggtaaaatcctcaccgcgggacgttggggagcgatgaacgtagaagtgaaggacggcaagattgtttcttcaacaggcgcgctggcgaaaaccataccgaattccttacagtctacggcggcggatcaggtacacaccacggcgcgtattcagcatccgatggtgagaaaaagctatctcgataatccactgcaaccggcgaaaggtcgtggcgaagatacctatgtacaggtgagctgggaacaggcattaaaactgattcatgagcaacatgatcgtattcgtaaagctaacggaccatcggccatttttgccggatcttacggctggcgctcttctggcgtgttgcataaagcgcaaaccttactgcaacgttatatgaacctggcgggcggttattccgggcatagcggcgattattcaaccggggcagcacaggtgatcatgccgcatgtggtcggttctgtagaggtgtatgaacagcagacctcctggccgctgattctggaaaacagccaggttgtggtgctgtggggaatgaacccgctgaataccttaaaaattgcctggagcagtaccgatgagcaagggctggaatacttccatcagctgaaaaaatctggcaaaccagtgattgccattgatcctatccgctccgaaaccatcgaattctttgacgataatgccacctggatcgcgccgaatatgggcaccgacgtggcactgatgttagggattgcgcataccctgatgacacaaggcaaacacgataaagtgttccttgaaaaatacactaccgggtatccgcagtttgaagagtatctgacaggtaagagcgataatacgccgaagagcgcggtctgggcggcggaaattactggcgtaccggaagcgcagatagtcaaactcgctgaactgatggcggcgaatcgcacaatgctgatggcaggctggggaattcagcgccagcaatatggtgaacagaaacacgcgggattcatacagcggccagccatccgtcatccatatcaccacgtcaaaggtgcgttcaccgaatacgtgcgcaacaaccgtcttccggagactgtcatacgcgtaaaacagccagcgctggcgcgatttagccccgacatagccccactgttcgtccatttccgcgcagacgatgacgtcactgcccggctcccggatgtttcacgtacctatgtcgaatatctggccgataaggttgcggatcgagaagaggatgcagaggaatatctggaagcaatcatggaggctcgtgttaccgttgctggcatggggctggtgatggaggtgcaggattacttcgatggcgaggccgatagactggcgaaggcgtggctggccgagtacacaccgcaaatcaagtcgttgaaagatgagcgtaaagaggcctatcgtcaaatcgtcgaaatgagtaccgaaccgcaggatgtggatctgcgctttatcgagacggggataaataacaaaatggcgataatcgctcagccccagctcttctgcgctggtgccgatattgtctgcgagtgcgctggtactcaataa

SEQ ID NO: 124563 - DNA, 1136 bp, Homo sapiens
ctagtgtggtcctgctccttgtgactgctgtgtctgtgtggtgctgtgtgttcgccccgtgtagtgccctgtggtgtaccgcttctgccctgtcaagccatgtgtcgtaagctgcgtttgttgttgctgcgccactgtgtatatgctaccgctgatgactgaacctataggaggtggttcgtacaactcacatttgaggcaggcaccagtccatgtcttggtgttcatccacaacttcttctcgctcatgaatatggttccaaccaaccacccgtaaacataaatatgacagccactgccggaaggtcgctggcacacctgtggcacaacgatgaactcgacggtagtcgctggcataaacacagcacggcttcctgagtctgcccgtttatgtgcgtgataacactctacgggcgctgggcaacaacgatcaacgtcccgattacgtgtggcacgaaggacggcattccacctcttcaattttaaaagcagcacgtactggcaacacgattactgcgattgatgcgagcgaggccaacaactggacactgtgcctgcgcaatggtgtgaaagtaaatggtctgcaagacggttcgcaggctgaaagtgagcaggggctggtggtgaagcctcaagggaatgcgctgacaattacgttgtaatctattgatggaatgccgggtacgtctgagtcgtacccggcgagattgatgtttaccgcaccggctgcgtcgatgtaacttcaccttacaaccatcgtatagcgccgattttattgacgggacgggaggtagcaatgctaactggtataggtggttctgtggagtaatattaaagcgggtagtaccgaaacccagacagcggcactgccatcgtatagcgccgattttggagcggttggaatagaacattaaggaatagaaagggacgagaaggaggaaaagaggggacccacgtgataatgacatgcggattgcgggggacaaccccagaacactatgagcgggcttggacgaacttaggcctgaggatattctcaatgcccgcgaagttttgttactggtgactggcgaaggaagcaggatgcgacagatcgttttctcacggctaaagtctctaccgctatccggcttcat

SEQ ID NO: 124564 - DNA, 510 bp, Homo sapiens
tcaagttccacttcatgtcgccttttccagcacattctatggttcaagccttggagtgactgtatgctctgggaggtctggacaaagactgtcgcctaactgaaccgcttggcatgagaatagcagagtttcctttgaatcccatgtttgccaaaatgctgcttgaatcaggaaacttcggctgttctcaggaaattctaagcatcgctgccatgatgcagatccagaatatctttgtggtccccccaaaccataagtctcacgcaattcgagtgcaccgtaaatttgctgtggaggagggcgaccacctcactatgctcaatatatatgaagcatttatcaaacacaataaggactctaaatggtgtcaggaacatttcctgaattacaagggtcttgtcagagctgcgactgtaagagaacaattgaaaaagcttcttgtcaagtttcaagtgcccaggaagtctagtgaaggtgacccggatctggttctgaggtgcattgtctccc

SEQ ID NO: 124565 - DNA, 2901 bp, Homo sapiens
  misc_feature (1)...(2901): n = a,t,c or g
atgatctggggccgggcgtggtggctcacacctgtaatcccagcactttgggcggccaaagttgcagggagagtagctgaagaaaggggtgcagtgctgggccacgaggtgggctactgcatccgctttgatgactgcaccgaccagctggccacgagaattaagaggctcactgagagcttctctttgattcttagtgtcatcatgctggatgaagcccacgagaggaccttgtacactgacattgccattggcttgctaaaaaagattcagaaaaagcgaggggatcttcgattgattgtagcttcagccactctggatgcagacgaagaggtagaaactgttgtgtcgatgctcatcgagcaggctcgagcactagctcgcactgggatgaagagacacctccgagttctccccatgtatgcaggactgccttcctttgagcaaatgaaagtgtttgaaagggtgtcacgcagtgtcagaaaggtgatagtggccaccaatgtggcagaaacctctatcacaatcagcggcattgtgtatgtgatcgactgtggctttgtgaaactccgagcctacaatcccaggacagctattgaatgcttggtggtggtgccagtctcccaggcatcagctaatcagcgagcaggacgtggtggtcgtagtcgctcgggaaaatgttatcgcctttatacagaggaagcctttgacaagttgcctcagtctacggttcctgagatgcagcgtagtaatttggcacctgtcatcctgcagctgaaagcactaggaattgacaatgtcctcaggttccacttcatgtcgccccctccagcacagtcgatggttcaagccttggagttactgtatgctcttgggaggtctggacaaagactgtcgcctaactgaaccgcttggcatgagaattgcagagtttcctttgaatcccatgtttgccaaaatgctgcttgaatcaggaaacttcggctgttctcaggaaattctaagcatcgctgccatgatgcagatccagaatatctttgtggtccccccaaaccagaagtctcacgcaattcgagtgcaccgtaaatttgctgtggaggagggcgaccacctcactatgctcaatatatatgaagcatttatcaaagtaagcacaactactgctcgaagtgccgcctcaacacaccaccctctggagcacaataaggactctaaatggtgtcaggaacatttcctgaattacaagggtcttgtcagagctgcgactgtaagagaacaattgaaaaagcttcttgtcaagtttcaagtgcccaggaagtctagtgaaggtgacccggatctggttctgaggtgcattgtctccggcttcgttcgccaatgcagcgaggtttcattctactggagcttataggaccatccgtgatgaccatgagctgcacatacaccctgcgtcagtcctctatgcagagaagccgcctcgctgggtcatctataacgaagttattacagacctccaagtactacatgagagatgtgactgccattgaatcggcctgggctgttgggagctggctccacactttttattcaacaagggaacgcacctgttctctggaaagccaaaaggggccaaggtccagggacccgttgaggagggagcccacagtttacagttgcagggactgctggcgtcctctcctccatgctgctgcccctggtcccaggtggggtgagctggcaccagctcctgtggaatgtttggttgctctgaagtgggctgcggcctgttcattagtcctttcttcccgctgcccacagcatttgcatccttgctgggatcctggaggactttgtgcatgggcaggcatccttctgtgctgcagcgggcagagtgggagttggctcactcagcacgctcactaacccagcatgccacttccagcaggcatgcagtcctggcccagctctatgggaaacaaggaggaaagttagccactgaaggccaaaacaccatgtggggtggacagagggtttgctgggctggctttgctttccctgctggggccacagctgtgttaaccaatgaggtcttgctgccaggtgtgaacaagcatgtctctacgaatttgaacgaaacattggggatttctcctgccgaaaccaccaaagggcactgtctgaattgggcacaaggtgtctcccaaacccagtgnagcttctgtctggtcctcagcccctcgctccctgtttatctgcaagccgaggagacttgcaagggattggtgattgacagagaggactcgtgcgctgttttgtgttagcagaggatttgtgtttcacaggtaggcttagcgtcctctcagagtgtagtgccaggtcctgggtgccacgcctagctgagcacttcaggagagttcatcaagctcagatcccacaagggcctcctcttttagcaggaattcacaaacagtttggaagccccctaaacttctgtaagccccaggaaacatccactggtgtaaattgtttttttgtttgtttgccttgggttccttgccaaagaagccgccgtggggacagttccttcccagcaggccactggttttgtntgcccccagggcctgctttgcctgtgatgatgattgcatttcaacacatgcccagatgcagattttttccccccttactgtttccaatgacctttattttaaaaacacatagcttgaaaatttatttttatactgatattagtttggatgtgcccacttttggcaccaaacgtgtatgcccgtttttatttccattttataaacatgtaaataatagtgataacttgttaataatagtaaacctttatacctaaagtaaatgtcttccctcccacaaaaaaaacaaaaaaaa

SEQ ID NO: 124566 - DNA, 414 bp, Homo sapiens
caggaacttgtcccttctacctctgcccaccagaaacctgggtatctagacccttcctcctaacctccaaccgaggcaatgacctcctgctgaagctcctgcagcatcggtatccccgggtgatggcagaggagggtcttcgagtggtgaggcagtggttggaggcctcctcacagctggaggaagcctcaatttatagccgatgggaggtggaagaggactggtgtctgtctgtcctccgctcctaccaggcagaacacgggcccgacttcccctggagcgtgggggaggacatgagtgcagatggacggcggcagctggctttgtttctggctcggaagcatctgcacaactttgaaggcacttactggaacccaattcccaagcccaaaactttcaaaaggccctggcacc

SEQ ID NO: 124567 - DNA, 1445 bp, Homo sapiens
gggggcccttcccgccggggtgtggccctgcttcgcccagagcccctgcaccgggggacagcagacaccctcctcaaccgggttaagaagctgccttgtcagatcaccagctacctggtggcgcacaccctagggcgccggatgctgtatccaggctctgtgtacctgctgcagaaggccctcatgcctgtgctgctgcagggccaggcccgactggtggaagagtgtaatgggcgccgggcaaagctgctggcctgtgatggcaatgagattgacaccatgtttgtggaccggcgggggacagctgagccccagggacagaagctggtgatctgctgtgaggggaatgctgggttttatgaggtgggctgcgtctccacgcccctggaagctggatattcagtcctgggctggaatcatccaggctttgctggaagcacgggggtgccattcccgcagaatgaggctaatgccatggatgtggtggtccagtttgccatccaccgcctgggcttccagccccaggacatcatcatctacgcctggtccatcggcggcttcactgccacgtgggcagccatgtcctacccagatgttagtgccatgatcctggatgcctcctttgatgacctggtgcccttggccttgaaggtcatgccagacagctggagtgagtgcagctcccaggcctgcccttcctgggaaggggtgggctggaactgggaactgttctgagatggctcccttttcttgggtggggagtaagtcgccccattgttggaagcaggaggactcctttgtctgggggcctcagttttctttctccgtgaatagtgaggacctttatgttgggcaagggctttgtctctgccatcccttcacctttatcccactctagggggcctggtgaccaggaccgtgaggcagcatctcaatctaaacaacgcggaagcttgtgcagataccagggtcctgtactgctgatccggagaaccaaggatgagatcatcaccaccacgtgagtgcgtgcgtgggaatctcggccctcaggaaccccagagatggccaggaacttgtcccttctacctctgcccaccagaaacctgggtatctagacccttcctcctaacctccagcccctccagggtacattcttcttcacccccagggttcctgaggacatcatgtccaaccgaggcaatgacctcctgctgaagctcctgccagcatcggtgagagccagggtgtgtgcgcgctgggggcagtgtacacacacagatactgataccagcacagggaaggagggaggaaggttcagggatggtgaatgaaaaaaaatcagccctgacctgtcctggcacttcctccgtagtatccccgggtgatggcagaggagggtcttcgagtggtgaggcagtggttggaggcctctcacagctggagga

SEQ ID NO: 124568 - DNA, 1598 bp, Homo sapiens
atgggcacctccagcatcttcctctgcgtgctgttcctctgtggggcactgggtctcaccatgtcccctgcccggggaaggctccgctgctacatctgtggcttcaccaaaccctgccaccctgttcccaccgagtgtcgggacgatgaagcttgtggcatcagtattggcacttcaggttgtcgaggaatcttccaggtgccagatggccagcgagacagcaggtcacacttcccagcagatgtcaccaaaatcacctgggcttgtgggcagtcccctccaggatttaagcctctgttccctagctgttcctcacccaagacgggccaaatggatgttctcatagacctggatttcgggtttgaactgaggaatcgaggcatctggggagaaggagccatcagggatacagaagagaagtcagcagacaacttagagccgtgttcctcgccccctcccctagaggaggtgatctgctgtgaggggaatgctgggttttatgaggtgggctgcgtctccacgcccctggaagctggatattcagtcctgggctggaatcatccaggctttgctggaagcacgggggtgccattcccgcagaatgaggctaatgccatggatgtggtggtccagtttgccatccaccgcctgttcttccatccccaggacatcatcatctacgcgcgtggccatcggaggcttcactgccacgtgggcagccatgtcctacccagatgttagtgccatgatcctggatgcctcctttgatgacctggtgcccttggccttgaaggtcatgccagacagctggaggggcctggtgaccaggaccgtgaggcagcatctcaatctaaacaacgcggagcagctgtgcagataccagggtcctgtactgctgatccggaagacccaggatggaaatcttacccccacggttccttaaggacatatgttcaaaccgagccaattgcctcctggttaaagctctgcaagcatcggtatcccgggggtgatggcagaggagggtcttctagtggcgaggcagtggttggaggcctcctcacagctggaggaagcctcaatttatagccgatggggaggtggaagaggactggtgtctggtctgtcctccggctcctacccaggcagaacacggggccgactttccctgggagcgtgggggaggacatgagtgccagatggacggctggcagctgggctttgtttctggctcggaagcatctgcacaactttgaggccactcactgcaccccactcccagcccagaacttccccagatgcccctggcaccctctagggacccaactgggactcattatggaagaatggggtgagaggagacatgaggaaagaccctcttatttgtgattcttctgtgtttcatgtttgctgtttataagttttgtgggaaagttgggggaccatccccccttctcaccactgttcctcttgcacgtttcccctcattcatgtggctgtacttaaccttctccaacatacatcctgcattacatgaaatgggttaattcctaataattaataaaaaggtattttttctacaaaaaaaaaaaaaaaaa

SEQ ID NO: 124569 - DNA, 1527 bp, Homo sapiens
atgggcttcttgcccaagcttctcctcctggcctcattcttcccagcaggccaggcctcatggggcgtctccagtccccaggacgtgcagggtgtgaaggggtcttgcctgcttatcccctgcatcttcagcttccctgccgacgtggaggtgcccgacggcatcacggccatctggtactacgactactcgggccagcggagagtgttcatggggaaccccgagcacagggtgtgcaacctgctgctgaaggacctgcagcccgaggactctggttcctacaacttccgcttcgagatcagtgaggtcaaccgctggtcagatgtgaaaggcaccttggtcacagtaacagccagaagtttgagcccaccgggtcggcacctggagaccctccacatggccatgtcctggcaggaccacggccggatcctgcgctgccagctctccgtggccaatcacagggctcagagcgagattcacctccaagtgaagtatgcccccaggggtgtgaagatcctcctcagcccctcggggaggaacatccttccaggtgagctggtcacactcacctgccaggtgaacagcagctaccctgcagtcagttccattaagtggctcaaggatggggtacgcctccaaaccaagactggtgtgctgcacctgccccaggcagcctggagcgatgctggcgtctacacctgccaagctgagaacggcgtgggctctttggtctcaccccccatcagcctccacatcttcatggctgaggtccaggtgagcccagcaggtcccatcctggagaaccagacagtgacactagtctgcaacacacccaacgaggcacccagtgatctccgctacagctggtacaagaaccatgtcctgctggaggatgcccactcccataccctccggctgcacttggccactagggctgatactggcttctacttctgtgaggtgcagaacgtccatggcagcgagcgctcgggccctgtcagcgtggtagtcaaccaccctcccaagacgcccaccatgatggtcttcgtggagcctgagggtggcctccggggcatcctggattgccgagtggacagcgagccgctcgccagcctgactctccaccttggcagtcgactggtggcctccagtcagccccagggtgctcctgcagagccacacatccatgtcctggcttcccccaatgccctgagggtggacatcgaggcgctgaggcccagcgaccaaggggaatacatctgttctgcctcaaatgtcctgggctctgcctctacctccacctactttggggtcagagccctgcaccgcctgcatcagttccagcagctgctctgggtcctgggactgctggtgggcctcctgctcctgctgttgggcctgggggcctgctacacctggagggactgggtactaccttactggcacttacaagagtggagggcagacacagatgttgtcagcatccttattcctgctccagatgcatctctgttcatgactgtgtga

SEQ ID NO: 124570 - DNA, 615 bp, Homo sapiens
atcccccggaccgtccaaagctgtcagccctcctagacatgggccagggccacatggctctgttcatctgcactgtggacagccgccccctggccttgctggccttgttccatggggagcacctcctggccaccagcctgggtccccaggtcccatcccatggtcggttccaggctaaggctgaggccaactccctgaagttagaggtccgagaactgggccttggggactctggcagctaccgctgtgaggccacaaatgttcttggatcatccaacacctcactcttcttccaggtccgagatgccccacgccacgtcacactcactaccctgatggacacaggtcctggacgactgggcctcctcctgtgccgtgtggacagtgaccctccggcccagctgcggctgctccacggggatcgccttgtggcctccaccctacaaggtgtggggggacccgaaggcagctctcccaggctgcatgtggctgtggcccccaacacactgcgtctggagatccacggggctatgctggaggatgagggtgtctatatctgtgaggcctccaacaccctgggccaggcctcggcctcagctgacttcgacgctcaag

SEQ ID NO: 124571 - DNA, 832 bp, Homo sapiens
gtccagaggacatttggaattggacttccaaaggactcccaactgtgagctcatccctgagacttttgacattgttgggaatgccaccagcaggccatgttttgtctcagtgcccatctactgagggccagggtgtgcccctggcattctggttgtgggcttcctggaagaggtgatcactctcacactaagactgaggaaataaaaaaggtttggtgttttcctagggagagagcatgccaggcagtggagttgcctaagcagacatccttgtgccagatttggcccctgaaagaagagatgcgcctcattcccaccaccaccccccccttacccccagggactgggtactaccttactggcccttactagagtggagggccagacacagatgttgtcagcatcccttattcctgctccagaatgcatctctgttcatgactgtgtgagctcctgtccttttcctgggagaccctgtgtcgggctgttaaagagaatgagttaccaaagaaggaatgacgtgcccctgcgaatcagggaccaacaggagagagctctttgagtgggcttagtgactcccccttgcagcctggtggagatggtgttgaggagcgaagagcccttttgttttagggttttgggtttgaaaaacagagagagaagtggggagttgccacaggagctaacacgctgggaggcagttgggggccgggtgaactttgtgtagccgaggccgcaccctccctcattccaggctcattcattttcatgctccattgccagactcttgctgggagcccgtccagaatgtcctcccaataaaactccatcc

SEQ ID NO: 124572 - DNA, 5522 bp, Homo sapiens
atggccaacagattcagaagtggggaggactctggaggagcaatctggcaagactgtgtggaggagggagcatctgaactgggctttctggagagtttgctgtatactcaaggaaatgacaggaagcagtgctccctgactaatcaaggtagacaagtctttgctctcctcatgctaaggaaaggtcatctgcatgtgttcgtcatcctctttggaccagcaggtccagcaccgccgcagccacttccttctgtggagcaggtacccctgtccctggtccctgggcccaaaggggtcgctgtgtccagaaccccaccattcttccatcaggttcacgattgcccttttcaggaccccaaatgggaggaacaggggagctgggacaagatagctgccctggccatagcagagctgaccctgacatcccctgtggccagggacacatctgacccccagtgtgcccagcaggctgcttttcttcacggccaggcctcatggggcgtctccagtccccaggacgtgcagggtgtgaaggggtcttgcctgcttatcccctgcatcttcagcttccctgccgacgtggaggtgcccgacggcatcacggccatctggtactacgactactcgggccagcggcaggtggtgagccactcggcggaccccaagctggtggaggcccgcttccgcggccgcaccgagttcatggggaaccccgagcacagggtgtgcaacctgctgctgaaggacctgcagcccgaggactctggttcctacaacttccgcttcgagatcagtgaggtcaaccgctggtcagatgtgaaaggcaccttggtcacagtaacagaggagcccagggtgcccaccattgcctccccggtggagcttctcgagggcacagaggtggacttcaactgctccactccctacgtatgcctgcaggagcaggtcagactgcagtggcaaggccaggaccctgctcgctctgtcaccttcaacagccagaagtttgagcccaccggcgtcggccacctggagaccctccacatggccatgtcctggcaggaccacggccggatcctgcgctgccagctctccgtggccaatcacagggctcagagcgagattcacctccaagtgaagtatgcccccaagggtgtgaagatcctcctcagcccctcggggaggaacatccttccaggtgagctggtcacactcacctgccaggtgaacagcagctaccctgcagtcagttccattaagtggctcaaggatggggtacgcctccaaaccaagactggtgtgctgcacctgccccaggcagcctggagcgatgctggcgtctacacctgccaagctgagaacggcgtgggctctttggtctcaccccccatcagcctccacatcttcatggctgaggtccaggtgagcccagcaggtcccatcctggagaaccagacagtgacactagtctgcaacacacccaatgaggcacccagtgatctccgctacagctggtacaagaaccatgtcctgctggaggatgcccactcccataccctccggctgcacttggccactagggctgatactggcttctacttctgtgaggtgcagaacgtccatggcagcgagcgctcgggccctgtcagcgtggtagtcaacctcctgacagccttcctggagacccaggcgggacttgtgggcatccttcactgctctgtggtcagtgagcccctggccacactggtgctgtcacatgggggtcatatcctggcctccacctccggggacagtgatcacagcccacgcttcagtggtacctctggtcccaactccctgcgcctggagatccgagacctggaggaaactgacagtggggagtacaagtgctcagccaccaactcccttggaaatgcaacctccaccctggacttccatgccaatgccgcccgtctcctcatcagcccggcagccgaggtggtggaaggacaggcagtgacactgagctgcagaagcggcctaagccccacacctgatgcccgcttctcctggtacctgaatggagccctgcttcacgagggtcccggcagcagcctcctgctccccgcggcctccagcactgacgccggctcataccactgccgggcccgggacggccacagtgccagtggcccctcttcgccagctgttctcactgtgctctacccccctcgacaaccaacattcaccaccaggctggaccttgatgccgctggggccggggctggcacggcgaggcctccttttgtgccgtgtggacagcgacccccccgccaggctgcagctgctccacaaggaccgtgttgtggccacttccctgccatcagggggtggctgcagcacctgtgggggctgttccccacgcatgaaggtcaccaaagcccccaacttgctgcgtgtggagattcacaaccctttgctggaagaggagggcttgtacctctgtgaggccagcaatgccctgggcaacgcctccacctcagccaccttcaatggccaggccactgtcctggccattgcaccatcacacacacttcaggagggcacagaagccaacttgacttgcaacgtgagccgggaagctgctggcagccctgctaacttctcctggttccgaaatggggtgctgtgggcccagggtcccctggagaccgtgacactgctgcccgtggccagaactgatgctgccctttacgcctgccgcatcctgactgaggctggtgcccagctctccactcccgtgctcctgagtgtactctatcccccggaccgtccaaagctgtcagccctcctagacatgggccagggccacatggctctgttcatctgcactgtggacagccgccccctggccttgctggccttgttccatggggagcacctcctggccaccagcctgggtccccaggtcccatcccatggtcggttccaggctaaagctgaggccaactccctgaagttagaggtccgagaactgggccttggggactctggcagctaccgctgtgaggccacaaatgttcttggatcatccaacacctcactcttcttccaggtccgaggagcctgggtccaggtgtcaccatcacctgagctccaagagggccaggctgtggtcctgagctgccaggtacacacaggagtcccagaggggacctcatatcgttggtatcgggatggccagcccctccaggagtcgacctcggccacgctccgctttgcagccataactttgacacaagctggggcctatcattgccaagcccaggccccaggctcagccaccacgagcctagctgcacccatcagcctccacgtgtcctatgccccacgccacgtcacactcactaccctgatggacacaggccctggacgactgggcctcctcctgtgccgtgtggacagtgaccctccggcccagctgcggctgctccacggggatcgccttgtggcctccaccctacaaggtgtggggggacccgaaggcagctctcccaggctgcatgtggctgtggcccccaacacactgcgtctggagatccacggggctatgctggaggatgagggtgtctatatctgtgaggcctccaacaccctgggccaggcctcggcctcagctgacttcgacgctcaagctgtgaatgtgcaggtgtggcccggggctaccgtgcgggaggggcagctggtgaacctgacctgccttgtgtggaccactcacccggcccagctcacctacacatggtaccaggatgggcagcagcgcctggatgcccactccatccccctgcccaacgtcacagtcagggatgccacctcctaccgctgcggtgtgggcccccctggtcgggcaccccgcctctccagacctatcaccttggacgtcctctacgcgccccgcaacctgcgcctgacctacctcctggagagccatggcgggcagctggccctggtactgtgcactgtggacagccgcccgcccgcccagctggccctcagccacgccggtcgcctcttggcctcctcgacagcagcctctgtccccaacaccctgcgcctggagctgcgagggccacagcccagggatgagggtttctacagctgctctgcccgcagccctctgggccaggccaacacgtccctggagctgcggctggagggtgtgcgggtgatcctggctccggaggctgccgtgcctgaaggtgcccccatcacagtgacctgtgcggaccctgctgcccacgcacccacactctatacttggtaccacaacggtcgttggctgcaggagggtccagctgcctcactctcattcctggtggccacgcgggctcatgcaggcgcctactcttgccaggcccaggatgcccagggcacccgcagctcccgtcctgctgccctgcaagtcctctatgcccctcaggacgctgtcctgtcctccttccgggactccagggccagatccatggctgtgatacagtgcactgtggacagtgagccacctgctgagctggccctatctcatgatggcaaggtgctggccacgagcagcggggtccacagcttggcatcagggacaggccatgtccaggtggcccgaaacgccctacggctgcaggtgcaagatgtgcctgcaggtgatgacacctatgtttgcacagcccaaaacttgctgggctcaatcagcaccatcgggcggttgcaggtagaaggtgcacgcgtggtggcagagcctggcctggacgtgcctgagggcgctgccctgaacctcagctgccgcctcctgggtggccctgggcctgtgggcaactccacctttgcatggttctggaatgaccggcggctgcacgcggagcctgtgcccactctcgctttcaaccaacgtggctcgtgctcaagctgggatgtaccactgcctggctgagctccccactggggctgctgcctctgctccagtcatgctccgtgtgctctaccctcccaagacgcccaccatgatggtcttcgtggagcctgagggtggcctccggggcatcctggattgccgagtggacagcgagccgctcgccagcctgactctccaccttggcagtcgactggtggcctccagtcagccccagggtgctcctgcagagccacacatccatgtcctggcttcccccaatgccctgagggtggacatcgaggcgctgaggcccagcgaccaaggggaatacatctgttctgcctcaaatgtcctgggctctgcctctacctccacctactttggggtcagagccctgcaccgcctgcatcagttccagcagctgctctgggtcctgggactgctggtgggcctcctgctcctgctgttgggcctgggggcctgctacacctggagggactgggtactaccttactggcccttacaagagtggagggcagacacagatgttgtcagcatccttattcctgctccagatgcatctctgttcatgactgtgtga

SEQ ID NO: 124573 - DNA, 1887 bp, Homo sapiens
  misc_feature (1)...(1887): n = a,t,c or g
atggttcggcgctttaggcgtctgtcacagacctatctgcgggtcgccttcacccagcatctcagaaactgcgcgcgggatgaacattcggaagtttgggaagttgatgaacagatcaagaagcaacaggaaacacttggtttggaacataatttagacttacttagatatgagaaaggctgtgtaagagagaaacagagtaatgagtttgggaaaccattttaccattgtgcatcctatgttgtaaccccctttaagtgtaatcagtgtgggcaagacttcagtcataaatttgacctcattagacatgagcgaattcatgctggagagaaaccttacgaatgtaaagaatgtggaaaagccttcatatttattatacatatgagaagtcacactggtgagaaaccctatgtatgtagtgaatgtgggaaagccttctctcagagttcatccctaaccgtacatacgcgaaatcatacagctgagaaaccctatgaattatgtggaaaagcctttagtcagaaatcaaacctcactgaacatgagaaaattcatactggagagaaaccttatcattgtaatcaatgtgggaaagctttcagtcagagacaaaatcttcttgagcatgaaaaaattcatactggagagaaaccattcaaatgtaatgaatgtgattgggagtttggaagagaaaccaagaatttatctccaaaggaaaacatttatgaaattagatcaccacaacaggagaaggccagagttatcagagaaatcagatgccaggtggagagacaacagggtcaacaggagggacatttcagaccagctgtaataccatttacttccatgcagtgcacagcccatagagaatatcagtggcttcatactggagagaaatcctgtgaatgcaggaaatgtaagaatgcttttaggtaccagtcatgtcctattcaacatgaaataattcataataaggaaaaagaacctgaatgtggagaatgtaggaaaatctttaatagtggatcagacttgattaagcatcagacgcttcatgaaagcaaaaaacatagtgaaaataacaaatgtacctttaatcatgattctggaattactcaacctcagagcattaatactggagagaaacctcatanaatctcacaaattagtcagcatcagaggatgcatcttggtgagaaaccctataagtgtagggagtgtgggaaagcctttccatccactgcacagcttaatctacatcagaggatccatactgatgagaaatactatgaatgtaaggagtgtgggaaggcctttacccgtccctcacacctttttcgacatcaaagaatccatacgggtgagaaaccccataaatgtaaggaatgtggaaaggcttttcgttatgacacacagctgagccttcatcagataatccatactggtgaaagacgctatgaatgcagggagtcagaactcacacatcatgagagaagtcacactggtgagaaaccctacgagtgtaaggagtgtgggaaggcctttggtcgtggctcagaacttagtcgacaccagaaaattcatactgggctttctgatactaagccaaatgtgatctccttattggagcagaagaaagagccctggatggttaagaggaaggagacaaaagaatggtgtccagatgttacagaaaacaaggaaaacacccttcagcctcatatacatgttcaacgaacaagagatgatgctgagaaaacctatgaatgtaaagagtgtggggaagcttttaggactagccgccaactttctgtacatcatagatttcattctggtgagaaaccctataaatgtttggaatgtgacaaggcctttagtgtgtatggatga

SEQ ID NO: 124574 - DNA, 410 bp, Homo sapiens
attgcagtgcttgggtgtcggggccctgaggctccggcctgacctctccagggtgtcaacaggatggtctgcggatgccaagagtggtggaggtccgaccaggatgatgaagccacaggcggagtctgggggaagcagctcggcatcccagcttcaggcctgccgggacggcgttcgagtgagtctcccagaaagtcgtgcacccccgtgacctcgaggacaggtctgcctgtgtgcccgtgggctgctctctcacccgagagtcgttcttcagactgaataaccagccccatgggacccgatttctgcccataccttccaatccggaatcgagcagaagagcagtcccgagtgcccacctcacggtctgaagcgcctcctcctccaccgggatccgaacacgaagtcgg

SEQ ID NO: 124575 - DNA, 307 bp, Homo sapiens
gagggcacctggatccaaggtcgaggagcgggcttcgttgagagaggcgactgcgggcgccccagggctggaccaccaggagtcctgtcctcaagacctccttgtgccgacttctaccggtggaggaggagcttcagggcgcctgctagggtctcaggactcctcttcagattttggatctcaccaaccctggggctcctgcaagaagacaccgctttctagtacacgtgcaaacaggaacaggggcgagtccaaggtggagccaatgcgaccacacgtggcactggcgtcccccagaacagatggg

SEQ ID NO: 124576 - DNA, 967 bp, Homo sapiens
  misc_feature (1)...(967): n = a,t,c or g
tatgtggaaaagcctttagtcagaaatcaaacctcactgaacatgagaaaattcatactggagagaaaccttatcattgtaatcaatgtgggaaagctttcagtcagagacaaaatcttcttgagcatgaaaaaattcatactggagagaaaccattcaaatgtaatgaatgtgattgggagtttggaagagaaaccaagaatttatctccaaaggaaaacatttatgaaattagatcaccacaacaggagaaggccagagttatcagagaaatcagatgccaggtggagagacaacagggtcaacaggagggacatttcagaccagctgtaataccatttacttccatgcagtgcacagcccatagagaatatcagtggcttcatactggagagaaatcctgtgaatgcaggaaatgtaagaatgcttttaggtaccagtcatgtcctattcaacatgaaataattcataataaggaaaaagaacctgaatgtggagaatgtaggaaaatctttaatagtggatcagacttgattaagcatcagacgcttcatgaaagcaaaaaacatagtgaaaataacaaatgtacctttaatcatgattctggaattactcaacctcagagcattaatactggagagaaacctcatanaatctcacaaattagtcagcatcagaggatgcatcttggtgagaaaccctataagtgtagggagtgtgggaaagcctttccatccactgcacagcttaatctacatcagaggatccatactgatgagaaatactatgaatgtaaggagtgtgggaaggcctttacccgtccctcacacctttttcgacatcaaagaatccatacgggtgagaaaccccataaatgtaaggaatgtggaaaggcttttcgttatgacacacagctgagccttcatcagataatccatactggtgaaagacgctatgaatgcaggga

SEQ ID NO: 124577 - DNA, 1417 bp, Homo sapiens
ggcctcacagctgagtctacatcaaagaattcatgctggtgagaacccccatgaatgtaaggaatgtgggaaagcctttatctctgattcacatcttattcgacatcagagtgtccatactggggagaaaccttataagtgtaaggaatgtgggaagtcctttcgtcgtggctcagaacttacccgacatcagagagctcatactggtgaaaaaccctatgagtgtaaggaatgtggaaaggcctttacttgtagcacagatcttgttcgacatcaaaaagttcgcactggggagagaccccataagtgtaaggaatgtgggaaggctttcattcgaaggtcagaactcacacatcatgagagaagtcactctggtgagaaaccctatgaatgtaaagtatgtggaaaagcctttactaaaagttcacaactttttctacatctgagaattcatactggtgagaaaccttatgaatgtaaagaatgtgggaaagcctttactcaacactcaaggcttattcagcatcagagaatgcatactggtgagaaaccttatgaatgtaagcagtgtgggaaggcctttaatagtgcctcaacacttactaaccatcacagaattcatgctggtgagaagctctatgaatgtgaagaatgtagaaaggcctttattcagagctcagaacttattcaacatcagagaatccatacagatgaaaaaccatatgaatgtaatgaatgtgggaaggcctttaataaaggctcaaatcttactcgacatcagagaattcacactgtgtggaagcgcttaatacataagccaggtgttctcaaccaggggccatttcgtttctcatacctacaccccagtaggcatttggcaatgtccagagtcatttttggttttcagtatgaagggtgggtgctgctggcgtctgggggctatggggaccttcggaagaaagccaaggaaaagcaaatcacacctgggaaccaggagagggcctatgccggagaacaagcccattcagggaggcctactggaggaggcgagaggtttctgcaaactgtttctgtgccccagcgacccccttcacacctcaccagactgaataaccagccccatgggacccgatttctgcccataccttccaatccggaatcggagcagaagagcagtcccgagtgcccacctcacggaattgaaggaaactacgtcaacataataaaagttttatgtgaaaaacccacggtggacagcacactcggtgaaagactgaaagctttttctccaagatcaggaacaaaggaagaaggcctgctgtcaccatgttcattcagcagagtactaaaagtactagctacagaaatgtggcaaaaaaaacaacaaccggcatccaaattgaagacaatgaaatga

SEQ ID NO: 124578 - DNA, 1782 bp, Homo sapiens
atgtgggaaagcctttactcaacactcaaggcttattcagcatcaagaatgcatactggtgagaaaccttatgaatattgggagtttggagagaaaccaagaatttatctccaaaggaaaacatttatgaaattagataccacaacaggagaaggccagagttatcagagaaatcagatgccagagtgtccatatggggagaaaccctgtaagtgtaaggaatgtgggaagtcctttcgtcgtgctcagaacttacccgacatcagagagctcatactggtgaaaaaccctagagtgaggtcgacagaacgacaggacgtctccgaatgccaggagtcgcagagggcagagcaggatgaagaaaccacggcggagtctaggggaagcagtacggcgtccctgcctcaggcctgcccgacggtgtgcgggcacatcctggacaccattgttcgtctcgccatcgccccatatggccttggtgacacacactcaccccatctgttctgggggacgccagtgccacgtgtggtcgcattggctccaccttggactcgcccctgttcctgtttgcacgtgtactagaaagcggtgtcttcttgcaggagccccagggctttggaagcggaacaggccctgctcctcccaggggcgagggaggcagagggctcatgtgtcagtgaatttcagccgacaccacgccttgaggctcatggatctttctgtgccccagcaggccctgcccgcctcacagatgaggtgagctcatccctgcttacttgggagatccaaaatctgaagaggagtcctgagaccctagcaggcgccctgagctcctcctccaccggtagaagtcggcacaaggaggtcttgaggacaggctcctggtggtccagccctggggcgcccgcagtcgcctctctcaacgaacccgctcctcgaccttggatccagtgcttgggtgtcggggccctgaggctccggcctgactctccagggtgtcaacaggatggtctgcgatgccaagagtggtggagtgccgaccaggatgatgaagccacaggcggagtctgggggaagcagctcggatcccagcttcaggtctgccgggacggcgttcgagtgagtctcccagaagtcgtgcacccccgtgacctcgaggacaggtctgcctgtgtgcccgtggctgctctctcacccgagagtcgttcttctggagagcagagccccgcagctcaggggttgcctggggggcagccccgctcactattttttaaaggggccactacgggattacaggagccaggcgcctgtcaggcacttgccaaatgtgcaagcatcgtggcagtgtgcacggttctcaacgtccttaatgagtccccgtcagtcgttctaggggtaatgggttccactgaaggcattgcacagatcaacaatcaacttccaccaaaacggaaaatcgttcctgcctttttagacagcagtgctgagcagcaggattccctgagctttgagaccaggacgggccctgggaggcccaggtcgaagggaggcagtgagctcatgaaacagggattttcagctgactccctcccctgggatctcagctgttactgtgccccacgacccccttcacacctcaccagactgaataaccagccccatgggacccatttctgcccataccttccaatccggaatcggagcagaagagcagtcccagtgcccacctcacggtctgaagcgcctcctcctccaccgggatccgaaacgaagtcggcttaa

SEQ ID NO: 124579 - DNA, 381 bp, Homo sapiens
atgccactgagccgttatgctctcggggcatacagccatgaaggcaataaggagacttttctcctcagaagccgcccatggctccccatgggtgtcttacttatctggcattccagaaagtcaaagaaggaaagaaagaagaaaagaaagaaaaaaagaaaagaaagaaagaaagaaagaaagaaagaaagaaagaaagaaagaaagaaagaaagaaagaaagaaagagaaaagaaaagaaggaaagaagggaaggaaggaaggaaggaaggaaggaaggaaggaaggaaggaaggaaggaaagaaaagaaagaaatttctaaaaaagaaattgtggctcctacttctttgaatcctctgaagtgctcagtcttgccctga

SEQ ID NO: 124580 - DNA, 235 bp, Homo sapiens
atgaaagaaaagaaagaaagaaggaagaaagagaaagaagagaaagaaagaaagaaagaaagaaagaaagaaagaaagaaagaaagaaagaaagaaagaaagaaagaggtagtggttattgttggaggcctcacaccttttccaaaacaaacagtggaggcagtgaccggctgggtattcactggatgcaacagtaactcccaatccgagcaacctgagccgccattggcggcag

SEQ ID NO: 124581 - DNA, 927 bp, Homo sapiens
atggtagaagacaaagaggaagcagtcacgtctcacgtggcaggaacaagaggaagagagagtttgtacctgttcaagctaggcctggcccctcagattcaagacctatatggaaaggttgacttcacagaagaagaaatcaacaacatgaagactgagttggagaagtatggcatccagatgcctgcctttagcaagattgggggcatcttggctaatgaactgtcagtggatgaagccgcattacatgctgctgttattgctattaatgaagctattgaccgtagaattccagccgacacatttgcagctttgaaaaatccgaatgccatgcttgtaaatcttgaagagcccttggcatccacttaccaggatatactttaccaggctaagcaggacaaaatgacaaatgctaaaaacaggacagaaaactcagagagagaaagagatgtttatgaggagctgctcacgcaagctgaaattcaaggcaatataaacaaagtcaatacattttctgcattagcaaatatcgacctggctttagaacaaggagatgcactggccttgtacagggctctgcagtcaccagccctggggcttcaaggactgcagcttactagaatagcgactgcctgggcaacaagagcaaaactccatcgaaagaaagaaaagaaagaaagaaaagaaagaaaagaaagaaaagagaaagaaaagaaagaaaggaaagaaagaagaaagaaagaaggaaagaaaataccattttattcttctgcttggtatgcccacttcctagttcattacacatggccctatggcaccctcaatcacagggttgccatgacctcaaaagtcctgcacacttgggtaggagtctccgaaatcccacgtccatattcctgggaaagagaatctgactgtggccactga

SEQ ID NO: 124582 - DNA, 400 bp, Homo sapiens
aatacacttggttctcagagcactgccagatcgctcattgtgagcaaactaaagtcagccaacgtagacagttaagattctgaaaatctagaagtaatacatcatccagacaacaaggactgttgactagaggtgcctgttcagtgccttgaaactgcatgcatacacatgtttgtattaggcgagtcctttcctaaagacatggttttatgcttacgtctctgcaggaaagatggcaaaaaggatcaagactccagatctgcacctgagccaaagaaacctgaggaaaatccagcttctgtaagtgttgaaggctgctcccaatttttcattctaagaaaaattcttagaattctaagtattcttactaagaattaaaaattcttagtattctaaactt

SEQ ID NO: 124583 - DNA, 882 bp, Homo sapiens
atgaacccggcatccagagaggttgaaagttttagttatcctgagtttgaggacctggatgccctgttcagtaccctgggtctcaatgaagagtctgtagacagctttgatgactacctgcctagaagaggtgttgatagctttggagacaagtatcaagatcatgcaattcagaccagtatcatgatgggtgtcaggacaggtttagagatggctcacaccaggatatgggtcaatgtgggggccgggattaagatgatgactgaggcagcagagactatgatagaggctatgattctgcaacaggcagttgcagaagagcatttggtagtgggtacctcagagatgatgactactgaggagagctcagaaacagagcagcaaccccctacaggtagtgagggaaaagtacctccagttcaaccctcagaggaaagaccagcaaagaaagatgaaaataaagtagacgggatgaatgtccaaaagtccaaagtgggaactcgggccgtggtccaggagatggagggaacaaagactgctggagggagtcagacaggaaagatggcaaaaaagatcaagtctgcagatctgcacctgagtcaaagaaacctgaggaaaatccagcctccaagttcagttctgcaagcaagtgtgctgctgtctctgttgatggtgaagatgaaaaggaaggagcagattacaccaaatagacctcctgtgctttctcctagtctctctccactctggaacattcaagagcaaagcaaacctacatccagacaagacaaaataacactcaccacctcctgggggaggaaaaaatcagggtcaagttctgataaaatagctatgtctcaacccaaaggcaagcttcctatttaa

SEQ ID NO: 124584 - DNA, 720 bp, Homo sapiens
atgcaaaggagtgagaatgacattttaggaatggacttaagacctctaatttgtataaaggatgaaaaggaggaggtgggagagaaggaggagggagaaaaggaggaggaggagtgtgaggaacaagaggaggaaggagggaaggagtgggaagaaccagggaattaccatctgggccagtccttaagccatgactggcagagctcagaaacagagcagcaaccccctacaggtagtgagggaaaagtacctccagttcaaccctcagaggaaagaccagcaaagaaagatgaaaataaagtagacgggatgaatgtccaaaagtccaaagtgggaactcgggccgtggtccaggagatggagggaacaaagactgctggagggagtcagacaggaaagatggcaaaaaagatcaagtctgcagatctgcacctgagtcaaagaaacctgaggaaaatccagcctccaagttcagttctgcaagcaagtgtgctgctgtctctgttgatggtgaagatgaaaaggaaggagcagattacaccaaatagacctcctgtgctttctcctagtctctctccactctggaacattcaagagcaaagcaaacctacatccagacaagacaaaataacactcaccacctcctgggggaggaaaaaatcagggtcaagttctgataaaatagctatgtctcaacccaaaggcaagcttcctatttaa

SEQ ID NO: 124585 - DNA, 289 bp, Homo sapiens
  misc_feature (1)...(289): n = a,t,c or g
cttcctcttctccacgcaggcttcaacaggagatttatggagaatagcagcataattgcttgctataatgaactgattcaaatagaacatggggaagttcgctcccagttcaaattacgggcctgtaattcagtgtttacagcattagatcactgtcatgaagccatagaaataacaagcgatgaccacgtgattcaggagtngcagggggtttactatgccagacggaaatccggggacagcatccaacagcacgtnaagatcaccccagtgattggccaaggaggga

SEQ ID NO: 124586 - DNA, 1065 bp, Homo sapiens
atgagtgaactcccattcacaattgcttcaaagagaataaaatacctaggaatccaacttacaagggatgggaaggacctcttcaaggagaactacaaaccactgctcaatgaaataaaagaggatacaaacaaatggaagaacattccatgctcatgggtaggaagaatcaatatcgtgaaaatggccatactgcccaagctgctcatccaccctgaaaatgaacttcctttcagatctgaaccccataaagctgaaggtcactttgccctgttcccaattattacagagtacattatagctgttaaagagttacttgtaggtaacccggttcctaacagcagggtaccggtaccggtctgtggccttggggttggagactcctacttaaagggaacctgtgaggacgccgtccaggcagatgtacagataggctgtggctctatgtggtccagaagtaagagctatggagttgaggaaaacaagactgaaaatggaaactttgagacagcagcgatttctgcagaaaaagccttgaggaagatagccccaaagaatgccagggaagaaggaatctttaaaagaaacggaaagaggccgggcgtgactgatgaagagaagagacagggactacctgtggtgatgccagtgtttgaccggaatacctgtagcatccccaagtctcagatctctttcattgactacttcataacagacatgtttgatgcttgggatggtgttaagtgtcagcactacgtttatggtccctaccctcaagaagattctgaaaagcaaatcataattgaaacaataaagaagctcagcagcaaatctaccctgacaggaaaccactcacttagtagcctcacacaacaaggagaccagcaaccatttgattctggccataaacaaaaagaaggtaggtttatgagaaatataaaaattggtacaatgttgagcatccctaatctgaaaatccaaaatctgaaatgctccaaaatccaagaccttttaagcactgacgtgatgccacaagtggaaaatcttatacctgacatcatgtga

SEQ ID NO: 124587 - DNA, 1980 bp, Homo sapiens
atgagggaatttgaactggattcactgtttttggagcagaacttgaaggggactgtcttctttccagtacgggcacagtggaggctgaagagcatgcaggtctgcaatggctgctgcactagcagcggggggaccccagagctggctgcacagtcatctggttacacggccagcagcttaggactgaaagtcatggaactgcaaaagttgggtttgggtgacttgggggaaacaccaagcctgcagaatcgtcgctatccgtccatggcgaggatccactccatgaccatcgaggctcccatcacaaaggttataaatataatcaatgcagcccaagaaaacagcccagtcacagtagcggaagccttggacagagttctagagattttacggaccacagaactgtactcccctcagctgggtaccaaagatgaagatccccacaccagtgatcttgttggaggcctgatgactgtgagtgatgaggcaaaacctgaaaagcaagagagcagttgtactgcagtggcagagggactgctgcttgcagagcggggctaccccatgggcagtgtgcccctggtagcagctcagaggcagcactgcactcatctttatacctacttttcattacatgcaaatgaaggggcagtttttgcagatatttctagaatgagggtggtaacttctgggttgttaccatggaaagggtggaaaggtctggatgttgtcatggcaacggtaaactgccgtggcatgctggacggcttgagaagactgtcaggaaacgagtatgtgtttactaagaatgtgcaccagagtcacagtcaccttgcaatgccaataaccatcaatgatgttcccccttgtatctctcaattacttgataatgaggagagttgggacttcaacatctttgaattggaagccattacgcataaaaggccattggtttatctgggcttaaaggtcttctctcggtttggagtatgtgagtttttaaactgttctgaaaccactcttcgggcctggttccaagtgatcgaagccaactaccactcttccaatgcctaccacaactccacccatgctgccgacgtcctgcacgccaccgctttctttcttggaaaggaaagagtaaagataacagacagcacagtaaagcgatgctgcatgtccgaggccgcctctccacatctaggtcagaaggctcagctggctaaaaacgttctgaaaatctcaaatcccctgacccgaccctccgcacagacaaggatggatgtgggtctccaagatccagtgggtaatgctcaaccttgcctccccatatcccagggaagcctcgatcagttggatgaggtggcagccctcattgctgccacagtccatgacgtggatcacccgggaaggaccaactctttcctctgcaatgcaggcagtgagcttgctgtgctctacaatgacactgctgttctggagagtcaccacaccgccctggccttccagctcacggtcaaggacaccaaatgcaacattttcaagaatattgacaggaaccattatcgaacgctgcgccaggctattattgacatggttttggcaacagagatgacaaaacactttgaacatgtgaataagtttgtgaacagcatcaacaagccaatggcagctgagattgaaggcagcgactgtgaatgcaaccctgctgggaagaacttccctgaaaaccaaatcctgatcaaacgcatgatgattaagtgtgctgacgtggccaacccatgccgccccttggacctgtgcattgaatgggctgggaggatctctgaggagtattttgcacagtttgctggatccagaacttgcacaaaaaccgagaaatcttccattcattcactaggttattcctgggtgtctacatggcgcgttatgggaacacaggcattagtgaagacatcgcggccacggggagttccagtccaatag

SEQ ID NO: 124588 - DNA, 2877 bp, Homo sapiens
cttcctcttctccacgcaggcttcaacaggagatttatggagaatagcagcataattgcttgctataatgaactgattcaaatagaacatggggaagttcgctcccagttcaaattacgggcctgtaattcagtgtttacagcattagatcactgtcatgaagccatagaaataacaagcgatgaccacgtgattcagtatgtcaacccagccttcgaaaggatgatgggctaccacaaaggtgagctcctgggaaaagaactcgctgatctgcccaaaagcgataagaaccgggcagaccttctcgacaccatcaatacatgcatcaagaagggaaaggagtggcagggggtttactatgccagacggaaatccggggacagcatccaacagcacgtgaagatcaccccagtgattggccaaggagggaaaattaggcattttgtctcgctcaagaaactgtgttgtaccactgacaataataagcagattcacaagattcatcgtgattcaggagataattctcagacagagcctcattcattcagatataagaacaggaggaaagagtccattgacgtgaaatcgatatcatctcgaggcagtgatgcaccaagcctgcagaatcgtcgctatccgtccatggcgaggatccactccatgaccatcgaggctcccatcacaaaggttataaatataatcaatgcagcccaagaaaacagcccagtcacagtagcggaagccttggacagagttctagagattttacggaccacagaactgtactcccctcagctgggtaccaaagatgaagatccccacaccagtgatcttgttggaggcctgatgactgacggcttgagaagactgtcaggaaacgagtatgtgtttactaagaatgtgcaccagagtcacagtcaccttggcaatgccaattaaccattcaatggatgtttcccccttgtatctctcaattacttgataatgaggagagttgggacttcaacatctttgaattggaagccattacgcataaaaggccattggtttatctgggcttaaaggtcttctctcggtttggagtatgtgagtttttaaactgttctgaaaccactcttcgggcctggttccaagtgatcgaagccaactaccactcttccaatgcctaccacaactccacccatgctgccgacgtcctgcacgccaccgctttctttcttggaaaggaaagagtaaagggaagcctcgatcagttggatgaggtggcagccctcattgctgccacagtccatgacgtggatcacccgggaaggactcaactctttcctcctgcaatgcaggcagtgagcttgctgtgctctacaatgacacctgctgttcctggagagtcaccacaccgccctggccttccagcctcacggtcaaggacaccaaaatgcaacattttcaagaatattgacaagggaaccattatcgaacgctgcgccaggctattattgacatggttttggcaacagagatgacaaaacactttgaacatgtgaataagtttgtgaacagcatcaacaagccaatggcagctgagattgaaggcagcgactgtgaatgcaaccctgctgggaagaacttccctgaaaaccaaatcctgatcaaacgcatgatgattaagtgtgctgacgtggccaacccatgccgccccttggacctgtgcattgaatgggctgggaggatctctgaggagtattttgcacagactgatgaagagaagagacagggactacctgtggtgatgccagtgtttgaccggaatacctgtagcatccccaagtctcagatctctttcattgactacttcataacagacatgtttgatgcttgggatgcctttgcacatctaccagccctgatgcaacatttggctgacaactacaaacactggaagacactagatgacctaaagtgcaaaagtttgaggcttccatctgacaggctaaagccaagccacagagggggcctcttgaccgacaaaggacactgtgaatcacagtagcgtaaacaagaggccttcctttctaatgacaatgacaggtattggtgaaggagctaatgtttaatatttgaccttgaatccattccaagtcccccaaatttccattccttagaaagttatgttcccatgaagaaaaatatatgttccttttgaatacttaaatgacagaacaaatacttgggcaaactccctttgctctgcctgtcatccctgtgtacccttgtcaatcccatgggggctggttcactgtaactagcaggccacagggaaggcaaagccttgggtgcctgtgagctcatctcccgggatgggtgactaagtaggcttaggctaggtgatcagctcatcctttaccataaaagtcatcattgctgtttagcttgactgttttcctcaagaacatcgatctggaagggattcataagggagcttatctgggcagatttatctaagaaaaaaaaaaaaacgacataaaataagtgaagcaactaggaccaaattacagataaactagttagcttcacagcctctatggctacatggttcttctggccgatggtatgacacctaagttagaacacagccttggctggtgggtgccctctctagactggtatcagcagcctgtgtaacccctttcctgtaaaaggggttcatcttaacaaagtcatccatgatgagggaaaaagtggcatttcatttttggggaatccatgagcttcctttatttctggctcacagaggcagccacgaggcactaacaccaagtattatataaaagccattaaatttgaatgcccgttggacaagcttttcttaaaaaaaaa

SEQ ID NO: 124589 - DNA, 445 bp, Homo sapiens
agagaggacgttcaactgttgctacccaggttgccacttcaaaactgtccatggcatgaaagacttggaccgccatctcagaatccacacgggagacaaaccgcacaagtgtgagttctgtgacaagtgcttcagccggaaggacaacctgaccatgcacatgcggtgccacaccagtgtgaagccacacaagtgtcacctgtgtgactacgctgccgtggacagcagtagcctcaagaagcacctgcggatccactctgatgagcggccgtacaaatgccagctctgcccctatgccagccgcaactccagccagctcaccgtccacctgcgatctcacacggggccgggaccgggctgacctcctggagcacagccggctgcaccaggccgaccacccggagaagtgtccagagtgcagctactcctgctccagcgcggccgc

SEQ ID NO: 124590 - DNA, 960 bp, Homo sapiens
atgtcgcggcgcaagcaggccaagccccagcacctcaactccgaggagccgcggcctgcgcgccgggagtgtgcggaggtggccccgcaggtggcgggggagccggcttcagaacttgatgatgatgttccaaaagcaaactgcctctccactgaaagcactgacactccgaaggcccctgtcatcactcttccctcagaggcaagggaacaaatggccacccttggagagaggacgttcaactgttgctacccaggttgccacttcaaaactgtccatggcatgaaagacttggaccgccatctcagaatccacacggtccccttctgcttttccaaagtctattggaatggttttcaactaggtatgatttcaccccccaagggaacaatgtctggagacatcttcgattgttacaactggagaagaaagggttctactggcatctgtatttggacaggaggaggcggcacacccatatgcccaggctatcatcttggtcaaatctttgtagccatcttgaccaaaaaacctttaactttgactccttatgtgtttgaaggagacaaaccgcacaagtgtgagttctgtgacaagtgcttcagccggaaggacaacctgaccatgcacatgcggtgccacaccagtgtgaagccacacaagtgtcacctgtgtgactacgctgccgtggacagcagtagcctcaagaagcacctgcggatccactctgatgagcggccgtacaaatgccagctctgcccctatgccagccgcaactccagccagctcaccgtccacctgcgatctcacacggccaccctatcaaagcgtaatcgagagtgtctccaggagagtgatgagatcccaagggactttaccaccctcttcgacctgtccatcttccagctggataccacctccttccacagcgtcatcgagtcagtacctgtgggcctctga

SEQ ID NO: 124591 - DNA, 1777 bp, Homo sapiens
atgtcgcggcgcaagcaggccaagccccagcacctcaactccgaggagccgcggcctgcgcgccgggagtgtgcggaggtggccccgcaggtggcgggggagccggcttcagaacttgatgatgatgttccaaaagcaaactgcctctccactgaaagcactgacactccgaaggcccctgtcatcactcttccctcagaggcaagggaacaaatggccacccttggagagaggacgttcaactgttgctacccaggttgccacttcaaaactgtccatggcatgaaagacttggaccgccatctcagaatccacacggtccccttctgcttttccaaagtctattggaatggttttcaactaggtatgatttcaccccccaagggaacaatgtctggagacatcttcgattgttacaactggagaagaaagggttctactggcatctgtatttggacaggaggaggcggcacacccatatgcccaggctatcatcttggtcaaatctttgtagccatcttgaccaaaaaacctttaactttgactccttatgtgtttgaaggagacaaaccgcacaagtgtgagttctgtgacaagtgcttcagccggaaggacaacctgaccatgcacatgcggtgcccacaccagtgtgaagccacacaagtgtcacctgtgtgactacgctgccgtggacagcagtagcctcaagaagcacctgcggatccactctgatgagcggccgtacaaatgccaacgtctgcccctatgccagccgcaactccagccagctcaccgtccacctgcgatctcacacggctaggggatacccccttccagtgctggctctgtagcgccaagttcaaaatcagctcggacttgaaaaggcacatgatcgtgcactcgggggagaagcctttcaagtgcgagttctgcgacgtccgctgcaccatgaaggcgaatctcaaatcgcacatccgcatcaagcacaccttcaaatgtctgcactgtgccttccagggccgggaccgggctgacctcctggagcacagccgggcatgcaccaggccgaccacacaggagaagtgtccagagtgcagctactcctgctccagcgcggccgccctgcgcgtgcacagcagagtccactgtaaggaccgtcccttcaagtgtgacttctgcagcttcgacacgaagcggcccagcagcctggccaagcacgtcgacaaggtgcacagggacgaggccaagacggagaaccgggcccctctgggcaaggaagggctcagagagggcagctcccagcacgtggccaagatcgtgacgcagagggccttccgctgtgagacctgcggcgcctccttcgtcagggatgactctctgagatgccacaagaagcagcacagtgatcagagtgagaaacagaaccttacactgggttaaccttcccaccggatagcggtgcctcgggacagctcagcaccctggtctccgtggggcagctcgaggctcccctagagcccagccaagacctctagctcagccgaagagggtggtcagctgtcggaacttctgaccagtgctgttgcccagccctccagaggtgaggccactgagagacaggctttgggcaccacttctggggctggccgctccaacttcacaggccttcagaggcgatggctgggcgacagtgacgaaagcaaagcaaagcagggctgtggagacactcctcgcatttgtctcttccctccaaggattatctgagcaagtcgacttg

SEQ ID NO: 124592 - DNA, 1627 bp, Homo sapiens
atgatcgcctttgactccatgtctcacatccaggtcatgctgatgcaagaggaatcaactgcaccagccaccctagagcacatccttggtcactcacagctctgtggttccgatgggctggcccacgctgctgtctgggtcttagctcacctgcattattggtttacagggctctctccaggccccatggatgtgctgccgttgcaccctgcgatctccagctcattccacctttggagagttgcattcatcagcaaagcaggcaagcctagagcagcaggacacctgctcaaaaggttcttgagatgccagttccaacgagcagcttcgtctctcttgtttaccactgtagaagcaatgcttggaacagagtccggcacagagaaggttatgcgaggagctgggacctggtaccacatcatcattgagaactggcccagtgctgagtgcgtctggactgaggagtaccagcagggcagagggcaggaggactctgcagaagatagaaaactcttcgtgggcatgctcaacaagcaacagtccgaggacgacgtgcgccgccttttcgaggcctttgggaacatcgaggagtgcaccatcctgcgcgggcccgacggcaacagcaaggggtgcgcctttgtgaagtactcctcccacgccgaggcgcaggccgccatcaacgcgctacacggcagccagaccatgccgggagcctcgtccagtctggtggtcaagttcgccgacaccgacaaggagcgcacgatgcggcgaatgcagcagatggctggccagatgggcatgttcaaccccatggccatccctttcggggcctacggcgcctacgctcaggcactgatgcagcagcaagcggccctgatggcatcagtcgcgcagggcggctacctgaaccccatggctgccttcgctgccgcccagatgcagcagatggcggccctcaacatgaatggcctggcggccgcacctatgaccccaacctcaggtggcagcacccctccgggcatcactgcaccagccgtgcctagcatcccatcccccattggggtgaatggcttcaccggcctccccccacaggccaatgggcaacctgctgcggaagaaattgttcgccaatggcatccacccctacccagcacagagccccaccgccgcggaccccctgcagcaggcctacgccggagtgcagcagtatgcaggtccagctgcctaccctgctgcctatggtcagataagccaggcctttcctcagccgcctccaatgatcccccagcagcagagagaaggcttcgtgagcttcgacaacccggccagcgcgcagaccgccatccaggccatgaacggcttccagatcggcatgaagaggctcaaggtgcagctgaagcgtcccaaagacgccaatcgcccgtactgagcgccggcgagagcgtcaccccgggggagaccaggactcgcacagggccagtcaaatccaccacagtctcgcgctgagctaggaataaagttcacgtaatcacatgagagtggagaaaagtcccccatccggcaggatgctgaacgggctacattaaaaaacaaacctctctctatatatatttataaatgagaactg

SEQ ID NO: 124593 - DNA, 2051 bp, Homo sapiens
gcggccgcacctatgaccccaacctcaggtggcagcacccctccgggcattactgcaccagctgtgcctagcatcccatcccccattggggtgaatggcttcaccggcctccccccacaggccaatgggcaacctgctgcggaagctgtgttcgccaatggcatccacccctacccagcacagagccccaccgccgcggaccccctggcagcaggcctacgccggagtgcagcagtatgcaggtccagctgcctaccctgctgcctatggtcaaataagccaaggcctttcctcagccgcctccaatgatcccccagcagcagagagaagggcccgagggctggtaacctgttcatctaccatctgccccaggagtttggggacagctgagctgatgcaagatgttcctccctttcggctttcgtgaggcttcgacaacccggccagcgcgcagaccgccatccaggccatgaacggcttcccagatcggcatgaagaggctcaaggtgcagctgaagcggcccaaagacgccaatcgcccgtactgagcgccggcgggagcgtcccccgggggagaccaggactcgcacagggcaggatgctgaacgggctacattaaaaaacaaacctctctctatatatatttataaatgagaactgttggatgacacctttgacatatcagccaatatcaatcaagctgaagactccagacactgtctgtgtgactgtaacatttcttcaaggaaagtatagcgtctatggagttcagagggcacgtgtttgggggaaaatatatatgacatgaagaagaagatgaagaaaactgagaaaatggcgctcaaaaggcaactttaaaacaaaatatcacgagcagtcggggactgctgaagggctgggagctgggaggagccgctgcttactgatcccggggcttttccagcccacgggcgcctgacgcaggctggggcaagtggtgcgtggggcctggtccccaaggggcggctgagaggccgccactgagcatctctatctgtcattcctttagctatttaggcaccaaaggccctagctttgtagtgcagatgtgtagctatatgtcaaatagagggggaatggaggaccccctccttcctgcctcatggctgttcttgaaacagcttagagcgattctatgaaaaaatgtaataaaaaattaaaaaaaaaacaaaaaacaaaaaaaacaacaaaaaaaggaaaaataacgcttcaatgcttttaaaactagcggatccttttttatttgatacttttgagaggcgctttgatgaccctcatcacaagtctatgacacttttcctatggttttctgtattgctatgtctggatggagctgttaaaagatgaacaaattgcgtggatatttggggaaagcaacacaaatcttaaaactcacccgtgaagtgtgagaaaacaaggaggggaacaaatgggacttaccaagcaaggtcattgttgtgaaaagtctgtaaatgcttctaactcttccccctcttaaaatcataatagttgtacagaattttaaaaarggraaagtttaaaatacctatataatagaagaaaaattagaggaaagcaaaaaataaaaaaaaaaaaataaaaaaggaaaaaaaaaacctatagaagttagcattactgctaaaatcccagatgttgtaggactgtacttttgtagagtttagacagagcatcaatcccttctccccgcgagtgcagtcggatgccgttgtccccaagggccaggccgaactcgccccacacctgcgggcgcctggctgccgacgccggtggaggccacgccgtcggtcgggaacggtcgcgtcgcccgggtcgccgccgccgccgccgccgtcatcctcgcctctcgcttccctctgggagctgcgcgcgcttcactcaccttccgcttcactcgccttccacgcttgctccagagactttccgggcaagggagaactgggaactttcatcttaaaacaactagacaacacacacacacacaaaaccttaaa

SEQ ID NO: 124594 - DNA, 1083 bp, Homo sapiens
cagatggtgagtgaccgcggagctgggcagcacagatgcaggacgctgcctccatcgcagaaagttctcctggacgccactgttccagatcctgatggttcaagtgctacggatgcaatagctcagcgactggcagcgcagcacgtacctgctgtcgtgggaggtgagagccaccagtgcccgacagcggctgcaaggcagtggtggcgctctgcagccagccggcccacccctccaacatctgcaagggggtgggaggctgcctcaccaagctacctgctactcatgggggcgatgggcatcagggtggcctgcctggaggtttggagggatggagaggagagaggaggggaagaagctaccttcttcactagccttgctgagagacaagtgggtacggcccacaggcacctccaccagcctgccctctacatccagattcgcaaggtgccagctgccctgcacatgtgcgtggtgcagaagcctagcttatttcaggctgacagccgggcccccctggagcaggggctcaggcagcaagcgagcctggcaacagcccggcccatcgtctcaggtgccaatgctggccccgcaggtttaaaagtccctcaggctgcccagctgcaactgtccccctacctccatcgtggggttggggatgaagcatgccgctatggtcgctcacagccgaccaggaaagccttcgcactgtgcatctgtgcggcgcctgccctgccctgccctgccctggacggctcttggatggtctgtggccttggccaggagacccggacctccttggccaatgttcagtcgttcactcaacggccacagcagcagcctctgactgtctggatgttgaacaggggaaggaagccagcccagggcacgctcaccgtcatctgtcccattggacctggacatctactcacctccaccatcactgagagtgtgtgtgtaccgaggaggaacaagtaccactccaggaccctccctgctgcacagcactgtcagtggttggtgactgctgtccccacagccctgggccttgtcatccgggcaggcagcaagaagctgtgctga

SEQ ID NO: 124595 - DNA, 392 bp, Homo sapiens
cctgggacctggcttccctgcgctgcaccttgggcgccttttgcgaatgcgacttccggcccgacttgccggaaggatctgaagagctgggtccaagggaacctcactgcctgtggccgctccctcttcctcttcgatgagatggacaagatgcccccaggcctgatggaagtcctgcgacctttcctgggctcctcctgggtggtatacgggaccaattaccgcaaagccatcttcatcttcatcaggtggggcccggctttgcagtgggcacagtgcgggggccacttctcagaggttcagctctacagccttagcctgtgctcccagcagaatccagttccccatgggcttagctgggctttcccagtgccctccgccactctcagaga

SEQ ID NO: 124596 - DNA, 431 bp, Homo sapiens
tttttctggtcccacagctgagtttattatacttgttttcttttacaaaattaaaaacatctaaaaccaggcccaagtggcagcttgagtccctccatttctggaaactgagaaggctccacctggcttgatatggacacagggtgtggggtggaggggaggaggtatggtgcccgaccaaggaggcagactgaggagggagcaccgccacgagccacagtccctgagttataattcacagtaagaaggctcaggctgcagggggaggtcaaggctcagtgaggttctggggtgaccaggggtttccctggggaaggtggccggggccaagatgctctcgagccagtttagaggccagggcccttcctggccatctgtcccgtggcctagccgacactccgttcatctcacttggtgctctgggttcctgt

SEQ ID NO: 124597 - DNA, 4445 bp, Homo sapiens
atggcggctgcgacgcgcggctgccggccctggggctcgctcctcgggctgctcgggctggtctcggccgcggccgccgcctgggacctggcttccctgcgctgcaccttgggcgccttttgcgaatgcgacttccggcccgacttgccgggtctggagtgtgacctggctcagcacctggccggccagcatctggccaaggcgctggtggtgaaggcgctgaaggcctttgtgcgggacccagcccccaccaagccgctggtcctctccctgcacggctggaccggcaccggcaaatcctatgtcagctccctgctggcgcactacctcttccagggcggcctccgcagcccccgcgtgcaccacttttctcccgtcctccacttcccccaccccagccacatcgagcgctacaagaatggatctgaagagctgggtccaagggaacctcactgcctgtggccgctccctcttcctcttcgaatgagatggacaagattgcccccaggcctgaatggaagtcctgcggcctttcctgggctcctcctgggtggtatacgggaccaattaccgcaaagccatcttcatcttcatcagcaacacgggtggcgagcagatcaaccaggtggcattggaggcgtggcgcagccggcgggaccgcgaggagatcctcctgcaggagctggagccggtcatctcccgcgcggtgctggacaaacccgcaccattgccttctccaaactcggggcatcattggaaagagcgcctcctagacgcagtggtgcccttcctcccgctccagcggcaccacgtccggcactgcgtgctcaacgagctggcccagctgggccctggagccaaagggatgagggttgtccaggctgtgctggacagcaccaccttcttccctgaagacgagcagctcttctcctccaacggctgcaagaccgtggcctcccgaatcgccttcttcctctgactctgggggtgttgttcttcggcccccctgatggccaggccatgcaggaaaggccaggggcctctgtcacaggaacccagagcaccaagtgagatcaacggagtgtcggctaggccacgggacagatggccaggaagggccctggcctctaaactggctcgagagcatcttggccccggccaccttccccaggggaaacccctggtcaccccagaacctcactgagccttgacctccccctgcagcctgagccttcttactgtgaattataacgtcagggactgtggctcgtggcggtgctccctcctcagtctgccacccgttgccccttgcctctttggtcgggcaccatacctcctcccctccaccccacaccctgtgtccatatcaagccaggtgggagctttctcagtttccagaaatggagggactcaagctgccacttgggcctggtttttagatgtttttaattttgtaaaagaaaacaagtataataaactcagctgtgggaccagaggactgttgctaagacttttaattgctctggaaggaggcagctggctgagtgccagtgtggggaggtgggtagaactcatcccctccccagcaagaagggagggtctggatggtcccttcagacagcttcatagtaggtgaggtcctgatcaacctcagttttgctgagacttgggctgggtccccaggtggactcggccttgctggaagttgagctcatgccctggctcttgccctgggcaccctcagccttgctggacctctggccctggccttgggcatactcagttttgctgaggctccagtttgagtcatagaaagcctcagtcttggtggaacttcggagcagtcccctgcttcggccctgggtggcatcaaccttgctgggtctccagctccggccacgagcagccttgacctttctgggcctctgccttgggctccgggtggtcttggtcttgctgggctcctgccttgggccctgggtggcctcaatctcgctggagctctgcctctggccctgagtggcctcagtcttgctggagctctgcccctggccctgggtggccctggtcttgctggagttccgcctctggctttgggtggccttggtcttgctggagttcctcttgtgtatagtggccttggtcttgctggagttccgcctctggctctgggtgggctcagtcttgctaaggctctgcctctggccctgggtggccttgatttttctgggaccatggcttagtgcctccctgttgttcccagagtccgaggattgcgtcttcaacagtgacgagtcagagaatgtcacggcggtggctgaggtgctcctgtattcctggcagatagccgacatctcagtctctgaggtgcctgtggtcctgaagctcatgctggaggctgaagaggtctggtcaaggtagctgtcagacagggacgccaccttgctaggtatgagctctgattttttctcctcttttttctccttctccttttcttcctcctcctcaggggcctcagcctctccctctgagcttcccggttttacctgcggaatctcaggggtggccttcagctcctcggaggtcgcaatcaaaggctccccctgcttccatgagtgctgcagggccaaggccttctggcgctccaactcgtgccgtttaagcatccccacaatgccttgtgggctgccggcctgcaggctgccctccaccatctgctccagctgcagcctggccaggtgggctatctgggtgctaagcacctcctccaccgacatgcccgggaagaggttggtcatcagcagggacagctttggttgcttggggttgaggagcaggacagtggccacatcctggcgggccccaaaaatgttctgcagcagctgccggctcttggcccggtacaggtagtactgggccttctgggggttgtgccggatggccgtggagaagtggttctctgccttctggaactgcctgcacgacacagtgggtcccaagctgctatgagctgggccatcgtgggggcgggagcccacgcacttgcgcctctgctcgcagaagcccatcttctcctgcagcaggcccatgcgcgtgttggcgccctcgtcctgagggctcagcgccagcgcctgctggtagtccgcctcggcaaaggccaggttgcccagctggaagaagcaatcgcctcggttgatgtagagtcctttctcctgctgctcgtcccggagggccttgttcagcagcagcacgccctcctggtaggcgccctgcctgtagcagtgcacggcaaagtcgttgtaggtcagcaacagctggcgctgtgcctgccgcaccatgtcctcctggtcctcggtcaccatgtccagcaccttcaggaagtcctccactgccccatcgaactcctggagccgtcggtacatggtgccccttcccatgcagtaccggaagaggaagagactggggtccagagggttgttctcgatggcacggttgatccgctgcagtgcgtgctgcagcttgccctgcacagccaggatccccgcatcttggcgcgcctgctgggcctgggccaccatcttctggagcagcatcctggcctgcgggtgcttgggattcaacagcaaggcgctgtgcaggtcccggtagcagaggtggggcttctggagaaagttgtagagtctggcccggaagatgtagacatcggcgttggtggtgtcctgcttcagctcgttggtgatgagcgtgaggcaggcctgatgctgcttgagggccaggagacaggccatgcatcggtaacggaagcatggtttctcaggctggagctcagcagcatgtgagaagacattcagggcatccaggaaggcacactgctcaaaaaggcattgtccctgtaggtagagcacaaaggtgaggcgctccaggtgcttgcagttgtcctgctgtaatgagtaggcccttcgcaggttctgggcggccgaggagaagtcacagagctggaggtaggcctcagcccgtaaggcatagaagtccaccagctgtgggtccaggtggagtgcgcgggagaagagcagcacagctgtctcccagtctgcctgctccaagcactgctggcctctggagtagtattccctgactttgaggggcactgttaaccctgtgacctttggttttacatcacagatgctttggaacacgtggctggtcccaaagatgtgctgcaggatccctttgggggctggaatcacccatggctttgggatgtcccgtgaggggccctggtcaaccttcagggcatctgacacactccccagcattctgacttctgccccaggttctcccattttggtgaggtcaccttccccaccagctacccaagccagagacctctgtccaagcagccgccgagccttacaaggatctttcacatgcctggttcttggcat

SEQ ID NO: 124598 - DNA, 562 bp, Homo sapiens
gccacttcccctcaccagtcacagcagtccactgtggatgttggccagctccatgatcctcagccctacccccagcacgccatccaggtgcagcacatccaggtcagcgagcctaccgcctcggccccgtcctccgcccagggcagttcttccacacaggggcagggttgtgcagcagcagcagcagcagcagcagaattcctctgtgcagcacacgtacctgcccagtgcttggaattccttccgtggctattcatctgagattcaaatgatgacgcttcctccgggtcagtttgtgattacagacagtggtgtggcaactccagttactactggccaggtgaaggcggttacttcgggtcattatgtgttatcagaaagtcaatcagaattggaagaaaagcaaacttctgccctctctggtggagtccaggtcgagccacctgcacacagtgactccctggacccccagaccaacaaacaacagcagaccacacagtacatcatcaccaccaccaccaacgggaacggaagcagcgaagtgcatatcaccaaaccatga

SEQ ID NO: 124599 - DNA, 560 bp, Homo sapiens
ttttttccaatgactcctcttttattgctgatctggggcagactcacaaaggcctgtgccagttgctgacagtgtctgtcccgcgaggccttcctcctcgttgccgggtcttctgggtgtcaaagaaagtctcgtgttcctcccagcgccggtcacaggccgcacagaggaaattagactcaaaacagccgcagcaacagccatgatgcctgcagggatggggcccagtggctgcatgttcttcgtggctgtgtttgcagcgacattgggccctccaggccttggggtcaaaggtggcccgtctcttgagccagaactcacccacctcctctgggcgtgatgggataaagcagaacatgaagcagcggcactggcttaccttgcagggcaccgatatgtctgagatgatccggtgctctctcaacaagtgtccacaaaagcatctggactcatccccaatccggaaacagtcccataggtaatgggggcagcgccagccaatgtagagacccatagtctgtcaggatctaaagcctgtctagatgtggcttttggctttg

SEQ ID NO: 124600 - DNA, 2597 bp, Homo sapiens
ggctgatcaagccagaggtaaaccaacagagtgggcagtgtctgctacacagttccaactggatttcccaattacctagtgctatggtcttctttgacaacgtgtctcaagaagacatatcggtgccctgcaaggtaagccagtgccgctgcttcatgttctgctttatcccatcacgcccagagaaggtggcctgggggacagagcgagactctgtctcaaacaacaacaacaacaacaacaacaacaacaacaacaacaactactactactactactactactactactactactactactactacaacaatgtgaagggactgaggggaggccttttcctgactgattactccacctgctcaccccgcaagctgagtcctttccgctcctttgccagcaccgagctcttccacttccatgttcctgaggacacattcctggctgtttggaacctcatcatcttcaaggagcaagggggaacttttggggaccactgcccagaccaaagtgtgactgtgtatttccggtccggggcaccccctgtcatcaatcccctgcatacacacttcccaggggacacagctgtgcctggggttttctcactgaccctcagctggacactgcccaaccgcacctcaggcatctttaacgtcagcagccccttacctggggactggttcttggctgcccaccttccccaggcccacggccacatctctgtcaagggtctccaggatgagtgtcagtacctccttcagccgcagctgattgtccggcgtttgctggacgtcgctgtgctggttcctggccggccctcagagcaaaccctctccccacacaatcgctcagccctgtacaaggtctttgtgcccagcttcacttacagggtttcagcacagctggtgtgtgtggggggccgtggggtatctgcctgccccctgtcactgcgtctgcgtcccaaagccccacccctgcacaactcaagctctgtggcctgtggaggtgcctcaggatgccagctggagctggcactgcccccctgggggcactgggtctacgtgcgtgtggaaacatcatcccggggccctggtaggaccatccgcttccagctgtgtgtgcggttgcaagagtgcccacagcccggcctgctccgagccctggtccctggagctgccatgaacatgccccagtccctgggcaaccagccactgcccccagaaccgccatcccttggaacccctgcggaggggcctgggaccacgtccccacccgagcactgctggccagtgcgcccgactctgcgcaacgagctggacaccttctctgtccacttctacatcttctttggcccaagtgtggcccttccccctgagcgcccagccgtgttcgccatgaggctgttgccagtgctggacagtggaggcgtcctcagcctggagctccagctcaatgcgagctccgtgcgccaggaaaacgtgacggtgtttggatgcttgactcacgaggtgcccttgagcctgggggatgcagcagtgacctgttccaaagagtccctggccggcttcctcctctctgtcagtgccaccaccagggttgccaggctgcgaatcccattcccgcagacggggacctggttcctggccctccgctccctgtgcggggtggggcctcggttcgtgcggtgccgcaacgcgacggccgaggtgcggatgcgcaccttcctgtccccatgcgtggacgactgcgggccctacggccagtgcaagctgctgcgcacacacaattatctgtacgcagcctgcgagtgcaaggccgggtggagaggctggggctgcaccgacagtgcagatgcgctcacctatggattccagctgctgtccacactcctgctctgcctgagcaacctcatgtttctgccacctgtggtcctggccattcggagtcgatatgtgctggaagctgcagtctacaccttcaccatgttcttctccacgttctatcatgcctgtgaccagccaggcatcgtggttttctgcatcatggactacgatgtgctgcagttctgtgatttcctgggctccttaatgtccgtgtgggtcactgtcattgccatggctcgtttacagcccgtggtcaagcaggtgctgtatttgctgggagctatgctgctgtccatggctctgcagcttgaccgacatggactctggaacctgcttggacccagtctcttcgccctggggatcttggccacagcctggacagtacgcagcgtccgccgccggcactgctacccacccacgtggcgccgctggcttttctacttgtgccctggcagccttattgcaggcagtgccgtcctgctttatgcttttgtggagacccgggacaactacttctacattcacagcatttggcatatgctcattgcgggcagtgtgggcttcctgctgccccctcgtgccaagactgaccacggggtcccatctggagcccgggcccggggctgtggttaccagctatgcatcaacgagcaggaggagctgggcctcgtgggcccaggaggggccactgtcagcagcatctgtgccagctga

SEQ ID NO: 124601 - DNA, 1149 bp, Homo sapiens
atggtcacctacaagctagtactgatcagatgtggtgagagcacgtggaacctggagaatcacttcagcagctgtgcagaagagagcgatcggatcctctggacagtgctagatgccattgatcagatgcggctgccagtagtgaggacttggtgcctcaaggagtggcattacgggagtctggctggcctcaataaagcagaaacttctgcgaagcatggtgaggcccagagcaacatcagtaagggttgcaggtatgcagacctcactgaagatcagctatcctccggtgagagtctgaaggaaatagttcctcagatcaaggaggggaaatgggtactgactgcagcccatggcaacagccttcggggcattgtcaagcatctggagggtctctctgaagaggctatcatggagctgaacctgccgactggtattcccatcgtctatgaattggacaagaacttgaagcccatcaagcccatgcagttcctgggggatgaagtgactctgtgtaaagccatggaagctgtggctgcccagagcaaggctaagaagcgaaggccagcaggcatgctactgtcccccggaacaccctccctggccatcccttcctctgcccctgccccctgcacatgtcacactgaccacatctggaactcacccgtatatagtgacctggccatactgagagccaaccccttctgcgttcatatatctaaggcaaattatctggtcaatgagctacacacagcagtaaatgtagccggtctctacattggctggcgctgcccccattacctatgggactgtttccggattggggatgagtccagatgcttttgtggacacttgttgagagagcaccggatcatctcagacatatcggtgccctgcaaggtaagccagtgccgctgcttcatgttctgctttatcccatcacgcccagaggaggtgggctgttgctgcggctgttttgagtctaatttcctctgtgcggcctgtgaccggcgctgggaggaacacgagactttctttgacacccagaagacccggcaacgaggaggaaggcctcgcggagcagactatgtaccttttgcagagatggctgtgctccgagaagccatcctcagcaactctgacttctag

SEQ ID NO: 124602 - DNA, 934 bp, Homo sapiens
ggggcgcctcaatgagcggcactatgggggtctaaccggtctcaatatagcagaaactgctgcaaagcatggtgaggcccaagtgaagatctggaggcgctcctatgatgtgccaccacctccgaaggagcccgaccatcctttctacaggaacatcaggatggatcgcaggtatgcagacctcacagaagatcaactaccctcctgtgagagtctgaaggatactattgccagagctctgcccttctggaatgaagaaataggtccccagatcaaggaggggaaacgtgtactgattgcaacccatggcaacagcctccggggcattgtcaagccatgggagggtctctctgaagaggctatcatggagctgaacctgccgactggtattcccattgtctatgaattggacaagaacttgaagcctatcaagcccatgcagtttctggggggatgaagagacggtgcgcaaagccatggaagctgtggctgcccagggcaaggccaagaagtgaaggccggcggggaggatactgtccccaggagcaccctccctgcccgtcttgtccctctgcccctcccacctgcacatgtcacactgaccacatctgtagacatcttgagttgtagctgcagacggggaccaggggctcccatttaattgtagcaattatgacgccaggacccactcacttgatcaagcctagccgcatacgactccaattgcccacacctcccactcaacgcgggacctacgcccctcgctccgccggaaccataccccaccaatcgtgagtcgcccgagcttcctacgcacacgacagtcagagagcgcacccgtacaccccgtgacatgggcgcaacactcgccccacctgacctggactcccagactccacgacacccgcggattgcgctcgaccgaggacgaggc

SEQ ID NO: 124603 - DNA, 539 bp, Homo sapiens
  misc_feature (1)...(539): n = a,t,c or g
ggaggagataaaccaattttatgtctatcatgttatacaaaaatctagaaataatagatttgtacagaaaaaaatgataataaatgagaacacaaaacatataatttaaatttggtattttttcccccatgatattaggatgataatcatttcaaagcacatgtctagcttcagagtaggatttgttcactggccaaagcctgccatgaaactatggctttcagcatctgtctgctctactggctcttgacaaaactcttgaggtcttcaagaaaagtaatgtactcctggtgctccagggctgtgttgagtgtataattagtatccttccattcagactcgccagtggactgaaagctaacttccctgatagagaagatgtcactctcagcctcgtcttcttgtccaacctcatcctctggataatgacagtccaacacaagggccttcttgccatcatcattctttataactttcaccacgaaattggggagtgatgtcagttcaggcttctgttcttcaaacttctgnctttgcga

SEQ ID NO: 124604 - DNA, 1329 bp, Homo sapiens
ccggcggcgcctcaggtcgcggggcgcctaggcctgggttgtcctttgcatctgcacgtgttcgcagtcgtttccgcgatgctgcctctgctgcgctgcgtgccccgtgtgctgggctcctccgtcgccggcctccgcgctgccgcgcccgcctcgcctttccggcagctcctgcagccggcaccccggctgtgcacccggcccttcgggctgctcagcgtgcgcgcaggttccgagcggcggccgggcctcctgcggcctcgcggaccctgcgcctgtggctgtggctgcggctcgctgcacaccgacggagacaaagcttttgttgatttcctgagtgatgaaattaaggaggaaagaaaaattcagaagcataaaaccctccctaagatgtctggaggttgggagctggaactgaatgggacagaagcgaaattagtgcggaaagttgccggggaaaaaatccccgttccctttcaacattaacaacagcattccccccaacattttatggtgagaaggacccctcgcaaagccagaaggtttgaagacagggagcctgaactgacatcacttcccaaatttggtggttgaagttataaagaatgatgatggcaggaaggcccctggtgttggactgtcattatccagaggatgaggttggacaagaagacgaggctgagagtgacatcttctctatccagggaagttagctttcagtcccactggcgagtctgaatggaaggatactaattatacactcaacacagattccttggactgggccttatatgaccacctaatggatttccttgccgaccgaggggtggacaacacttttgcagatgagctggtggagctcagcacagccctggagcaccaggagtacattacttttcttgaagacctccaagaagttttgtcaagagcccatcgagcagacagatgctgaaagccatagtttcatggcaggctttgatcagtgaacaaatcctactctgaagctagacatgtgctttgaaatgattatcatcctaatatcatgggggaaaaaataccaaatttaaattatatgttttgtgttctcatttattatcatttttttctgtacaaatctaattattttctagattttttgtataacatggatagacataaacacctggtttatctcctccaaggcagtttgtctttttctattcctcccccttcaacctgtgtcacaaaagaccaagaacagatgtcggaaaagtttttttttcttcagtattgtttaaaagtttcaatacaaaataagttataaataaaaggcttgtatgtaaaaaaaaa

SEQ ID NO: 124605 - DNA, 1412 bp, Homo sapiens
gcggccggctgccggaaagagaactcacttgaccttcgctctcagtttccaaggggcagggattccgaggactttaatgtaaaagaggaggctaatgctgctgctgaagagatccgttatacccacattctcaatcgggtactccctccagacatccgtatattggcctgggcccctgtagaaccaagcttcagtgctaggttcagctgccttgagcggacttaccgctattttttccctcgtgctgatttagatattgtaaccatggattatgcagctcagaagtatgttggcacccatgatttcaggaacttgtgtaaaatggatgtagccaacggtgtgattaattttcagaggactattctatctgctcaagtacagctagtgggccagagcccaggtgaggggagatggcaagaacctttccagttatgtcagtttgaagtgactggccaggcattcctttatcatcaagtccgatgtatgatggctatcctctttctgattggccaaggaatggagaagccagagattattgatgaagctgctgaatatagagaaaaatccccaaaagcctcaatatagtatggcttgtagaatttcctctagtcttataatgcctgtaagtttgaaaatgtcaagtggatctatgaccaggaggctcaggagttcaaatattacccacctacaacaactgtgggctaatcatgctgtcaaaactcacatgttgtatagtatgctacaaggactggacactgttccagtaccctgtggaatgggaccaaagatggatggaatgacagaatggggaaatgttaagccctctgtcataaagcagacccagtgcctttgtagaaggagtgaagatgcgcacatataagcccctcatggaccgtcctaaatgccaaggactggaattccgggatccagcattttgtacgtaggggacggaattgagcacccacatttattccatgaggaaagaaacaaaagccaaaagggactgtaatgacacactagaggaagagaatactaatttggagacaccaaacaagagggtctgtgttgacacagaaattaaaagcatcatttaaccatagacaatttgccaggatctaggaaccacctaatggtaggtggacagaaaaggaaaaaaaaaaaaaaatttacttgcaagtactaggaattcagatgatcagctcttaaaaaaaaaaaaaaagcaaaaagactaaagccctattaaggaagttattgctttaataagaaatttcaaatattctcttatcccggtccaaaaggattaagcgattaaagaacgtaaaatggagatgtatttacatacacctggaaacctgtgccttgtattcaaattcattaaagcctaatcctgcaagaaaaaaaaaaaaaaaaaa

SEQ ID NO: 124606 - DNA, 437 bp, Homo sapiens
  misc_feature (1)...(437): n = a,t,c or g
ctggttgaccgcctgcggaattcggacgaggcgctccgnactganacggcgtccctgggccggacggcggtgtcctggcgtggcggtttgccggcactggagcgggagcgcactgggcgcgggaccgggaggcgcagggaccggacggctcccgagtcgcccacctgacggtaccgagagggcggcgcccctccgagcagagccgtcccggccactcccctgggatctgacttggctcttgcggtcgcgggcaccgtgaagccctggggtgtgcgtggctcctcctgctagaagaagtcttcacttcccaggagagccaaagcgtgtctggccctaggtgggaaaagaactggctgtgacctttgccctgacctggaagggcccagccttgggctgaatggcagcacccacgcccgcccgttcaatgctgccaccac

SEQ ID NO: 124607 - DNA, 594 bp, Homo sapiens
ttttttttttttaaatacaaatgttttattacgcaaaccacatgtaggtcccaggctcaggggcttaccctacagcccccactggtccctggctccaagcctgctccttgccctttgcccaccctggaaagccaggatctcctatggagtgtgtaggtgtccacgagtgtaccggtgtgcgggcctcctgggctgcaggcactcaggcatggtggcagcattgagggaaagacaggtgtttggggagcggtgtccccacctgcccaggctcaaggagtcacaggggtctgcacagtcctttctgctgtggaacacgtgataagatgctggtcggggggaacatagcaacagcgccgagcagagagcccacctggatggccacgccggcttgccagcaatgccggccggcccccgccatgcagcagggagctgggctgccaccttcacgtaggagaacacgccaagacacagcacccacgacagcaccacgaggaccacccccgccgaggtgcccaccaggggcgggcaggggctcaggactgccagcgccatcaggtagcccccacagaacacgcccagcagagagaggcggcc

SEQ ID NO: 124608 - DNA, 2061 bp, Homo sapiens
gccacgggtgagtcgggtcgtggctgctgccgggtcctgcgcgctccggactgaggtggcgtccctgggccggacggcggtgtcccggcgtggcgggaagccggcactggagcgggagcgcactgggcgcgggaccgggaggcgcagggaccggacggctcccgagtcgcccacctgacggtaccgagagggcggcgcccctccgagcagagccgtcccggccactcccctgggatctgacttggctcttgcggtcgcgggcaccgtgaagccctggggtgtgcgtggctcctcctggtaggcgccctttcccggcgtccggcttggggtggtggtggcgttgactccagccccgcctctccctggagaggagggctccactcgctccttcggcctcctcccctggggccgcagcgactcgggccggcttcctgcttccctgcctgccggcggtcccgctggctagaagaagtcttcacttcccaggagagccaaagcgtgtctggccctaggtgggaaaagaactggctgtgacctttgccctgacctggaagggcccagccttgggctgaatggcagcacccacgcccgcccgtccggtgctgacccacctgctggtggctctcttcggcatgggctcctgggctgcggtcaatgggatctgggtggagctacctgtggtggtcaaagagcttccagagggttggagcctcccctcttacgtctctgtgcttgtggctctggggaacctgggtctgctggtggtgaccctctggaggaggctggccccaggaaaggacgagcaggtccccatccgggtggtgcaggtgctgggcatggtgggcacagccctgctggcctctctgtggcaccatgtggccccagtggcaggacagttgcattctgtggccttcttagcactggcctttgtgctggcactggcatgctgtgcctcgaatgtcactttcctgcccttcttgagccacctgccacctcgcttcttacggtcattcttcctggggtcaaggcctgagtgccctgcttgccctgcgtgctggccctagtgcagggtgtgggccgcctcgagtgcccgccagcccccatcaacggcacccctggccccccgctcgacttccttgagcgttttcccgccagcaccttcttctgggcactgactgcccttctggtcgcttcagctgctgccttccagggtcttctgctgctgttgccgccaccaccatctgtacccacaggggagttaggatcaggcctccaggtgggagccccaggagcagaggaagaggtggaagagtcctcaccactgcaagagccaccaagccaggcagcaggcaccacccctggtccagaccctaaggcctatcagcttctatcagcccgcagtgcctgcctgctgggcctgttggccgccaccaacgcgctgaccaatggcgtgctgcctgccgtgcagagcttttcctgcttaccctacgggcgtctggccttaccacctgggctgtggtgctgggcagtgctgccaatcccctgggcctgcttcctgggccatgggtgttgctgtgcaggtccttggcagggctggggcggccttctctctgctgggcgtgttctgtgggggctacctgatgggcgctggcagtcctgagcccctgcccgcccctggtgggcacctcggcgggggtggtcctcgtggtgctgtcgtgggtgctgtgtcttggcgtgttctcctacgtgaaggtggcagccagctccctgctgcatggcgggggccggccggcattgctggcagccggcgtggccatccagggaggcaggacaccgaactgtgatcagtatgacgggcctggcagcaaggcccattctcccaggcaagaggccccacttctgcagaagggcccctgcagctacagggagcgtgcaggcactggggatggaccatcagaggaggaaggagcccctgtgacccggaaagcctctagtctgggccccatcaaacatcagggggcaggccagctcccaggggggctcaggaccacccaactctga

SEQ ID NO: 124609 - DNA, 1198 bp, Homo sapiens
ttttgccacttaaaaatttctcaaatttcttctttccacgtaattgtgacataggtattatttgtgttatatcccagatggctcactagggctactaatgtttagagtttgatttgtgtctttagcagtaaacattttaaaagaaacttttagcagttttttagggtaattacatgtcttcctttcaagggtccagattatagactctacaagagtgaaccagagttaacaacagtggcagaagttgatgaatctaatggagaagaaaaatcagaacctgtttcagagatagaaacttcagttgttaaaggttcccactttcctgttggagtagtccctccaagagcaaaatcaccaacacccgaatcttcgacaatagcttcctatgtaaccttgaggaaaactaagaagatgatggatctaagaacggaaagaccaagaagtgcagtggaacagctctgtttggctgaaagtactcgaccaaggatgactgtggaagagcaaatggaaagaataagaagacattcaacaagcgtgcctgagggagaagaaaaaagggttaaaatgtttttcggtgctttcagaccagtcacccttacaaagcccttcaaatttaagggataatccatttaggactactcagactcgaaggagggatgataaggaactggacactgccattagagaaaatgatgtaaagccagaccatgaaactcctgcaacagaaattgttcaactaaaagaaaccgaaccccaaaatgtggacttcagcaaagagggttactggattgccccagtgtcagcattttgccaggaaggtcaatcaagagggcaaagaaccaaaacagttaaaggtgtaagcaggatagtggacatggaacgtaaattggatggaaagggaaggttaccggggaatctgttggcccagattggaaatggcacggatatcagaggatcccccccgctcgaccctcggttctggacaacggagatcgtccccagtcaaggtgattatatcgcagatctcacttgggagcttctcttcaaccatgttgtacagcacaatgagtctagctggccgacttcccagcggtcctttgtgaggtgggtcaacgacacagtcctgttccagcacacgggaaaggaagtcaagctagcattacatcagaaagggaccatacacagagattactgctaa

SEQ ID NO: 124610 - DNA, 436 bp, Homo sapiens
  misc_feature (1)...(436): n = a,t,c or g
accggtccggaattcccgggcccatatggtcccaccacatggggagggaacctggacatggaagcattgacggtcagagctgtggggtaggggtgtctgaatcctcctgtcgtgattgggtacactggttccctccccatatggtcccaccacatcatacgctacacacgacgggcattccgcatccggccatagtcacaccaacagtcaaacaggaatcgtcccagagtgatgtcggctcactccatagttcaaagcatcaggactccnnnnnnnnnnnnnnnnggggcgcccgtttaaaagaaccaaatttaactacggcggggtggggaggaaaaattttttttaaggggcccccaaaaaaaatttcgggggcggggtttaaaaaacgtggggaggggaaaaacctgggggtaaccaaattaaatcgcttggg

SEQ ID NO: 124611 - DNA, 959 bp, Homo sapiens
tccgcctcgctccgaaagtttccgagacaaatcccgggaaagtttggaagaagcggccaagaggcaagatggagggctctttaaggggccaccgtatcccggctaccccttcatcatgatccccgacctgacgagcccctacctccccaacggatcgctctcgcccaccgcccgaacctatctccagatgaaatggccactgcttgatgtccaggcagggagcctccagagtagacaagccctcaaggatgcccggtccccatcaccggcacacattgtctctaacaaagtgccagtggtgcagcaccctcaccatgtccaccccctcacgcctcttatcacgtacagcaatgaacacttcacgccgggaaacccacctccacacttaccagccgacgtagaccccaaaacaggaatcccacggcctccgcaccctccagatatatccccgtattacccactatcgcctggcaccgtaggacaaatcccccatccgctaggatggttagtaccacagcaaggtcaaccagtgtacccaatcacgacaggaggattcagacacccctaccccacagctctgaccgtcaatgcttccatgtccagctttctgtcttctaggttccctccccatatggtcccaccacatcatacgctacacacgacgggcattccgcatccggccatagtcacaccaacagtcaaacaggaatcgtcccagagtgatgtcggctcactccatagttcaaagcatcaggactccaaaaaggaagaagaaaagaagaagccccacataaagaaacctcttaatgcattcatgttgtatatgaaggaaatgagagcaaaggtcgtagctgagtgcacgttgaaagaaagcgcggccatcaaccagatccttgggcggaggtggcatgcactgtccagagaagagcaagcgaaatactacgagctggcccgggtcg

SEQ ID NO: 124612 - DNA, 1047 bp, Homo sapiens
  misc_feature (1)...(1047): n = a,t,c or g
atggtaagcgcggccggcggcgggcgggcgnggcaggggtgcgcggtggccggcccgctgcatcccgcgcgcctgccctgctgcgtccacggctgtccagtccgcatgcatgctctcagcctttgccatgttcgctgtcactttgcggtaactttcaggttgatgtaccttgactggttgcccacagttatagagccttgtggggtcgggtctaacaaagtgccagtggtgcagcaccctcaccatgtccaccccctcacgcctcttatcacgtacagcaatgaacacttcacgccgggaaacccacctccacacttaccagccgacgtagaccccaaaacaggatgtgctcctgtggaactggcagatgtgcggtggcacgtacttgcagaatccgctcatgtgtgccttgtgaagctcttagcccctgcgacgcacgcggtgcccattcagcaggaatcccacggcctccgcaccctccagatatatccccgtattacccactatcgcctggcaccgcaaggtcaaccagtgtacccaatcacgacaggaggattcagacacccctaccccacagctctgaccgtcaatgcttccatgtccagaaagcatcaggactccaaaaaggaagaagaaaagaagaagccccacataaagaaacctcttaatgcattcatgttgtatatgaaggaaatgagagcaaaggtcgtagctgagtgcacgttgaaagaaagcgcggccatcaaccagatccttgggcggaggctggggtacaatgcaagggcatttggcttgaagcggggttggaggttggacaaataccgggggtttgtgtggatggagatggcagtatggtcacttcctcctgccttctccttccagggaaagaagaagaagaggaaaagggacaagcagccgggagagaccaatgacaagcccgaaagctctctgggcgccagcagcctcatggtggtgggaaactggacctaccgtaatcaagaaaaacatattcccacgttggaacttgaccatacagttagtgtgtag

SEQ ID NO: 124613 - DNA, 398 bp, Homo sapiens
cttgcctgcagccatcgaagccatgaagaacgcccaccgggaggaaatggagcgggagctggagaagagccagcggtcccagatcagcagcgtcaactcggatgttgaggccctgcggcgccagtacctggaggagctgcagtcggtgcagcgggaactggaggtcctctcggagcagtactcgcagaagtgcctggagaatgcccatctggcccaggcgctggaggccgagcggcaggccctgcggcagtgccagcgtgagaaccaggagctcaatgcccacaaccaggtcttattgcgggtaaaggaatcggaaatacagtacctgaaacaggagattagctccctcaaggatgagctgcagacggcactgcgggacaagaagtacgcaagtgaca

SEQ ID NO: 124614 - DNA, 381 bp, Homo sapiens
tccacaccactctctgctgtgttgacttcctgttgtcttcatcaaagcttttttccgtggtattctaaaattaggccagcagtgggggctgggagggcatctgtgttagtcctttcctggctgtgacccgccacactcactgtcagtattaaggcccagcagcctgttgataagctaccctgactcctcacccgctagtctggctgttaagaggagaaagtgcactgccttccagcccaggaggaggacagcattttgtatttgtgccactgatgcagcttagaacgcacacccctgagagtcgtggcaaacctttcacaacctggaaaatgttgaaagcaaccattcctattcttgaatgattaatattgaatcttgcac

SEQ ID NO: 124615 - DNA, 928 bp, Homo sapiens
gcggccgcgctgagcccctagcccgccgggagcgccaggccgttcaggcctgcgccgccgccgccgccgccgtcgccgccgcgccgaccatgtcggcagccaaggagaacccgtgcaggaaattccaggccaacatcttcaacaagagcaagtgtcagaactgcttcaagccccgcgagtcgcatctgctcaacgacgaggacctgacgcaggcaaaacccatttatggcggttggctgctcctggctccagatgggaccgactttgacaacccagtgcaccgggtctcggaaatggcagcgacggttcttcatcctttacgagcacggcctcttgcgctacgccctggatgagatgatgtcttcccagtgactctccttggggcctggggaaaccacaagggagcttggattcattcacccattgctgccttgctgtgtgcctcagaggggctcagaggtggaaaataaatatgaaaaagcatccttgtcttctagaatctcgtcggctgctgggaagaccaaggggccagccatcgcagggagcataagcactgagacaggcacacgtgcctgcccggctatcgtagccaggctggcagccttgcaactccctggggaagaacaatctaggaacattctggggtgtggagcaggaaaggaagtgtcacatgcaaaaggcaggatcagccaaagcagaggggctgaagaagcagtgattcccccacctaatgtcagaagtaaaatcagttcatggtgaaaatttggggaaacaaaatcatgcagcaaaattgcctattaaaccccacacggaggtaaaaatcggttcatattgtggttatgtatctattctcttatgatgtgtatttatgtgcttatgtaagacctaaaaacaataatttttaaataaaccaaatattattaataag

SEQ ID NO: 124616 - DNA, 585 bp, Homo sapiens
ccatggtgggcattcgaaaggaatcggaaatacagtacctgaaacaggagagtagctccctcaaggatgagctgcagacggcactgcgggacaagaagtacgcaagtgacaagtacaaagactatctacactgagctcagcatcgcgaaggctaaggctgactgtgacatcagcaggttgaaggagcagctcaaggctgcaacggaagcactgggggagaagtcccctgacagtgccacggtgtccggatatgatataatgaaatctaaaagcaaccctgacttcttgaagaaagacagatcctgtgtcacccggcaactcagaaacatcaggtccaagtccgtaattgagcaggtctcgtgggatacctgaaatgcacccgcttcccggcccatgcaggagagtctgaaggaaggcctgacggtgcaagaacggttgaagctctttgaatccagggacttgaagaaagactaggtgtgtcccatccaagttgagcaacgcgccttccccagcttgcagcagcacaccccaagcgctgcttttcacctgtacctttgttttattattattattattattgctaaa

SEQ ID NO: 124617 - DNA, 3956 bp, Homo sapiens
gcggccgcgctgagcccctatcccgccgggagcgccaggccggccaggcctgcgccgccgccgccgccgccgtcgccgccgcgccgaccatgtcggcagccaaggagaacccgtgcaggaaattccaggccaacatcttcaacaagagcaagtgtcagaactgcttcaagccccgcgagtcgcatctgctcaacgacgaggatcctgacgcaggcaaaacccatttatggcggttggctgctcctggctccagatgggaccgactttgacaacccagtgcaccggtctcggaaatggcagcgacggttcttcatcctttacgagcacggcctcttgcgctacgccctggatgagatgcccacgacccttcctcagggcaccatcaacatgaaccagtgcacagatgtggtggatggggagggccgcacgggccagaagttctacctgtgtattctgacgcctgagaaggagcatttcatccgggcggagaccaaggagatcgtcagtgggtggctggagatgctcatggtctatccccggagccaacaagcaggatcagaaggagaaacggaaagtggagcccccccacaccacaggagcctgggcctgccaaggtggctgttaccagcagcacagcagcagcagcagcagcagcagcagcatcccccagtgctgagaaagtccccaccaccaagtccacactctggcaggaagaaatgaggaccaaggaccagccagatggcagcagcctgagtccagctcagagtcccagccagagccagcctcctgctgccagctccctgcgggaacctgggctagagagcaaagaagcatctccctcagctccctggatgtggccagccagccacctgcctacgtggactctggcagcactagggggcgggggacagagagactggggagcgcctttgcctttaaagccagcaggcaatatgccaccctggccgacgtccctaaggccatcaggatcagccaccgagaagccttccaggccccagtgttgggcagaggagccctcatcctggaagtggcctgttggaggtcccaggtgattgaaaagtttgaggccttggacattgagaaggcagagcacatggagaccaatgcagtggggccctcaccatccagcgacacacgccagggccgcagcgagaagagggcgttccctaggaagcgggacttcaccaatgaagcccccccagctcctctcccagacgcctcggcttcccccctgtctccacaccgaagagccaagtcactggacaggaggtccacggagccctccgtgacgcccgacctgctgaatttcaagaaaggctggctgactaagcagtatgaggacggccagtggaagaaacactggtttgtcctcgccgatcaaagcctgagatactacagggattcagtggctgaggaggcagccgacttggatggagaaattgacttgtccgcatgttacggatgtcacagagtatccagttcagagaaactatggcttccagatacatacaaaggagggcgagtttaccctgtcggccatgacatctgggattcggcggaactggatccagaccatcatgaagcacgggcaacccgaccactgccccggatgtgaccagctcgttgccagaggaaaaaaacaagagcagctgctcttttgagacctgcccgaggcctactgagaagcaagaggcagagctgggggagccggaccctgagcagaagaggagccgcgcacgggagccggaggcgagagggccgctccaagacctttgactgggctgagttccgtcccatccagcaggccctggctcaggagcgggtgggcggcgtggggcctgctgacacccacgagcccctggcgccctgaggcggagcatggggagctggagcgggagcgtgcacgaaggcggtaggagcgccgcaagcgcttcgggatgctcgacgccacagacgggccaggcactgaggatgcagccctgcgcatggaggtggaccggagcccagggctgcctatgagcgacctcaaaacgcataacgtccacgtggagattgagcagcggtggcatcaggtggagaccacacctctccgggaagagaagcaggtgcccatcgcgcccgtccacctgtcttctgaagatgggggtgaccggctctccacacacgagctgacctctctgctcgagaaggagctggagcagagccagaaggaggcctcagaccttctggagcagaaccggctcctgcaggaccagctgagggtggccctgggccgggagcagagcgcccgtgagggctacgtgctgcaggccacgtgcgagcgagggtttgcagcaatggaagaaacgcaccagaagaagattgaagatctccagaggcagcaccagcgggagctagagaaacttcgagaagagaaagaccgcctcctagccgaggagacagcggccaccatctcagccatcgaagccatgaagaacgcccaccgggaggaaatggagcgggagctggagaagagccagcggtcccagatcagcagcgtcaactcggatgttgaggccctgcggggccagtacctggaagagctgcagtccgtgcatcgggaactggagggtcctctcggagcagtactcggcaaagtgcctggagaatgcccatctggcccaggcgctggaggccgagcggcaggccctgcggcagtgccagcgtgagaaccaggagctcaatgcccacaaccaggagctgaacaaccgcctggctgcagagatcacacggttgcggacgctgctgactggggacggcggtggggaagccactgggtcaccccttgcacaaggcaaggatgcccattaacttaaagggttaatggcgggtaaaggaatcggaaatacagtacctgaaacaggagattagctccctcaaggatgagctgcagacggcactgcggggacaagaagtacgcaagtgacaagtacaaagacatctacacagagctcagcatcgcgaaggctaaggctgcactgctgacatcagcaggttgaaggagcagctcaaggctgcaacggaagcactgggggagaagtcccctgacagtgccacggtgtccggatattgatataattgaaatctaaaagcaacccttgacttcttgaagaaagacagatcctgtgtcacccggcaactcagaaacatcaggtccaagagtctgaaggaaggcctgacggtgcaagaacggttgaagctctttgaatccagggacttgaagaaagactaggtgtgtcccatccaagttgagcacgcgcctttccccagcttgcagcagcacaccccaagcgctgcttttcacctgtacctttgttttatttattattattattattgctgttgttgtcatcgttaactgtgggcatggaatgcgtgaggctggcttctgggttgtccacaccactctctgctgtgttgacttcctgttgtcttcatcaaagcttttttccgtggtattctaaaattaggccagcagtgggggctgggagggcatctgtgttagtcctttcctggctgtgacccgccacactcactgtcagtattaaggcccagcagcctgttgataagctaccctgtctcaccatgtgctggtgtggaaacggggcccagccagcacgcctcaaggtagatggaatccccactggtcagagaaaaagctatgcggacactccagcttggcctgggtcacagcactgactcctcacccgctagtctggctgttaagaggagaaagtgcactgccttccagcccaggaggaggacagcattttgtatttgttccactgatgcagcttagacccacacccctgagagtcgtggcaaacctttcacaacctggaaaatgttgaaagcaaccattcctatttttgtttgttttttattaaatcttgcac

SEQ ID NO: 124618 - DNA, 4419 bp, Homo sapiens
  misc_feature (1)...(4419): n = a,t,c or g
aagctccaggcaaaagaagagattttaaggaaatttgcaagtgaatctccaaaggacatggaagagccacggagtacccctgaagagacagaaagggatggcactttgctcccaggccaaccagtccaagccactagggcacctctaggcctcccacacacaaggctcgaggatgaggacgaggacctgggggctcctccgggggaagagtacggtgatggcagccccagtagggaagacagcatggtgcccccaaagtcagtggaagtgcttgacagggagggccatcagcagggcacagccaaactcgaccaaggggcacctggtgttaaaaggcaaagaatccggttctccacaatccagtgccaaagatacattcaccccgaagggtctgagaagacctggaccagcagcacatcttccgacaccagccaggaccggtcaccctcggaagaaagcatgtcctcagagcctgcacccagtgtactgcctgcaactggcgactctgacacgtacctctccatcatccactccctggagaccaagctctacgtcacagaggaaaagctcaaagacgtgaccgtgaggctggagagccagcagggtcagagccgtgaggcactgctcgcactgcaccaccagtgggcgggcaccgaggcccagctgcgtgagcagctccgcgccagcctgctccaggttggcgcactggcctcccagctggagcaggagaggcaggagagggccaggagggttgaagggcatgttggagagcttggggacttccaggtcaagaatagtcaggccctgatgtgcctggaaaattgccgagaacaactgagatctctgcctagggccagccaggaggatgagcaggacgcacgcgcagcctccctggccagtgtggagagtgcactcgtcagcgccatccaagccctgcagcactggccggccccagcccatggcggggcccgtgcacagctggagacaggtggcaccgaggagaatgggaagcctgcctccctgcagcagtgctcccagtctgagttgacagagcaggagcaggtgaggcttctttctgaccagattgctctggaggcctcgctgatcagccagatagcagattccctgaagaacacaacatcagatgtctcccgaatgctccatgagatttcttggtcaggacagccaccgatggaatctgctggggcccccgtagacacctgggccaggaaggtcctagtggatggtgagttctggagccaggttgagtctctgaggaagcacttggggacactgggaggagaggcagtcggtgcctcaggagacgggcagcaaagcatcccacagggcctggcccccatcctggccaatgccacatgggtcagggcagagctcagctttgccacacagtcagtgagggagtcgttccaccgcaggctacagagcatccaggagaccctgcggggcacccagacggccctgcggcagcacaaatgcctgctgagggaaatcctgggagcctaccaaaccccagactttgaaagagtgatgcagcaggtcttggaagccctcaggcttccagcgggccatgaagatggtgttcagctgtcctgggacctgagccccttaggagaagtcctgggccgagactcagacagctctcaggagcccttcgatgtgtctgaccagagccctggggcctttgttgctattcaggaggagcttgcccagcagctgaaggagaaggccagcctcttagaggagatagcggctgccttaccatctctgccacctgtggaatcgctgagagattgccagaagcttctccaggtgtcccagagtctctcgtataacacttgtttgggaggcctcggtcagtattcttcattgttggttcaggatgccattattcaggcccaggtttgctatgcgtcctgcagaatccggctagaatatgagaaggagctccagctctgcaaggagtcctggcaaacccgggagccctcctgctcagagcaggcacaggcagcccgggccctgagggaggagtatgaggagcttctccgcaagcagaagagcgagtacctggatgtgatcgccattgttgaaagggagaatgcagagctcaaggccaaggccgcccagctagaccatcagcagcagtgtctggaggatgcagagagcaagcacagcatgagcatgttcaccctgcggggcaggtatgaaaaggagattcggtgtgtggtggagcagctgaccaggaccgagagcacactgcaggctgagcgcagccgggtcctgagccagctggatgcctcggtcagagacaggcaggacatggagaggcatcatggtgagcagatacagaccctggaggacaggttccagctcaaggtccgggagctgcagacgatccacgaggaggagctgaggaccctgcaggagcactactcgcagagcctgaggtgccttcaggacaccctctgcctccaccaggggccacaccccaaggccctgccagcccctgcccccaactggcaggccacccagggagaggctgactccatgacggggctgagggagcgcatccaggagctggaggcccagatggatgtcatgcgggaggagctgggacacaaggacctggagggcgacgcggccacactgcgtgagaagtaccagagggacttggagagccttaaggccacgtgcgagcgagggtttgcagcaatggaagaaacgcaccagaagaagattgaagatctccagaggcagcaccagcgggagctagagaaacttcgagaagagaaagaccgcctcctagccgaggagacagcggccaccatctcagccatcgaagccatgaagaacgcccaccgggaggaaatggagcgggactgggagaagagccagcggtcccagatcagcagcgtcaactgggatgttgaggccctgcggcgccagtacctggagggagctgcagtcggtgcagcgtggaacttggaggtcctcttcgggagcagttattcgcagaaatgcctggagaatgcccatctggcccaggcgctggaggccgagcggcaggccctgcggcagtgccagcgtgagaaccaggagctcaatgcccacaaccaggagctgaacaaccgcctggctgcagagatcacacggttgcggacgctgctgactggggacggcggtggggaggccactgggtcaccccttgcacagggcaaggatgcctatgaactagaggtcttattgcgggtaaaggaatcggaaatacagtacctgaaacaggagattagctccctcaaggatgagctgcagacggcactgcgggacaagaagtacgcaagtgacaagtacaaagacatctacacagagctcagcatcgcgaaggctaaggctgactgtgacatcagcaggttgaaggagcagctcaaggctgcaacggaagcactgggggagaagtcccctgacagtgccacggtgtccggatatgatataatgaaatctaaaagcaaccctgacttcttgaagaaagacagatcctgtgtcacccggcaactcagaaacatcaggtccaagagtctgaaggaaggcctgacggtgcaagaacggttgaagctctttgaatccagggacttgaagaaagactaggtgtgtcccatccaagttgagcacgcgccttccccagcttgcagcagcacaccccaaggcgctgctttttcacctgtacctttgttttattattattatttattattggctgttgttgtcatcgttaactgtgggggcatgggaatgcggtggagggtgggcttctggggtttgtccacaccactctctggctgtgtttgacttcctgttgttctttcatcaaagctttttttcccgtggtattctaaaaattagggccagccagtggggggcttgggagggcaatctgtgttaaatcctttccctggctgtgacccggcccaacactcactgtcaagttatttaaggccccagcagccctgttgataaagctacccttgggttttttctcnccancacatgtgctggttgtggaaaacggggccccagcccagcacgccctcaaggtagatgggaatcccccactggttcagagaaaaaggctatgcggaacactcccagcttggccctgggtcacaagcactgactcctcacccgctaagtctgggctgttaagagggagaaagtgcactgccttccgagcccagggaggagggacagcattttgtatttgtttcacttgatgcagcttagaaccacaccccctgagagtcgttggcaaaccttttcacaacctggggaaatttttgaaagcaaccatttcctatttttgtttgttttttattaaatcttgcacaaaaaaaaaaaaaaaaaaag

SEQ ID NO: 124619 - DNA, 414 bp, Homo sapiens
tcaatagcagccatcattgccaccaccaccaccaccaccataatcatcaccatcaacatcatcagcataatcattgtcaatcaacaccatcactataatcatcactatgattaccatcatgatgacaattactaccaccaccaccaccaccaccactgaggcaggtggttcatttgaggcgaggagttcaagaccagctggggcaatatagtgagacccatcttgggaagctgccgccccgcttcccttgctcacacagggctttgcagtagtggtggcagccgcggcagaaactggctctggggaagcaattgattcgtctactgccagcagcccggagttgcctacgcggatggctggtccgagttttctccgcttctggcagtggtatttctttttgtcttggtcctgcat

SEQ ID NO: 124620 - DNA, 446 bp, Homo sapiens
ggctcttgacacaggtctacaataacaagacagtgccccagtgggctcgagactcggatagctctgctgccgcccgccgtgttcccttctggctccaggacgctcccgccctcgacgcccggcagcagcagcccacagccccggcgcccttgacccgggggccgggcccgccgcgcacacacgccctggcctcgggaacgagggggccagcccgaggagaggagaaggtggctgacacaccccaccacggagagggtggctgtccaaactcggagaaggagccgttcctgcacccgacagcacccccgcccaggctcccaaccccaagcccagagagcgggcctgttcctcacactctgcagcaagctcctcctctgcgccgccatcttggaggaacccctgcgggagcgcccgcctccccgcagagcagcgagtggggcggctag

SEQ ID NO: 124621 - DNA, 420 bp, Homo sapiens
tcgctggccgtgttttgccacgagttgccacacaagctgggggatttccccgccttgctgcacgcggggctgtccgtgcgccaagcactgctgctgaacctggcctccgcgctcacggccttcgctggtctctacgtggcactcgcggttggagtcagcgaggagagcgaggcctggatcctggcagtggccaccggcctgttcctcttcctgctgcacaacgtgggcctgctgggcggctggaccgtcctgctgctgctgtccctgtacgaggatgacatcaccttctgataccctgccctagtcccccacctttgacttaagatcccacacctcacaaacctacagcccagaaaccagaagcccctatagaggccccagtcccaactccagtaaagacactcttgtccttggaaaaaa

SEQ ID NO: 124622 - DNA, 702 bp, Homo sapiens
cttactcaaggctcctcccaggtggcggaggagagcccggagctgctgaaccctgagcccagagagactgagcccagagttgaggctactgccctatatgatcactctgggcgacgccgtgcacaacttcgccgacggggctggccgtgggcgccgccttcgcgatcctcctggaagaccgggctggccacctcgctggccgtgttctgccacgagttgccacacgagcttgggggacttcgcccccttgctgcaccgggggctgttccttgcgccaaagaactgctgctgaacctggcctccgcgctaacggccttcgctggtctctacgtggcactcgcggttggagtcagcgaggagagcgaggcctggatctctggcagtggccacccgccttgttcctttacgtagcaatttgcgacatgctcccggcgatgttgaaagtacgggacccgcggccctggctccttttcctgctgcacaacgtgggcctgttgggaggctggaccgtccctgctgatgctgtccctgtacgaggatgacatcaccttctgataccctgccctagtcccccacctttgacttaagatccccacacctcacaaacctacagcccagaaaccagaagcccctattgaggccccagttccaaattcagttaaagccactcttgtccttggaaaaaaaacaaaaaaaaaaaaa

SEQ ID NO: 124623 - DNA, 693 bp, Homo sapiens
atggtaggagtatttacaccatggaaatcagcaaagctacaaatgagggactttttccctcagagatttaccagggtagcaggacgagctgcagacaaaactcctgacaccgagttaaagaaggaagtggtttattcggccaggaacattgggaaagactcctgtctcaagagccgagctccccaattacataatgcttttgaagatgcatgtgagatggaggtggtgttctggggtctaattgctgaacgaatagtgactgaaaaagtctacgagagtgaatcctgcacagatagtgaagaggagcttaacatgaagacatcctcagtacacagaccccctgccatgactgtgaaaaaagaacccagagaggaacgaaagggccccaagaaagggactgctgctctgggcaaagccaacagacaggcagacgggtctcaccctgtggccaccaccaccacatgccagcaaagactactgccaggctactgccaatgttcacttaaggcgcaagggctcttcaatcagcttatggtgaatgctttcaggcctggaattcaccctttcaggcagttggccttccctctggcccagagcaggtccaaaaatgctgtccaagagccaaggcctggaatcatggaccccaagagcccgcttggtgttctaccccactgtggccaaggtggtatctaa

SEQ ID NO: 124624 - DNA, 465 bp, Homo sapiens
cagcacgccatagtgactggcgatgctgtcggaatggacgatatcccgcaagaggcccggcagtaccggcataaccaagcctatgcctacagcatccagggtgacggtgccgaggatgacgatgagcgcattgttagatttcatacacgatttagtgctatacaatgtgcagctgccgtccctagagctcctgctgaatcctcttcgtcttccaaaaagtttgagcagtcacatcttcacatgtcaagtgagacacaagccaacaatgagctgaccaccaatggtcatggcccacctgcatccaagcaggtttcccagcagcccaaaggaattatgggaatgtttgcctccaaagctgctgctaaaacccaagaaaccaacaaggaaacgaaaacagaggctaaagaagtaacaaatattttttattgcacctacactgatgccataagaggaaaaacttgctaa

SEQ ID NO: 124625 - DNA, 627 bp, Homo sapiens
atgctaggccttttacttgaatattttcatttaatctttggaacgaccaataaaagctcaagtggagaaaacaaaagaaaacgaaaacgcgtactaaaatctaaaacttacctggatggggaaggctgcatagcctgtgtgcatggcgggaagacgtactcccacggggaggtgtggcacccggccttccgtgccttcggccccttgccctgcatcctatgcacctgtgaggatggccgccaggactgccagcgtgtgacctgtcccaccgagtacccctgccgtcaccccgagaaagtggctgggaagtgctgcaagatttgcccagaggacaaagcagaccctggccacagtgagatcagttctaccaggtgtcccaaggcaccgggccgggtcctcgtccacacatcggtatccccaagcccagacaacctgcgtcgctttgccctggaacacgaggcctcggacttggtggagatctacctctggaagctggtaaaaggaggaatggacgaagaaagtggagctgttcagcctggagaagagaagactcagggggacaggactgctggcttcgtggctctgaagggctgtcccaggcagagggagcagctgtgttctgagtga

SEQ ID NO: 124626 - DNA, 933 bp, Homo sapiens
ctctgggctttcccagctccgaagtcaatactgagatcccagatgtgtccagagacatcctgaagaggctcggggataaatttaaagtcaatttggactcagaacaagcagtgaaagaagaaaaaatagtggagcagcctacagtgtctgtcacggaaccaaagctggcaactcctgcaggcctgaaaaaatccagcaaaaaagcagagcctgttaaggtgctgcagaaggaaaaaaaaagggggaagcgagtagcattatctgatgatgagacaaaggaaactgaaaacatgaggaaaaagaggagaagaatcaaacttcctgaatctgatagcagtgaagatgaagaaactactctaagaggaattgaaaatggtaagagaggcttccgaaaaaaggatattagctcaactatacaagtaaggtgtgccggcttcctcttcaccttccgccatgattcagtgaagtccaagctagctgtgactgccagcatccatgtgtacagcatccagaaagccatgctaaaggacagtgggcctctgttcaatactgactatgacatccttaaaagcaacttgcagaactgcagcaaatttagtgctatacaatgtgcagctgccgtccctagagctcctgctgaatcctcttcgtcttccaaaaagtttgagcagtcacatcttcacatgtcaagtgagacacaagccaacaatgagctgaccaccaatggtcatggcccacctgcatccaagcaggtttcccagcagcccaaaggaattatgggaatgtttgcctccaaagctgctgctaaaacccaagaaaccaacaaggaaacgaaaacagaggctaaagaagtaacaaatgcatctgcagcaggcaacaaggcaccagggaaagggaatatgatgagcaacttttttggaaaagctgctatga

SEQ ID NO: 124627 - DNA, 3837 bp, Homo sapiens
agacgtttcccgccggcgggagctgtggctgtgattgagagaggggttagaggcgggtcccagcgctgccgcaccatggcggaccagctttatctggaaaatatagacgagttcgtgcacggaccaaaacaagatcgtgacatacaaatggctgagctatacactaggggttcatgttaaccaggccaaacagatgctgtatgattatgttgaaaggaaacgaaaagaaaattcaggagcccaactgcatgttacctacttggtgtctggcagtctcattcagaatggacattcctgccacaaggttgcagtattgagagaagataaattggaagctgtgaagtccaagctagctgtgactgccagcatccatgtgtacagcatccaagaaagccatgctaaaggacagtgggcctctgttcaatactgactatgacatccttaaaagcaacttgcagaactgcagcaaatttagtgctatacaatgtgcaagctgccgtccccagagctcctgctgaatcctcttcgtcttccaaaaagtttgagcagtcacatcttcacatgtcaagtgagacacaagccaacaatgagctgaccaccaatggtcatggcccacctgcatccaagcaggtttcccagcagcccaaaggaattatgggaatgtttgcctccaaagctgctgctaaaacccaagaaaccaacaaggaaacgaaaacagaggctaaagaagtaacaaatgcatctgcagcaggcaacaaggcaccagggaaagggaatatgatgagcaacttttttggaaaagctgctatgaataaatttaaagtcaatttggactcagaacaagcagtgaaagaagaaaaaatagtggagcagcctacagtgtctgtcacggaaccaaagctggcaactcctgcaggcctgaaaaaatccagcaaaaaagcagagcctgttaaggtgctgcagaaggaaaaaaaaaagggggaagcgagtagcattatctgatgatgagacaaaggaaactgaaaacatgaggaaaaagaggagaactaatcaaacttcctgaatctgataacagtgaatatgaagtctttccagactcttctggggcttatgaagctgagtcaccatccccacctcctcctccgtctccacctcttgaaccagtgccaaagactgagcctgaacctccttctgtcaagagctcaagtggagaaaacaaaagaaaacgaaaacgcgtactaaaatctaaaacttacctggatggggaaggctgcatagtgactgaaaaagtctacgagagtgaatcctgcacagatagtgaagaggagcttaacatgaagacatcctcagtacacagaccccctgccatgactgtgaaaaaagaacccagagaggaacgaaagggccccaagaaagggactgctgctctgggcaaagccaacagacaggtgtccattactggcttcttccagaggaaataaactgccatctctggtagatcagagacttggagtggtcaagggagaagaccaagaaatgtactcctcacttactatgtaagttcatctagatctccacctcacctgtatcaaaagactgttctttcatcctgtgaggtttatactatttctggtttttaaccaaaaggaaatcatctggaagcaggaggcaaaaagctgttaccttctaatgacatttaaaaagcacagtctttgacctgtccagggagaaggatttactccaaaattatactgggaacagttttcaggaattctcactgaaggccatttagtggcttaacccactgtggctccacttcaccctatggcccggggtccggcatatgggcacagggaattattccttcttgtttcctctgttattggtaagggaattcatgtggggtgttttcttatcctttacattcttgctgggatacgttttacccctgtttgtcttcctgcagtacccacatttctgtcccctaacctcctgaggctgttctctgtaagtcttttaagttttggttggactaaaggctgaagtgaaaatctccctgtaatcctcttcctccattatgcagtacacggacacctggctacagaccaggacgtaggcttgtgtttctgttccttttcaccaaaagctctcctggggaccttcactttgcaaattaagtggttagggaaaaagccctcaggcaagaaacaccaaatagaaatttaatggatgtggtttcaacttccaccagaaaattacctcgagtcagcattgacgatattggaaggagctgccgtgctgctgatacggggtgtgctttatgctgctcctttgccggtttgttgatcccctccttccccactctcaatacctagagagtgaaacccagtacaatgagataaagactaaaaagagaaatcccttcctatatacagtgtgctacatttacaaaaaatttctccttaagaaaacagaatattcaaaaacaagcacttttccaggaagttagtgaggaagataaaggcacacatttatttataaatggatgttgctcctttgtatttttagcttccctatttgcttaaaagtacaggctccctaagagaggatggagagggagagactgaattgttagtaggtctaaacatcaaagaaaacatttttattagttacttatggaaaatcatctattacaatgataaccttcaagtgacttccattatggctggacaggcggtgagctcagtggattgcagtggtgtgctggtgattttgcacagtgagctctgcggaaggggtcaggctcaactgctgatgtgtctcacacgtagcagacaaggggtgtctgactggcttcttttgcctcaagatggtgtatgtcgtaagtgatgcaatcagctgtctgctttttaaggttgggattgtgctgactttgggattaacatggagcttctttagcaaccaagcatgaacttgattaagaccagaagtttgggaaatgagtcctggcattatgtctaggactaaagcagtggctttgtatagcaagctgagtaaaggttgacatattccaaaacccttcttttttaaaatgaaaaaggatggagaggaaggatggaaagccctggacttaaacctttagaaaaaacttcctggagagaaatccccttttaaacagttacttttgtcattgcctctggtcatttgtcctaaataggaatggaaaattaaaagaaaagcaacaatcccaatcttttttcctaaaaattatgcctggggtcctcgactaaaactgaatttgaattggaaaattctggtgttggttggagttcccatcttgcaagggataatacaaatccctatgatctctatgcccaatatgctgcctcaactctgagctgtctgcaaggcttagtaagtattgagtggtgtgttttttttttctttttatacaataccatgttaaccacatgagttaaataaatttgagaagttgttttaaaacagtgcttcaaactgagtatctgatgagtctcttatttgatggatggtaacagtgttgcaattatttaagctctgaatgggaagaaggctggttttcagttgatattgttaaaactgcatacccacagtctgagatgaacaagttatttgctgccttcatcgtttttttcagcactggggaaatgttagtttcagccaacctcattttttagttcatctagaagaaaatctagcacattgtattagtttggcttcatcacttgctagctgtatgactgtgggcaagtttcacagcctcaagttctttatcaaaataaaactaaaatgagttaa

SEQ ID NO: 124628 - DNA, 643 bp, Homo sapiens
atccctttccggaacctcaacacgtacgacatccactggctggagaagatcctgaaggcccgaaagcatgtccacatggtcatcattagccagctgcagtgagtgcccagcctcagattggtgaaatagtagccatcctctccagtcatcagtcggcttggattgcagaagcgcgtgatatactggatattagactgaaggcatgggggttgcccttcaaaacaatgtagatgagggtggggaggaagtcatctgctgacgccagctcgttctaggtgatcttgatggcatcgaagatgtgcttgctgcacttggtgatgcaggccagcttgtctcgaggcacacgcctggaatccatttcaatatccttctttgatccgaaccctgggagaacgtcctgaagatttcttcactgtggtaaccttgcgggtcttcttgttggttttctttccttcaaacttggagaatatgagggattgggccccttggctgctctgactgctggcaaaggcctcttcttcctcccgctggagtctcgcctgcgtctccaccggcgtccaaagccccgctcgcccgcgtcgttcgggtaggtctcgactccgcggtccgctaccgcctcatacccaccctcctcctcgacgaa

SEQ ID NO: 124629 - DNA, 2274 bp, Homo sapiens
gcccgagctgctcactgagggagtcaaagagcccatcatggatagtcaagagagggattccggggaccctctggtggacgagagcctgaagagacagggctttcaagaaaattatgacgcgaggctctcacggatcgacatcgccaacacactaagggagcaggtccaggaccttttcaataagaaatacggggaagccttgggcatcaagtacccggtccaggtcccctacaagcggatcaagagtaaccccggctccgtgatcatcgaggggctgcccccaggaatcccgttccgaaagccctgtaccttcggctcccagaacctggagaggattcttgctgtggctgacaagatcaagttcacagccaccatggccttttcaaggactcatcccaaagcctgatgaagatgacgccaacagactcggggagaaaggtgatcctgcgggagcagatgtaaggaactctttcaacgagaaattacggtgagggccctggggcctgaaccggccggtgctggtcccttataaacttaatccgggacagcccagacgccgtggaggtcccgggtctgccagatgacatcccaatccggaaccccaacacgtacgacatccaccggctggagaagatcctgaaggcccgagagcatgtccgcatggccatcattagccagctgcagctcctgcagcagcagcagcaccacatctcagagggcagaccctttgcagaaatctgcaatgatgccaaggtgccaggtgagtcggaggcaaggaagccacccttctgccctgtggggactagactgttccttttgaaaaaaagggagcctgaggtctccatgaacaaggacaggtatccccaagaggccccccgaaacctgcagagcctgcgcaccctgttggacatcctggacgacccgcggggcggctgcgtgcacctgcgccagagccagtcccgctggcggggggccgacacgcgggagctgccccgtgggatgctggagggcctgcgccagctgctgagcgccatcggctgcccccgggaccccacgtgcgccccggcccagcctggggaccagccgctgcagcgcctggcgtttacgctggccaacgagccacagacagtcctggagaagcccccgcccaggttcaggcggcgcggcgcggcccgcagcccggagcagctgtacaccccccgccgaggcggcgtcctgcccgcggagccagagcggacccagagcgcaagcgcggacgcaggttcattggcctgcagggccctggaggtggactcgggatgtccgactggccccccgtgcccgaagggaagtcggaggctcaccatcaccagcggcgtggactgcggcctgctgaagcagatgaaggagctggagcaggagaaggtggtgctgctgcagggtttggagatgatggcggggtcgcgactgcagcggctgcaaccagtgcaggaccgccagtgccgcctgggccagagcagagccagcgccgactttgggcctgcggggagcccccacccactggggcggctactgcctaaggtacaggaggtggcccggtgcgtgggggagttgctggctgcggccggtgccagccgggccctacctacgtcctcctccgggcccctctgccctgccctgacgttcacctccttcccggggtggcagcagcagactatccttatgctgaaggagcagaaccgacgcctcacccaggaggtgaccgagaagagtgggcgcgtcatgcagctggagcagaagtcggcgctcataatgaagcagctgtttgaggcccaggccctcagccagcaggacggggaggcctctggactccaccttcatctagcccgtttgggctgggcggaaccccagggcagttctgtcactcagcccttcgagggcggacgccctgtctcacccaacgtctctggctggagaccccctgcagcccaggcagtcccggagtgggcgccttcctgccccacttgccatccaggcttcccaggtccgcccccagctggtccccgcaccgagcccttgactcggttttggctcctggtgctgacatgggctggggctctcttgagtctgcatggtccgcaattgctactgccgctgtcaggaacagtgggggactccctgtttccagcggtgctgctctgggtcccatctccagggaaaggcaatgctcacgccgggctgcacttccgacaatggccagtagaggggggccgggcagctctgatgcggcgctga

SEQ ID NO: 124630 - DNA, 3137 bp, Homo sapiens
atgaggaggcgcttccttctgcctgtccatggcccacagcaaaggaatgtctgcttctgggggttggatgggggactgctggcagaactggaaaccttcttcagaaccaatcggaactcgaggcgcagcggctgggtattccaggagagcgcatgcgcagacgcatggccacagactgccggtcagtgtcagtaggcggcgggttagtgtccgcaggctccgactcggccgccgacaccaataagctacaaggacgagctttaccactgcctgtactactgctacctgcgcgacttcccagcctgcggcgtagggcgcagcaagggcctgacgctgagcgagtaggcgctgcgcaccaagcggctgtggcccggagggcactgtcgggcagaagctcctcagtggccaccacaagcccgctagctccggctacagcccttgccgcacactcgcgtcacctgagcctgtgtaggtcagacaagggcagcatgtctgaagactgcgggccaggaacctctggggagctgggtgggctgaggccgatcaaaattgaaccagaggttctggacatcattcaggtcactgtcccagatgccttgccaacctctgaggaaatgacagactcaatgcctgggcacctgccatcggaggattctggttatgggatggagacgctgacagataagaaatggacctgggatggtgccaaggccattggcatctcggaacccatcaaggtgctgtactccaagtttctgatgcacccggaggagctgtttgtggtggggctgcccgaaggcatctccctccgcagacccaactgcttcgggatcgccaagctctggaagattctggaggccagcaacagcatccagtttgtcatcaagagtggtgaggagatccgctgggacagggagctcttctgcagggcctgctctatgccaggagggagtctgctgcagatagcaaaaagctacacaacagggctggagagcaagagttgtgatcctgcagtagaatcaaaggcttcagcaggccaggatgaaatgcagccacatgcccggcccaagctgctcactgagggagtcaaagagcccatcgtggatagtcaagagagggattccagggaccctctggtgggcgagagcctgaagagacagggctttcaagaaaattacgacgcgaggctcttacggattgacattgccaacacgctaagggagcaggtccaggagcttttcaataagacatatggggaagccttgggcatcaagtacccggttcaggtcccctacaagtggatcaagagtaaccccggctccatgatcatcgaggagctgccaccaggaatcctgttccgaaagcccttcggctcccagaacctggagaggattcttgccatggccaacaagatcacgttcacagtcaccaggcctttccaaggactcatccgaaagcctgatgaagatgataccaacagacttggggaggtgatcctgcaggagcaggtgaaggaactcttcaacgagaaatacagtcagtgtctgtggtcagggtgtgagccaccacctgacatccctttccggaacctcaacacgtacgacatccactggctggagaagatcctgaaggcccgaaagcatgtccacatggtcatcattagccagctgcagctcctgcagcagcagcagcaccacatctcagagggcagaccctttgcagaaatctgcaatgatgccaaggtgccaggtgagtcggaggcaaggaagccacccttctgccctgtggggactagactgttccttttgaaaaaaagggagcctgaggtctccatgaacaaggacaggtatccccaagaggccccccgaaacctgcagagcctgcgcaccctgttggacatcctggacgacccgcggggcggctgcgtgcacctgcgccagagccagtcccgctggcggggggccgacacgcgggagctgccccgtgggatgctggagggcctgcgccagctgctgagcgccatcggctgcccccgggaccccacgtgcgccccggcccagcctggggaccagccgctgcagcgcctggcgtttacgctggccaacgagccacagacagtcctggagaagcccccgcccaggttcaggcggcgcggcgcggcccgcagcccggagcagctgtacaccccccgccgaggcggcgtcctgcccgcggagccagagcggacccagagcgcaagcgcggacgcaggttcattggcctgcagggccctggaggtggactcgggatgtccgactggccccccgtgcccgaagggaagtcggaggctcaccatcaccagcggcgtggactgcggcctgctgaagcagatgaaggagctggagcaggagaaggtggtgctgctgcagggtttggagatgatggcggggtcgcgactgcagcggctgcaaccagtgcaggagcgccagtgccgcctgggccagagcagagccagcgccgactttgggcctgcggggagcccccacccactggggcggctactgcctaagcagcagactatccttatgctgaaggagcagaaccgacgcctcacccaggaggtgaccgagaagagtgggcgcgtcatgcagctggagcagaagtcggcgctcataatgaagcagctgtttgaggcccaggccctcagccagcaggacggggaggcctctggactccaccttcatctagcccgtttgggctgggcggaaccccagggcagttctgtcactcagcccttcgagggcggacgccctgtctcacccaacgtctctggctggagaccccctgcagcccaggcagtcccggagtgggcgccttcctgccccacttgccatccaggcttcccaggtccgcccccagctggtccccgcaccgagcccttgactcggttttggctcctggtgctgacatgggctggggctctcttgagtctgcatggtccgcaattgctactgccgctgtcaggaacagtgggggactccctgtttccagcggtgctgctctgggtcccatctccagggaaaggcaatgctcacgccgggctgcacttccgacaatggccagtagaggggggccgggcagctctgatgcggcgctga

SEQ ID NO: 124631 - DNA, 352 bp, Homo sapiens
cctatcttgactgaaacgggcacctggcgtgtaggccaagtctggagccagccccgtaggagagctccaggaggcagagatgcctgcggggtcaaagcctgccagctgactgctgtgccctcctcaggaccctgctccagcagctgcagaaactccagactctggtcaccaacaagatctccagaccttacaagatggccgccacccagactgggacctgcctcatggtaggtgtggctccctccaccacagacccacaggaggagagtacttcccaaggctggctttttccagggttgggcagagctttaaagatcgggaacaacggggggcaacggccccaggggacccg

SEQ ID NO: 124632 - DNA, 856 bp, Homo sapiens
atggagaagcaagtcagttactatggtggagccaaacctgaaagttggagccatgaagaaaggagccaggtggaggtgggaacaggagaagtgccctcccgaagcctcctattctacgatgacggggcaggcttatgggaagatggccgcagcaccctgctgcccatggagcccccagatggctgggaaatcaaccccggggggccggcagagcagcggccccgggaccacctgcagcatgatcacctggacagcacccacgagaccaccaagtacctgagtgaggcctggcctaaagacggtggaaacggcaccagccccgacttctcccactccaaggagtggttccacgacagtggggagcgtccgaccccggcggtcccccggaagggcgctctcggagggagacaagcgctggagcggaatcaggcaggcgaggctgctgggccagggcgcggggagctctccgaggtgctgaagccgccccaaggccccgacggcgcccctcctcgcgggcggcccggccggcacgcagcggcgcggctggagctcccggccctcgaccccgacggatccctggcggcgcagcccgccccacccacccgcagcctcccgctggggaccctgctccagcagctgcagaaactccagactctggtcaccaacaagatctccagaccttacaagatggccgccacccagactgggacctgcctcatggtaggtgtggctccctccaccacagacccacaggaggagagttcttcccaaggctggctttttccagggttgggcagagctttaaggatcggtaacatcgtgggcagcgtcccagggtacaccatcctggcgcctg

SEQ ID NO: 124633 - DNA, 2152 bp, Homo sapiens
atggctgccgcggccgccatggccaccagccccgctgctgggcctcagccccttgtccaggctgcccatcccccaccagattctacttctatttataccccgggactcatttcagactttgacttctcagggagcatcctcggagcccccagccaattaatgcctccttctgtactactgctaccagccattgaacagctacactgttccagacattacctcttgttttattctcatggcaacccacataccaaagcctgtgtggccttcacagttggtgtggaaggtggccccacactcagaggctcaccttctctgagcttaagctgtgcccagaactccaagcccagccacttccccaactgtgcagggcaggcaaccagctttagggaggaggccccgggagagatgactcagctgccagtgatcaaagcagagcctctggaggtgaaccagttcctcaaagtgacaccggaggacctggtgcagatgcctccgacgccccccagcagccatggcagtgacagcgacggctcccagagtccccgctctctgcccccctccagccctgtcaggcccatggcgcgctcctccacggccatctccacctccccactcctcactgcccctcacaaattacaggggacatcagggccactgctcctgacagaggaggagaagcggaccctgattgctgagggctaccccatccccacaaaactccccctcaccaaagccgaggagaaggccttgaagagagtccggaggaaaatcaagaacaagatctcagcccaggagagccgtcgtaagaagaaggagtatgtggagtgtctagaaaagaaggtggagacatttacatctgagaacaatgaactgtggaagaaggtggagaccctggaagaatgccaacaggaccctgctccagcagctgcagaaactccagactctggtcaccaacaagatctccagaccttacaagatggccgccacccagactgggacctgcctcatggtggcagccttgtgctttgttctggtgctgggctccctcgtgccctgccttcccgagttctcctccggctcccagactgtgaaggaagaccccctggccgcagacggcgtctacacggccagccagatgccctcccgaagcctcctattctacgatgacggggcaggcttatgggaagatggccgcagcaccctgctgcccatggagcccccagatggctgggaaatcaaccccggggggccggcagagcagcggccccgggaccacctgcagcatgatcacctggacagcacccacgagaccaccaagtacctgagtgaggcctggcctaaagacgagtgtaatgggcaccaaaccatatttctcccactccaaggagtggttccacgacaaggatatgggccccaacaccaccatcaaactctcctaggccatgccaagacccaggacataggacggacccctggtacccagaagaggagttcttgctcactaacccggatccgcctcgtgcccctgcctcctggagcttcccattccaggagaaaaggctccacttcccagcccttccttgcccctgacatttggactcttcccttgggccgaccactctgttctcattctcccttcccaccaacatccatccgtccttctcagacaaaccactcactgggtacccccacctcctctctccatatgcccaacaaggaccactgcttccctgccccccaaacctgcacccaaacagacacatcaacgcaccccactcacagacaccctttaaccccacccccactgttacagaggaccaaggaacaggaaattgttttgtaaataatggaaccttattttttattattggccaatcccctagagatattgtattttacaaatctccctcttcccttcgccccctcccttgttttatattttatgaagttagtgcgggctttgctgctccctggcccaggaaagagggactacctgaccctcacctgggcacccccctgctgctgcccaagccgctgggcctttttaattgccaaactgctctcttcatcagctcagcacatgctttaagaaagcaaaaccaaaaaaaaaaaaaaaaaaagatgcagcatcaaaaaaaaaaaaaaaaaa

SEQ ID NO: 124634 - DNA, 1895 bp, Homo sapiens
atggatgggctccaggccagtgcagggccgttgaggcgcgggcggccgaagcgccggcgcaagccccagccacacagcgggtcggtcctggccctgcccttgaggtccaggaagatacgaaagcagctgcgaagtgttgtatcccgcatggcagcgctgaggacgcagacgctgcctagcgagaactcggaggaatcgagggtggagtcgacggccgacgacctgggggacgcgctacccgcccggcgagagccatacggccacctggggcccgcagagctgctggaggcctcgcccgccgcgcgctccctgcagaccccgtcggcgcgcctggtgcccgcttccgcgccgcccgcgcgcctggtggaggtgcccgccgcgccggtccgggtggtggagacctcggccctgctgtgcaccgcgcaacacttagcggccgtccagtcgtccggggcccctgcgacggcgtcggggccgcaggtggataacacgggtggggagccggcctgggactccccgctgcggcgcgtcttggccgagctgaaccgcatccccagcagccggcggcgagcggcccgcctctttgagtggctcatcgcgcccatgccgccagatcacttttaccggcgcctatgggagcgcgaggcggtgctggtgcggcggcaggaccacacctactaccagggacttttctctaccgctgacctggattcgatgctgcgcaacgaggaggtgcagttcggccagcatttggacgccgctcgctacatcaacggacgacgcgagaccctgaacccacccggccgcgcgctgcccgccgaccgcgtggtccctgtaccaggccggctgctcgcttgcgtctcctctgtccgcaggctttctctactactgtgtggcagtttttggctgtgcttcaagagcagtttggaagcatggcaggctccaacgtttacctcacgccccctaactcgcagggctttgccccccactacgacgacatcgaggccttcgtgctgcagctggaaggtaggaaactctggcgtgtataccgaccccgagtcccaaccgaggaactggctctgacatccagccccaacttcagtcaggacgacctcggtgagccggtgctgcagaccgtgctggaacctggagatttgctgtattttcctcggggcttcattcaccaagctgaatgccaggatggagtccactctctgcacctcaccttgtccacgtaccagcgcaatacctggggtgacttcttagaggccatactgcctctggcagtgcaggctgcaatggaagaaaatgtggagtttcggaggggtctgccccgagacttcatggattacatgggggcccagcattcagattctaaggatccgcgaagaaccgctttcatggagaaggtgcgggtcttggttgcccgcctgggacactttgctcctgttgatgctgtggccgaccagcgagccaaagacttcattcacgattctctgccccctgttttgactgatagggagagggcactaagtgtttacgggcttccaattcgctgggaggctggagaacctgtaaacgtgggggcccagttgacaacagaaacagaagtccatatgcttcaggatgggatagctcggctggtgggtgaggggggccatttgtttctctattacacagtggaaaactcccgtgtgtatcatctggaagaacccaagtgcttggaaatatacccccagcaagctgatgccatggaactgttgcttggttcttatccagagtttgtgagagtgggggacctgccctgtgacagtgtggaggaccagctgtccttggcaaccacgttgtatgataaggggctgctgctcactaagatgcctctagccctaaattag

SEQ ID NO: 124635 - DNA, 413 bp, Homo sapiens
ggtcctctcgggcatgcccgagctgcgcctgggcctcaacgacaaggtcctctttgacaacacgggccgcggcaaaagcaaatccgtggagctggaggatgtgaagttccaccagtgtgtgcggctatcacgcttcgagaatgaccgcaccatctccttcatcccacccgacggcgagttcgagctcatgtcctaccgtctcaacacccacgtcaagcctttgatatggatcgagtcggtgatcgagaagcactcccacagccgcatcgagtacatgatcaagggcggcaaggagtacctgatgcgggcccacttcggcctgcctagtgtggaggccgaagacaaggagggcaagcccccgatcagtgtcaagttcgagatcccttacttcactacctccggcatccaggtgg

SEQ ID NO: 124636 - DNA, 972 bp, Homo sapiens
atggggcagctgggcaccccagagcaggggctgtccttaccagcctggggcagcacagggccgagctttggctccccagcacaggggctcatgctcccctccctggactgggggcggcaaggagtcctgatgcgggcccacttcggcctgcctagtgtggaggccgaagacaaggagggcaagcccccgatcagtgtcaagttcgagatcccttacttcactacctccggcatccaggtacgtctggcgcctggctccctctatggtcggaaaaggagcagtcttggcaaaagtcatccgagcctgctgcaggtggacgggcagtactcccagcagcagggtgccgggcaccctaggggcacaaagcgggggtcacaaacccctggggcgcgacaacgtgttgaacccggcaagtgctggcccgtggtctgtgtacctcatgtcccatgtccacccacgtctacggcactcaggaagcacttgcgcccgcagcgggccatttacacgtcgaggctggcacctggcgcgctcgggggccactgtagcgtctgcctgctccctggactcgcaggcctcgcctgtggcgccttcccagggccagcctgggtcacgagatgctgtcactcagccagatcagtattgacccaccagggagcacctcccggaccggacataacggtccccgcgcggctccccgaaccggaagtggaggtgagctgtcgcgggcggcgcccggccttgctcaacgcccagcagtccccaccgtcgctgccgccgccaccgccctcggccgctgccgaggcctcctgcagccatcatgtccgccagcgccgtctacgtgctggacctgaagggcaaggcttttatctcttccacgatagaaataaacacagcattttaaaactggcaaagccccgagagccgttctgtgtggtaacagatagcaggattcagtttggcccacctcattga

SEQ ID NO: 124637 - DNA, 2176 bp, Homo sapiens
  misc_feature (1)...(2176): n = a,t,c or g
atgaagcagccccaggtgaaccagaggctgccttttctggagctgctgaaatccaagggctattttcaagtcggtcagaacctgccctgtaccccccacccaaccctgccgaaatgtcaaggccagaagctgtggcgttggtgcgggtaccacctccttcactctgagcgtgtggccccacaggtacatcactcaggaaggccacaagctggaaacaggggccccgcgggcaccaggcaccgtcaccaacgcggtgtgctggcggtccgaaggcatcaagtatcggaagaatgaggtgttcttggacgtcatcgagtctgtcaacctcttggtcagcgccaagcggcaatgtcctgcgcagcgagatcgtgggctccatcaagatgcgagtcttcctctcgggcatgcccgagctgcgcctgggcctcaacggacaaggtcctctttgacaacacgggccgcggcaaaagacaaatccgtggagcctggaggatgtgaagttccaccagtgtgtgcggctatcacgcttcgagaatgaccgacaccatctccttcatcccacccgacggccgagttcgaggctcatgtcctaccgtctcaacacccacgtcaaggcctttgatatggatcgagtcggtgatcgagaagcactcccacagccgcatcgagtacatgatcaaggccaaaagccagttcaagcgggcggtcaacagccaacaacgttggagatccacatttcccgttgcccaatgattgccgacttaacccaagtttcaaggacgacggttggggagcgtttaagttgggttcccgagaacagcgagatcgtgtggtccatcaagtccttcccgggcggcaaggagtacctgatgcgggcccacttcggcctgcctagtgtgggaggccgaagacaaggagggcaagccccccgattcagtgttcaagtttcgagatcccttactttcattacctccggcatccaggtgcgctacctgaagatcattgagaagagtgggtaccaggccctgccctgggtgcgttatatcacgcagaatggagattaccagctccggacccagtgaggggctgtcgcagccaacaccccggcctcggggcctcctgggtggcagcaccagggngacacacctgccaaacccaccagattgagggggccctccctgggtctctggccaccctcccagcctctgcccagggacccctgccttccccaggccatctcgctctgccgtcgacactcgtctcagaaagcccctttcccaagaagaggctggtcttcaagaagtcttcgtttcttttgcccctgaagtcatgtttcaggggaaggatgtgaaatttttccgtgtagaggttacagccttttatggtgtttgagctcccagggtaccaaaaagcttgggccaacgctttgccagccagcccagctgcaggtggcatctgccacgaagggaaggcgccagcttcgccaggccagcaggggcgtcgttttgttgccaattttgttgaacgttatgggtttaatgggtgttcctggaaacttgtctttgtgcattcgttgctgtttgtgttacccttcactgtcccccatgtcccaacccaacgtcttacggcactcaggaaagcaacttggttgaggacgaacccctcacccttttttttcttcctttccccggcaaggcgcccgcaagcgggccaatttacacgtcgaaggctggcacctggcgcgcttcgggggccactgtagcgtcatgccatgctcccatggacttcgcaggcctcgcctgtggcgccttccccagggccagccctgggtcacgagatgctgtcactcagccagatcagtattgaccccacccaggggaaggtgggggtttggtgagagacgccagcctcagactttttcccactgagggtccaaagaacggggccaacgtgtcacccacgtctgcgcttggtcacccgtccctccccaccctgtgtgtgtttatgtcatagttacattaaattccgattcattgaatactccacagccttcctctgatgcagcgtggtcccaactcctcctgcgtgaccacagggcttgcctggttttgtcgccgaccttccctgtggccccacgaggtgtcaccagctccctctgcttccccagctgagacac

SEQ ID NO: 124638 - DNA, 454 bp, Homo sapiens
  misc_feature (1)...(454): n = a,t,c or g
tttttcctttgtgcaacactttattgggaaagatttacacacggtgacctgtcataggccaagcgatgagaagagggcgccaggagtgctggggtcccgaggtggctcagatggaagccatgggacggccgtcccanggcccgcgcacccgcacctcagtttcccctttgtgaaatgggaagcttatgcttccttccaagtctgcaatattggtgcgatgagctaaaagtggagcnaaagacacaaggaagaggcttcccactcccaggctcaccagcttcagcgtcacacgcaagctggacggcattggtgaagggcgttgggagtgggcaggcccaggaggctgagggctcggaagaacaggagataggagaaagtccaggccagagccagggcgtggcaggagcagggctgggcctgaatgagggccaggtcccgaggatggtnaccagag

SEQ ID NO: 124639 - DNA, 239 bp, Homo sapiens
ctcctgccacgccctggctctggcctggactttctcctatctcctgttcttccgagccctcagcctcctgggcctgcccactcccacgcccttcaccaatgccgtccagctgctgctgacgctgaaggaaggaaatggcctcaggcttcagcaaggggcccaccctgggctgctgcccgacgtgccctccctgatggagacactcagctacagctactgctacgtgggaatcatgacag

SEQ ID NO: 124640 - DNA, 3219 bp, Homo sapiens
atgcacacgttctctcagttgcagaagctgaagggcctgcagccgcccgtggtagtgctccggaacaagatcaagccctgcttaaccattgactcgtcgccgctgtcagcagacctgaagaaggttactaggtacattcatcataaaattgttggaaaattgcatgatgcaaaagtgatcctggctttgggaaatacagtttggattgatccaatggtgcacattacaaacctttccagtttaaaaacctctgtcattgattataatgttcgagctgaaattttgtccatgggcatgggcattgataatccagaacacatagaacaactgaaaaaattacgcgaagatgctaagataccagcttgtgaagaaagcctaagccagaccccggagcttaacatacccgtggtcacgaacacagagcatacagcactgcgaggtttcacagagagcctgctagaagagaccccatatcagacagctcctggagaacaggggatcctgacaggcttgaattgtctcttcaaagatgtacaaaaactgagtcacattgtcacccacgaggaagggagctggctggctggggagcaggggacgcctccagcagaagatgctgcttgcctgcagagcccccagcctgaggacacgggtgcagaaggaggggctgagtccaagacgagctcagaaaaccagaagcctgacattgggcctgcaaagcagcccagcggggccctgcagttattgacaacaccaccaagcattgatgaggatgcggagcaaccggaacttgcgcggaggttggtgatgtttgctatattagataactttaaaaaaaatattgaagttgaagaaagggaatctgcaccacatcagattgttgcagttggagttcattggaacaaacatatagaacatctcatcaaagagttcatgaatgatccctacattgtgatcacagccatggaagaggctgctctctatggcaatgtccaacaggtagtagaaagcagttcaatattttgcttgaagatgcataaagaaatgatttttaacttacaaaatgttttagaacagtggaagaagaagttaagttctggctctcaaattatattagccctcacagacgactgcgtcccactcttggccatcaccgatgccacgtgtgtgattcacttcagtttccctgcctcaccaaaagtttttggtggacgcctgtattgcatgtctgatcattttcacgctgaacagggttctcctgcagaacagggagataagaaagccaaatctgtcttgctgctgacggagaaagatgcgagccatgcggtgggcgtcctgcgctacttggagcgagcggacgccaaggtccccgcagagctgtacgagttcaccgcaggagttctggaagccaaagaagataagaaagccggaaggcctctttgtccatatctgaaggcttttggtttttgcaatgtgtgtatccattctcctattgatgggcctgtgggtggtttccactatcaggctatgatgtttgaagctgttaggaacactcttggccatgtcttttgtggaaatgtgtacgcatttctcttgggtagacgctccagagggcaagtggcaggtcatggggtaggcatgcgtttaactcttccaaagcggctggccattttccggtctgacttctgcaatgattgtgagtttcctgaggcttccgcagaagccgagcagatgccagcatcatgcttccgctccagcctgcagaaccatgagccagttaagcctctcttctttataaattacccagcctcagaaaacaaagaggcttttgaagagcactggcgtcccattcccagggcccaggacagtgtgaggggttcctgccgccccgcacaggaccttctgaacaacgtgaacaatgactacaacgggttgaaactcaccatgtatagaaaaacccacaggctggagttgcctttggaggtgcccgtagtcattcccgtcttgatgacactcatctctgtgtttttggttctggctccaatcatcagcaagcccacctgggagtacctctactgtgtgctgtttatattaagcggccttttattttacttcctgtttgtccactacaagtttggatgggctcagaaaatctcaacaataaccaacactgtgcttttgcagccagctcccctagtccaggccgagcttgcacttgcgtcttgtctgctgctgctgaaccaagatttagctgtgcgccctccttgcagtctcctggaaccagcaggaggaaacatgggggatactggcctgagaaagcggagagaggatgagaagtcgatccagagccaagagcctaagaccaccagtctccaaaaggagggcagaggtgtgggcagggcctccgagagctcccatgcctggcagcagaggggatggaggagggacggcaccaaggctttagggcttgaccggagggctggcaatggcctgaatggcttggcctgggacccccaggagagtgattacaggttcatcgtttctaatcacacattggcagtcatctttccttatgttgccccgcagctccagatcagccagctgggcctcatcagtggcatctccatcatcgtgggcaccatcattggctctgggatcttcgtttcccccaagtctgtgctcagcaacacggaagctgtggggccctgcctcatcatatgggcggcttgcggggtcctcgcgacgctgggtgccctgtgctttgcggagcttggcacaatgatcaccaagtcagggggagagtatccctacctgatggaggcctacgggcccatccccgcctacctcttctcctgggccagcctgatcgtcattaagcccacgtccttcgccatcatctgcctcagcttctccgagtatgtgtgtgcgcccttctatgtgggctgcaagcctcctcaaatcgttgtgaaatgcctggccgccgccgccatcttgaactcactgagcgtgcggctgggaagctacgtccagaacatcttcaccgcggccaagctggtgatcgtggccatcatcatcatcagcgggctggtgctcctggcccaaggtgacccacgggagggaaacacaaagaattttgataattctttcgagggcgcccagctgtctgtgggagccatcagcctggcgttttacaatggactctgggcctatgatggatggtga

SEQ ID NO: 124641 - DNA, 1502 bp, Homo sapiens
atgacgcccgccctcacagccctgctctgccttgggctgagtctgggccccaggacccgcgtgcaggcagggcccttccccaaacccaccctctgggctgagccaggctctgtgatcagctgggggagccccgtgaccatctggtgtcaggggagcctggaggcccaggagtaccgactggataaagagggaagcccagagcccttggacagaaataacccactggaacccaagaacaaggccagattctccatcccatccatgacagagcaccatgcggggagataccgctgccactattacagctctgcaggctggtcagagcccagcgaccccctggagctggtgatgacaggattctacaacaaacccaccctctcagccctgcccagccctgtggtggcctcaggggggaatatgaccctccgatgtggctcacagaagggatatcaccattttgttctgatgaaggaaggagaacaccagctcccccggaccctggactcacagcagctccacagtggggggttccaggccctgttccctgtgggccccgtgaaccccagccacaggtggaggttcacatgctattactattatatgaacaccccccgggtgtggtcccaccccagtgaccccctggagattctgccctcaggcgtgtctaggaagccctccctcctgaccctgcagggccctgtcctggcccctgggcagagcctgaccctccagtgtggctctgatgtcggctacgacagatttgttctgtataaggagggggaacgtgacttcctccagcgccctggccagcagccccaggctgggctctcccaggccaacttcaccctgggccctgtgagcccctccaatgggggccagtacaggtgctatggtgcacacaacctctcctccgagtggtcggcccccagcgaccccctgaacatcctgatggcaggacagatctatgacaccgtctccctgtcagcacagccgggccccacagtggcctcaggagagaacgtgaccctgctgtgtcagtcatggtggcagtttgacactttccttctgaccaaagaaggggcagcccatcccccactgcgtctgagatcaatgtacggagctcataagtaccaggctgaattccccatgagtcctgtgacctcagcccacgcggggacctacaggtgctacggctcacgcagctccaacccctacctgctgtctcaccccagtgagcccctggagctcgtggtctcaggacactctggaggctccagcctcccacccacagggccgccctccacacctggtctgggaagatacctggaggttttgattggggtctcggtggccttcgtcctgctgctcttcctcctcctcttcctcctcctccgacgtcagcgtcacagcaaacacaggacatctgaccagagaaagactgatttccagcgtcctgcaggggctgcggagacagagcccaaggacaggggcctgctgaggag

SEQ ID NO: 124642 - DNA, 2091 bp, Homo sapiens
gctgggactgctcggccgcctcctgcccggcgagcagctcagaccatgtcgcctgaagaatggacgtatctagtggttcttcttatctccatccccatcggcttcctctttaagaaagccggtcctgggctgaagagatggggagcagccgctgtgggcctggggctcaccctgttcacctgtggcccccacactctgcattctctgggcaccatcctcgggacctgggccctccattcaggcccagccctgctcctgccacgccctggctctggcctggactttctcctatctcctgttcttccgagccctcagcctcctgggcctgcccactcccacgcccttcaccaaagccggacagatggctgctgacgctgaagctggtgagcctggccagtgaagtccaggacctgcatctggcccagaggaaggaaatggcctcaggcttcagcaaggggcccaccctggggctgctgcccgacgtgccctccctgatggagacactcagctacagctactgctacgtgggaatcatgacaggcccgttcttccgctaccgcacctacctggactggctggagcagcccttccccggggcagtgcccagcctgcggcccctgctgcgccgcgcctggccggccccgctcttcggcctgctgttcctgctctcctctcacctcttcccgctggaggccgtgcgcgaggacgccttctacgcccgcccgctgcccgcccgcctcttctacatgatccccgtcttcttcgccttccgcatgcgcttctacgtggcctggattgccgccgagtgcggctgcattgccgccggctttggggcctaccccgtggccgccaaagcccgggcccggaggcggccccaccctccaatgcccaccccccagcagtccggagaaggcggcttccttggagtatgactatgagaccatccgcaacatcgactgctacagcacagatttctgcgtgcgggtgcgcgatggcatgcggtactggaacatgacggtgcagtggtggctggcgcagtatatctacaagagcgcacctgcccgttcctatgtcctgcggacggcctggaccatgctgctgagcgcctactggcacggcctccacccgggctactacctgagcttcctgaccatcccgctgtgcctggctgccgagggccggctggagtcagccctgcgggggcggctgagcccagggggccagaaggcctgggactgggtgcactggttcctgaagatgcgcgcctatgactacatgtgcatgggcttcgtgctgctctccttggccgacacccttcggtactgggcctccatctacttctgtatccacttcctggccctggcagccctggggctggggctggctttaggtgggggcagccccagccggcggaaggcagcatcccagcccaccagccttgccccggagaagctccgggaggagtaagctgtcacgaccctccctctgccagctggtcccgggaattctgtgaaccaggctgctgtctcctccccagaaagagtccttaccttggagagggtcctggagagaatttcctcttccccagctaaataccctgcctgcaactgaagcagacccgggggtgtcctccctgccctctgcccagaggcacctccactcctacaaaatcaaagtattgtccagacaagagtcactggcccctgctccagcttctgggtatccagagagcactgcacttccccaaaacggaaggggcccctgggcagtgggttttgggcaaattccctttctttgcatccacaatgtgggtcggagcttgggggcaggtcctgggagtgggaagcctcttccttgtgtctttcgctccacttttagctcatcgcaccaatattgcagacttggaaggaagcataacttccatttcacaaaggggaaactgaggtgcgggtgcgggcctggggacggccgtcccatggcttccatctgagccacctcgggaccccagcactcctggcgccctcttcttcatcgcttggcctatgacaggtcaccgtgtgtaaatctttcccaataaagtgttgcacaaaa

SEQ ID NO: 124643 - DNA, 823 bp, Homo sapiens
aagcttactctctcagatgacttcgtctcccaccgactgcctgtttaagcacattgcatcaggtaaccagaaagaagtggagagacttctgagccaagaggaccatgataaagataccgtccaaaagatgtgtcaccctctctgcttctgcgatgactgtgagaaactcgtctctgggaggttgaatgatccctcagttgtcactccattctccagagacgacagggggcacacccctctccatgtggctgctgtctgtgggcaggcatccctcatcgacctcctggtttccaagggcgccatggtaaatgccacagactaccatggagccactccgctccacctggcctgtcagaagggctaccagagcgtgacgctgctgctgctgcactacaaggccagcgcggaagtgcaggacaacaatgggaatacgccactccacctggcctgcacctacggccacgaggacgacccactctggctccaggtcgcctggaagcacagcagcctcccccagggggctctgccctcgcccagcactcacggactgcccctgcgggcacctcagcggcctgcctgtggccagtgtctgagcagggagctgcccccatgtgccaggtgaccagaccaccaggaagtcaggcaccgtgttcccaacccagtgcacacgcccataaacatctgacaacgggctcctcgagcccagcggaggcatcagctctgcccagggcttaaacaggcagtcggtgggagacgaagtcatctgagagagtaagctcattctctgcttaaggaacagcctgtctccaaatccctcagactc

SEQ ID NO: 124644 - DNA, 2452 bp, Homo sapiens
atgtggaggaagccagtctttatggagaaacacaaagatgactcagggagcatccgggaagcgggagaaaaaggagaagttaccaggcgtttgtgctactattacatccatgagccaatccataaactgacacttcaagttttgcaaaaggaaattgtgaacacccaaaatgttcaaacaacctcggtgtctgggctgaagcagacactgctggcggagtccgaggctctgaccagctacagccaccgggtgttctcggcctgggacttcggtctctgcggggacgtccacgtgcggctgcgccagcgcatcatcttgtacgaattaaaggtggagctggaggagacagtggtgcggcgccaggctgcggtgcggacgctgggccagcaagccagggtttggttggtgcgggtgctgctcaacctgctggtggtcgcgctcctgggggcagccttctatggcgtctactgggctacggggtgcaccgtggagctgcaggagatgccccttgtccaggagttgccactgctgaagcttggggtgaattaccttccgtccatcttcatcgctggggtcaattttgtgctgccgcccgtgttcaagctcattgctccactggagggctacactcggagtcgccagatcgtttttatcctgctcaggaccgtgtttcttcgcctcgcctccctggtggtcctgctcttctctctctggaatcagatcacttgtgggggcgactccgaggctgaggactgcaaaacctgtggctacaattacaaacaacttccgtgctgggagactgtcctgggccaggaaatgtacaaacttctgctctttgatctgctgactgtcttggcagtcgcgctgctcatccagtttcctagaaagctcctctgtggcctctgtcctggggcgctgggtcgtctggcggggacccaagagttccaggtgcccgacgaggtgctggggctcatctacgcgcagacggtggtctgggtggggagtttttttctgccctttactgcccctgcttaacacggtcaagttcctgctgcttttctacctgaagaagcttaccctcttctccaccttgctccccggcttgcccgcaccttccgggcctccgcggcgaatttctttttccccttggtccttctcctgggtctggccatctccagacggtccctgttttaacagcatcttcctgatcccgccttctaagctgtgtggtccattccgggggcagtcgtccatctgggcccagatccctgagtctatttccagcctccctgagaccacccagaatttcctcttcttcctggggacccaggcttttgctgtgccccttctgctgatctccagcatcctgatggcgtacactgtggctctggctaactcctacggacgcctcatctctgagctcaaacgtcagagagagacgatctgtgacaagaggcggttgctaggggataccacgagccgaacgcctagcattcgctgtgataaagggcgtctcagccaatcacctgtcgctacaggccagggggccgtaccaactaattcggaaccaatccgcggtcgaagtagggacaagaaaaaggggggcatcctctcgccaatcggaagtgcaaagaggcgggcgtgccagtccctggacagctacgacgccatgaatatcttgcccaagaagagctggcacgtccggaacaaggacaatgtcgcccgcgtgcgacgtgacgaggcccaggcccgggaggaggagaaggagcgtgagatgggtgctgctggctcagcaagagaattcctacggaagaaagccagacatcagaactcactgcctgagcttgaagcagcagaggcgggagccccaggttctggccctgtggacctgtttcgggagctgctggaggaagggaaaggagtgatcagaggcaataaagagtacgaggaagaaaagcgacaggagaaagagaggcaagagaaagctctgggcatcctgacatacctgggccagagtgcagcggaggcacagactcaacccccttggtaccagctacccccagggcgagggggccccccgcccggcccagccccagatgagaagatcaagagccgtctggaccctctgcgggagatgcagaagcatctggggaagaagagacagcacggcggtgatgaaggcagtcgcagcagaaaggaaaaggaggggtctgagaagcagcgacccaaggagcctccatccctggaccagcttcgagctgaacgtctgcggagggaagcagctgagaggtctcgggcagaggccctgctggcccgggtccaaggccgggcactacaggagggtcagccggaagaagacgagacggatgaccggcggcggcggtacaactcccaattcaacccccagctggcccggcgcccccgccagcaggaccctcaccttactcactga

SEQ ID NO: 124645 - DNA, 1140 bp, Homo sapiens
atggcaaacctgtggctctgtcctggggcgctgggtcgtctggcggggacccaggagttccaggtgcccgacgaggtgctggggctcatctacgcgcagacggtggtctgggtggggagttttttctgccctttactgcccctgcttaacacggtcaagttcctgctgcttttctacctgaagaaggagtctgagggatttggagacaggctgttccttaagcagagaatgagcttactctctcagatgacttcgtctcccaccgactgcctgtttaagctggtgagcctggccagtgaagtccaggacctgcatctggcccagaggaaggaaatggcctcaggcttcagcaaggggcccaccctggggctgctgcccgacgtgccctccctgatggagacactcagctacagctactgctacgtgggaatcatgacagcgtatcgggagcacagagaagagatacaggagaggttttcttcctggacgtcagcagctgggctggacctggaggaggacatgggagtatgtcctgtgtttgctgtgacgctgacgtcggaggaggaggaagaggaggaggaagagcagcaggacgaaggccaccgagaccccaatcaaaacctccaggtgttcacagggcccactcccccttggacaggccagctggagctgggctcctgccacgccctggctctggcctggactttctcctatctcctgttcttccgagccctcagcctcctgggcctgcccactcccacgcccttcaccaatgccgtccagctgctgctgacgctgaagggttctcctgcagaacagggagataagaaagccaaatctgtcttgctgctgacggagaaagatgcgagccatgcggtgggcgtcctgcgctacttggagcgagcggacgccaaggtccccgcagagctgtacgagttcaccgcaggagttctggaagccaaagaagataagaaagccggaaggcctctttgtccatatctgaaggcttttggtttttgcaaggcaggcatcctcatcgacctcctggtttccaagggcgccatggtaaatgaccacagaactaccatggagccactccgctccacactggcctgtcagacagggctaccagacgcgtga

SEQ ID NO: 124646 - DNA, 1620 bp, Homo sapiens
atgaagcagagttcgaacgtgccggctttcctcagcaagctgtggacgcttgtggaggaaacccacactaacgagttcatcacctggagccagaatggccaaagttttctggtcttggatgagcaacgatttgcaaaagaaattcttcccaaatatttcaagcacaataatatggcaagctttgtgaggcaactgaatatgtatggtttccgtaaagtagtacatatcgactctggaattgtaaagcaagaaagagatggtcctgtagaatttcagcatccttacttcaaacaaggacaggatgacttgttggagaacattaaaaggaaggtttcatcttcaaaaccagaagaaaataaaattcgtcaggaagatttaacaaaaattataagtagtgctcagaaggttcagataaaacaggaaactattgagtccaggctttctgaattaaaaagtggaaacaactccactgtaactagattgatctatgcacttttcttgcttgttggagtatgtgtagcttgtgtaatgttgataccaggaatggaagaacaactgaataagattcctggattttgtgagaatgagaaaggtgttgtcccttgtaacattttggttggctataaagctgtatatcgtttgtgctttggtttggctatgttctatcttcttctctctttactaatgatcaaagtgaagagtagcagtgatcctagagctgcagtgcacaatggattttggttctttaaatttgctgcagcaattgcaattattattggggcattcttcattccagaaggaacttttacaactgtgtggttttatgtaggcatggcaggtgccttttgtttcatcctcatacaactagtcttacttattgattttgcacattcatggaatgaatcgtgggttgaaaaaatggaagaagggaactcgagatgttggtatgcagccttgttatcagctacagctctgaattatctgctgtctttagttgctatcgtcctgttctttgtctactacactcatccagccagttgttcagaaaacaaggcgttcatcagtgtcaacatgctcctctgcgttggtgcttctgtaatgtctatactgccaaaaatccaagaatcacaaccaagatctggtttgttacagtcttcagtaattacagtctacacaatgtatttgacatggtcagctatgaccaatgaaccaggaggtcttgcctcaatgttgacggctgctgaccgaacaggcatccgtacttcaaacaatagtcaggttaataaactgactctaacaagtgatgaatctacattaatagaagatggtggagctagaagtgatggatcactggaggatggggacgatgttcaccgagctgtagataatgaaagggatggtgtcacttacagttattccttctttcacttcatgcttttcctggcttcactttatatcatgatgacccttaccaactggtacaggtatgaaccctctcgtgagatgaaaagtcagtggacagctgtctgggtgaaaatctcttccagttggattggcatcgtgctgtatgtttggacactcgtggcaccacttgttcttacaaatcgtgattttgactga

SEQ ID NO: 124647 - DNA, 2656 bp, Homo sapiens
cgagaaagaagctgtctccatcttgtctgtatccgctgctcttgtgacgttgtggagatggggagcgtcctggggctgtgctccatggcgagctggataccatgtttgtgtggaagtgccccgtgtttgctatgccgatgctgtcctagtggaaacaactccactgtaactagattgatctatgcacttttcttgcttgttggagtatgtgtagcttgtgtaatgttgataccaggaatggaagaacaactgaataagattcctggattttgtgagaatgagaaaggtgttgtcccttgtaacattttggttggctataaagctgtatatcgtttgtgctttggtttggctatgttctatcttcttctctctttactaatgatcaaagtgaagagtagcagtgatcctagagctgcagtgcacaatggattttggttctttaaatttgctgcagcaattgcaattattattggggcattcttcattccagaaggaacttttacaactgtgtggttttatgtaggcatggcaggtgccttttgtttcatcctcatacaactagtcttacttattgattttgcacattcatggaatgaatcgtgggttgaaaaaatggaagaagggaactcgagatgttggtatgcagccttgttatcagctacagctctgaattatctgctgtctttagttgctatcgtcctgttctttgtctactacactcatccagccagttgttcagaaaacaaggcgttcatcagtgtcaacatgctcctctgcgttggtgcttctgtaatgtctatactgccaaaaatccaagaatcacaaccaagatctggtttgttacagtcttcagtaattacagtctacacaatgtatttgacacggtcactgtatgaccaatgaaccagaaacaaattgcaacccaagtctactaagcataattggctacaatacaacaagcactgtaccaaaggaagggcagtcagatccagtggtggcatgctcaagggaattataggactaattctctttttgttgtgtgtattttattccagcatccgtacttcaaacaatggtcaggttaataaactgactctaacagagtggtgaatctacattaataggaaggtgggtgggagctaggaagtgatgggatcactgggagggatggggggacggatgtttcacccgaggctgttaggattaatggaaaggggatgggtgttcactttacagttattccttctttcacttcatgctttgccctggcttcactttatatcatggatgcacccttaccagctggtacaggtatgaaccctgctgcgtggatggaaagtcagtggacagctgtgctggggtgaaaatctcttccagttggattggcatcgtgctgtatgtttggacactcgtggcaccacttgttcttacaaatcgtgattttgactgagtgagacttctagcatgaaagtcccactttgattattgcttatttggaaaacagtattcccaacttttgtaaagttgtgtatgtttttgcttcccatgtaacttctccagtgttctggcatgaattagattttactgcttgtcattttgttattttcttaccaagtgcattgatatgtgaagtagaatgaattgcagaggaaagttttatgaatatggtgatgagttagtaaaagtggccactattgggcttattctctgctctatagttgtgaaatgaagagtggaaaacaaatttggtttggactattttaaaaattatattaggaccttaagctgttttagcaagcattaaaggcaaatgtatggctgccttttgaaatatttgatgtgttgcctggcaggatactgcactagaacatggtttattttaaaaatttataaacaagtcacttaaatgccagtttgtctgaaaagctcttataagggcgttacccttgatacgggaatttacacaggtagggagtgtttagtggacaatagtgtaggttatggatggaggtgtcggtactaaattgaataaccgagtaaataatcttacttgggtagagatggcctttgccaacaaagtgaactgttttggttgttttaaactcatggaagtatgggttcagtggaaatgtttggaactctgaaggatttagacaaggttttgaaaagcataatcatgggttagaaggaagtgtttgaaagtccactttgaaagttagttttgggccagcacggtagctcacccttgtaatcccagcactttgggaggctgagggtgggtagattacttgagcccagggaattcaagaccagcctggggcaacatgggtgaaaccctgttttctataaaaaataatctggggctttgtagcatatgcctgtggtcccagctactgaaggaggctgaggttgggaggattgcttgagcccagggaggcagaaggttgcagtgagccaaggtcacgtcactgcactctagcctgggcaacagagtaagacaaaaaaatatatatatattgaaaatcaaaggaggcaaaattttgacagggaaggaagtaactgcaaaacactaggctttagttaggtacttatataaaatctagtccagttctctcatttaaaaaaatgaagacactgaagtacagacttatatagc

SEQ ID NO: 124648 - DNA, 837 bp, Homo sapiens
atggagtccttctctgcagactttagcaggggcagaactactggacttcttgcagaccaaggtcactgggaatatgagagacaagagaactactcccatgcccgagttcttacatgcttcctggcccaacacagagctcaggtactggaaagagaactgtcccgagagccaaaagggcccctgaccaatgatggctttgagctgagggtgccctctgccttggccagctcccaatgtgacatcatcatcaaagggatggagcccagggcaactctggatgtacagatttggacggcccttacgaatcagctcggaaacgggctggagtttgtggctgacttagtacagacgacagcaaagttcactctttctccccgggtgattgagtgtggatcaggactggaacgtagcccctgtgtgcccccactggaaagtaccccagacctcatcctgaccactcccaccgctgtgaagggtctatttgaccttggaatggtcttcatcgtgatgagggagctgagcaggagagctgagcgggacagcccagagtccctcatgcagaccactctgcttgccaaccgtttcctacaggcccggaaacggatcgcgtgggtgaaggtgacggcgtcgagcgtgagtgaccctctgtgtagattaaactgcgctccctgtttcccatttccacagccgatgtccagggtcgatacgcccttaaaatccccgtacactccaccccaggtgaatacaggcctcgcagttctgcagtcagtttgccccacgcaagacccaggatctgggtctgtgaataatattcaagccaacatcattgccaagtga

SEQ ID NO: 124649 - DNA, 2501 bp, Homo sapiens
atggaggatgcgtgggggattcgcaaagagacaggaagagtcaaagaagaagctgagaaagtaacaggatggggaaacaactggagaaatgtagagaaaagctccatgtccagaaaggtgaaggcagcaagaccaggattcaagaagttgcccatgacgtcagatatccctcctaaatgtacaatcaaggatttgctaccaaaagagaagagcagtacagaagcagtattccacacagtggtgttggaaagacacgaaagccctgacattgaagacttttccttcaaggaaccccagaaaaatgtgcatgattttgagtgtcaatggagagatgacacaggaaattacaagggagtgcttatggcccagaaagaaggtaaaagagatcaacgcgacagaagagacatagaaaacaagcttatgaacaatcagcttggagtaagctttcattctcatctgcctgaactgcagctatttcaaggtgaggggaaaatgtatgaatgtaatcaagttgagaagtctaccaacaatggttcctcagtgtcaccacttcaacaaattccttctagtgtccaaacccacaggtctaaaaaatatcatgaacttaaccatttttcattactcacacaaagacgaaaagcaaacagttgtggaaaaccttataaatgtaatgaatgtggcaaggcgttcactcagaattcgaaccttacaagtcataggagaattcatagtggagagaagccttacaaatgcagtgagtgcggcaaaacctttactgttcgttcaaatctaactattcatcaggtcatccatactggagaaaaaccttacaaatgtcatgagtgtggcaaggtcttcaggcacaattcataccttgcaactcatcggcgaattcatactggagagaaaccttacaagtgtaatgagtgtggaaaagcctttagaggacattcaaacctaactacccatcagttaattcatactggagaaaaaccgttcaaatgtaatgaatgtggcaagctcttcactcaaaattcacaccttataagtcattggagaattcacactggagagaaaccttacaagtgcaatgagtgcggcaaagcctttagtgttcgttcaagcctagcaatccatcagacaatccacactggagaaaaaccttacaaatgtaatgaatgtggcaaagtctttaggtacaattcatacctcggaaggcatcggagagttcatactggtgagaaaccttacaagtgtaatgaatgtggcaaagccttcagtatgcattcaaacctagctacccatcaggtcatccatactggaacaaaacctttcaaatgcaatgaatgcagcctaggttttcactcaaaattcacaacttgcaaatcatcgaagaattcatactggagagaaaccttacaagtgtaatgagtgtgggaaagccttcagtgttcgttcaagtctgactacccatcaggcaatccattctggagagaaaccttacaaatgtatcgaatgtggcaagagcttcactcaaaaatcacaccttagaagtcatcggggaattcattctggagagaaaccttacaagtgtaatgaatgtggtaaagtcttcgctcaaacatcacaacttgcaaggcattggagagttcatactggagaaaaaccttacaagtgtaatgactgtggcagagcctttagtgatcgttcaagcctaacttttcatcaggcaatacatactggagagaaaccttacaaatgtcatgaatgcggcaaggtttttaggcacaattcataccttgcaactcatcggcgaattcatactggagagaaaccttacaagtgtaatgagtgtgggaaagcctttagtatgcattcaaacctaactacccataaggtcatccatactggagagaagccttacaaatgtaatcaatgtggcaaggtcttcacttcagaactcacaccttgcaaatcatcaaaggactcacaccggagagaaaccttaccgatgcaatgagtgtgggaaagccttcagtgttcgttcaagcctaaccacccatcaggcaatccatactgggaaaaaaccttacaaatgtaatgaatgtggcaaggtctttactcaaaatgctcacctggcaaatcaccgaagaattcatactggggagaaaccttacaggtgtacagagtgtgggaaagcctttaggagacagggtgtcactcctgggcccagtctggagtgcaatggaacaattctggcttacagcagcctcaagtttgtgggctcaagtgatacccacattagcctcctaaggagccaggatgacaggcaggtgctaccacacctggctaatcccaatttcagagaaggtctcctgcctgcctttctgctgctctgttcagactctcacttcctgcagttctgcagtcagtttgccccacgcaagacccaaggatctgggtctgtgaataatattcaagccaacatcattgccaagtga

SEQ ID NO: 124650 - DNA, 478 bp, Homo sapiens
aagggttgttcaaagtcccctggaaggacctaaacatgctgactgccatgctttccctccttggctttctcccaggcactcttcacacacagatgtgtctacagtggcaggtttgggagcctgaagagcggctgtgcccggtactgcaatgccactgtgaaggtgaggagcgcgtggccgaggcccagtctaggccagtagggccaggcagctccagggccatgctcttgggtcctagggtccacgtggtcacaggtggcccgtgcttgctgttgtcttccgttctctgaaatgatcttgttttactgtttttaaaattcatacattgactcttccccaacttagaacgttggctccacaagcatgagccttcctctgtccgttcgcacagtgttagagccagtccagcacccaggggaggggctcagtagagttgtggtgaccagatgactgagcactagccatgccatcaactttc

SEQ ID NO: 124651 - DNA, 150 bp, Homo sapiens
atggagttagtgcaggtcctgaaacgcgggctgcagcagatcaccggccacggcggtctccgaggctatctacgggtttttttcaggctggtctctgtcccatatatccccgatacaagaccgaagctatctgtagagtcagagctgtga

SEQ ID NO: 124652 - DNA, 459 bp, Homo sapiens
cggacgcgtgggcggggccagcgaggcaagatggagttagtgcaggtcctgaaacgcgggctgcagcagatcaccggccacggcggtctccgaggctatctacgggtttttttcaggacaaatgatgcgaaggttggtacattagtgggggaagacaaatatggaaacaaatactatgaagacaacaagcaattttttggcatcgttggcttcacagtatgactgatgatcctccaacaacaaaaccacttactgctcgtaaattcatttggacgaaccataaattcaacgtgactggcaccccagaacaatatgtaccttattctaccactagaaagaagattcaggagtggatcccaccttcaacaccttacaagtaaagacaatgaagaacagttgaaacatgcaaaatatggagcttttcatgtaattactcttttactgtttaccattcactat

SEQ ID NO: 124653 - DNA, 538 bp, Homo sapiens
tttcgtaggtcctgaaacgcgggctgcagcagatcaccgggcacggcgggtcttccgaggctatctacgggtttttttcaggacaaatgatgcgaaggttggtacattagtgggggaagacaaatatggaaacaaatactatgaagacaacaagcaattttttggtgatgaacgactgcaggcatctggactggctctaacactgtgcgaacagacagaggaaggctcatgcttgtggagccaacgttctaagttgggaaagagtcaaagtatgaattttaaaaacagtaaaacaagatcatttcagagaacggtgagtgctgggaaaacaaagtattatcatccagtggtggcaggaagacaacagcaagcacgggccacctgtgaccacgtggaccctaggacccaagagcatggccctggagctgcctggccctactggcctagactgggcctaaaacacgcgctcctcaccttcacagtggcattgcagtaccgggcacagccgctcttcaggctcccaaacctgccactgtag

SEQ ID NO: 124654 - DNA, 535 bp, Homo sapiens
  misc_feature (1)...(535): n = a,t,c or g
gggctcatttgctaatccctagcatattttggactatgaaattcatttgcaattgaatataatatcagaagaaattacagggggatactgtatacctaacgatataaaaaaattttgtttattgtaggtacggctgcttttttgtggtatgacagtgttagaaatgattcgtttgtaatcttctttgcctgttatggtcaaactattatctaattatatttttaaatttatcttttagggacagtatggaaattaccagcagtgaaaaagtacttacattccagtagccagtatctattagcagccatattgtcacctcagcactgtggacacctccctgtgaagagatccttccattccatctagtttttgggaaaaaccttgtggataagtggctgtttcatcagtaagcagcctttgtggtttagttataaaaggctttagtagctcataaatactcttgatttacatttctactctagatggcacatttgacagaanatgcaatgacataaccaatttgtaatgattttgg

SEQ ID NO: 124655 - DNA, 603 bp, Homo sapiens
atgaagatttgctggaatatattgagtacaacagagtttatagaaaatgaaatcaagggcttctgggagaaaattgatgtctgggttttcactcagtggccattaacgtttcttcctgtctcttgtcgaattgatgtaggtcataatgattacggttatcagcaaccgtcgtatcctgaacaaggctacgataggccttatgaggattcctcacaacattactacgaaggaggaaattcacagtatggccaacagcaagatgcataccagggaccacctccacaacagggatatccaccccagcagcagcagtacccagggcagcaaggttacccaggacagcagcagggctacggtccttcacagggtggtccaggtcctcagtatcctaactacccacagggacaaggtcagcagtatggaggatatagaccaacacagcctggaccaccacagccaccccagcagaggccttatggatatgaccagactctaagccttatctccttaagtcagaacatctggcagactcagcctcagttccccttcgtgcactgcagactggaaactctcaagggacagtatggaaattaccagcagtga

SEQ ID NO: 124656 - DNA, 2921 bp, Homo sapiens
tggatgggcggcaacatgtctgtggctttcgcggccccgaggcagcgaggcaagggggagatcactcccgctgcgattcagaagatgttggatgacaataaccatcttattcagtgtataatggactctcagaataaaggaaagacctcagagtgttctcagtatcagcagatgttgcacacaaacttggtataccttgctacaatagcagattctaatcaaaatatgcagtctcttttaccagcaccacccacacagaatatgcctatgggtcctggagggatgaatcagagcggccctcccccacctccacgctctcacaacatgccttcagatggaatggtaggtgggggtcctcctgcaccgcacatgcagaaccagatgaacggccagatgcctgggcctaaccatatgcctatgcagggacctggacccaatcaactcaatatgacaaacagttccatgaatatgccttcaagtagccatggatccatgggaggttacaaccattctgtgccatcatcacagagcatgccagtacagaatcagatgacaatgagtcagggacaaccaatgggaaactatggtcccagaccaaatatgagtatgcagccaaaccaaggtccaatgatgcatcagcagcctccttctcagcaatacaatatgccacagggaggcggacagcattaccaaggacagcagccacctatgggaatgatgggtcaagttaaccaaggcaatcatatgatgggtcagagacagattcctccctatagacctcctcaacagggcccaccacagcagtactcaggccaggaagactattacggggaccaatacagtcatggtggacaaggtcctccagaaggcatgaaccagcaatattaccctgatggaaattcacagtatggccaacagcaagatgcataccagggaccacctccacaacagggatatccaccccagcagcagcagtacccagggcagcaaggttacccaggacagcagcagggctacggtccttcacagggtggtccaggtcctcagtatcctaactacccacagggacaaggtcagcagtatggaggatatagaccaacacagcctggaccaccacagccaccccagcagaggccttatggatatgaccagggacagtatggaaattaccagcagtgaaaaagtacttacattccagtagccagtatctattagcagccatattgtcacctcagcactgtggacacctccctgtgaagagatccttccattccatctagtttttggaaaaaccttgtggataagtggctgtttcatcagtaagcagcctttgtggtttagttataaaaggctttagtagctcaaaaatactcttgatttcacatttctactctagatggcaacattggacagaaaatgcaatgacataaccaatttgtaatgattttggaactgtgtttcaaatggactgttacagactgaaaggtgtgaacagctttggtttgtttatgaaggggtaagggaatttaatacttttccacagatttttttgtaaggggaagagggaaatgtacactttttacagcagcaatattttgtatattatgtttatttcatgtggtgaatatgcaaggcggtacactacgcactggacagcatcagaaatcctctgttaatgtggactggagcatggtagatgcttgattgttttggtctcaaaatggtgtgctataaagataaaggtgaggggaagacaaagcacaccatatgtccactgttctgttctcatagaggaaattcaaatcccttttatctattagataatcaagggcactgtgatacagttttgagtaaaaagacattttttaaaagccttccagttttgtggattaaacctttttataaagatcatttataatactgttttaaaatgtgaggcaataagaattactttgtgttggatctgaggaggctttggtaaaacagtttcatctaaatgaaagtggtaatcctcttctaaaatagcaataactgaaaatgaaagtgttaattttaccttgtttgagttatcagggaacttagtaagtaatatcaaagcattttataaatgatatcaaagaagagtcaacattgatccagtcattttattttgtaatattgagggataattggttattaaactgaatagttcaggagactttacaaacctttgtttcaactttcttatctggaaataatatcatttataaagggacacttttatgtttttcccttttttatgttggttgatataacacaaagagatatttaggaaaatgcttattgatgaggtttattctatctgtttttaaagcaccgaggttgcattctagataaccttgtttattagcatggcatattttaatcattatttgagactgtcctgtgcctgattattttagctaaattcagggagattgcgtggggcaggaaagcatgcattgaaaaatttctaaccacggttatttaagcataatctgaaaacatctagcccaaaggtaagttgctattttcatcacagttgcctatgcccagggaataagatgtattctttataattgaattggtttttcccacgtctaactggaaacaaaacagaaggggcgtcataaatttgaataagcagaacatactgttctcaacatactgtaatcaaaaggaggaatttcagtgggtctctgtgtgtgtatgagagagagagtgtgtgtttgtgtgtttcaaggtcagaacaggtttttttgtttttgttttttgttctttgtttttttttttgagatggagtcttgctcttgtcgcccaggctggagtgcagtggcgcaatctcagctcactgcaacctccgcctcccaggttcaagcagttctcctgcctcagcctcctga

SEQ ID NO: 124657 - DNA, 1058 bp, Homo sapiens
atgcacttggaagtaaattcttccccagaacctctagatgagaacctggacaacactgtgacttcagccttgtcaggccatgaacagagaatccagacaagcctgcctgtacttcttactacaaaaactgagatattagccaggttctcacaactgcagtttccagaggaacagagcagttttgcatatcctgccaactgtgtcaaatctaaaggaatgaatacaaaacttccccttcgccctctgaaggtttgccgtgaactgacaatagacagtgatagagatatattatacagaactcttttcatgggagatagtggcatgggaaaagtacaatttgaatttggagaggaagtacacatagtgattaagagcacgggctttggaccatttagtagctatgctactttagagcctttcgtagcagtacagctttggggaggcggacagcattaccaaggacagcagccacctatgggaatgatgggtcaagttaaccaaggcaatcatatgatgggtcagagacagattcctccctatagacctcctcaacagggcccaccacagcagtactcaggccaggaagactattacggggaccaatacagtcatgggggacaaggtcctccagaaggcatgaaccagcaatattaccctgatggtcataatgattacggctatcagcaaccgtcggatcctgaacaaggctacgataggccttatgaggattcctcacaacattactacgaaggaggaaattcacagtatggccaacagcatgatgcataccagggaccacctccacaacagggatatccaccccagcagcagcagtacccaggccagcaaggttacccaagaacagcagcagggctacggtccttcacagggtggtccaggtcctcagtatcctaactacccacagggacaaggtcagcagtatggaggatatataccaacacagcctggaccaccacagccaccccagcagaggccttatggatatgaccagggacagtatggaaattaccagcagtgaaaaagtacttacattccag

SEQ ID NO: 124658 - DNA, 438 bp, Homo sapiens
ggtcaggtcggtcggtccccactatgggcctggagctgtacctggacctgctgtcccagccctgccgcgctgtttacatctttgccaagaagaacgacattcccttcgagctgcgcatcgtggatctgattaaaggtcagcacttaagcgatgcctttgcccaggtgaaccccctcaagaaggtgccagccttgaaggacggggacttcaccttgacggagaggacctgcaggcccgtgcccgtgtggatgagtacctggcatggcagcacacgactctgcggagaagctgcctccgggccttgtggcataaggtgatgttccctgttttcctgggtgagccagtatctccccagacactggcagccaccctggcagagttggatgtgaccctgcagttgctcgaggacaagttcctccagaacaaggccttccttac

SEQ ID NO: 124659 - DNA, 349 bp, Homo sapiens
  misc_feature (1)...(349): n = a,t,c or g
gtcggtcggtccccactatgggcctggagctgtacctggacctgctgtcccagccctgccgcgctgtttacatctttgccaagaagaacgacattcccttcgagctgcgcatcgtggatctgattaaaggtcagcacttaagcgatgcctttgcccaggtgaaccccctcaagaaggtgccagccttgaaggacggggacttcaccttgacggagagcccgtgggtgctggctgccaagtnttcgaaggccgacccaagctggccacatggcggcagcgcgtggaggcagcagtgggggaggaccttttccaggaggcccatgaggttcattctgaaggccaaggactt

SEQ ID NO: 124660 - DNA, 607 bp, Homo sapiens
agccctgccgcgctgtttacatctttgccaagaagaacgacattcccttcgagctgcgcatcgtggatctgattaaagtgtggccatcctgctctacctgacgcgcaaatataaggtccctgactactggtaccctcaggacctgcaggcccgtgcccgtgtggatgagtacctggcatggcagcacacgactctgcggagaagctgcctccggccttgtggataaggtgatgttccctgttttcctgggtgagccagtatctccccagacactggcagccaccctggcagagttggatgtgaccctgcagttgctcgaggacaagttcctccagaacaaggccttccttactggtcctcacatctccttagctgacctcgtagccatcacggagctgatgcatcccgtgggtgctggctgccaagtcttcgaaggccgacccaagctggccacatggcggcacgcgttggaggcagcagtgggggaggaactcttccaggaggcccatgagttcattctgaaggccaagacttccacctgcagacccagcatagggcagaagctgatccctgcgtgcggccatgatccgtgagtgggaaactcacc

SEQ ID NO: 124661 - DNA, 392 bp, Homo sapiens
tgcccctgcacccagctgcgcccgtttttgtcctcctgtctggcttctcttcatgatccccacccctttattcggcctcaggggaaccccgtggtctattccgtgagaccgagcagagttttggggagccccgactcttggatctccctgctggctcacctttctctgttcggtctccaaaccagaccagcaatggccccaggaagaaggtggcgctgggagaagttccctaagctatgtatgcctacctgtccccttcctgacttttcggttccccaaacccgaggctggacctacctttaatcagatccacgatgcgcagctcgaagggaatgtcgttcttcttggcaaagatgtaaacagcgcggcagggctgggacagcaggtccagg

SEQ ID NO: 124662 - DNA, 505 bp, Homo sapiens
gcacggtgggcaaagctgccatcgtcctctggcctaccctgtctcaaggatactctcaccactcaccagcaaccaaagcactggtgtggaagtaaagtagatatttgcttttctaatcatcagggtgaactggaatagcaggaaggcaagggcctggggtccagtactgactctctgcaggatgcggggcacagagactctctgcctctgaagactttagtttccttgtctatgaaatagagggttagaacaggatggttccagcaggcctggcagcagtcctagggtcccagttacctctccgtcaaggtgaagtccccgtccttcaaggctggcaccttcttgagggggttcacctgggcaaaggcatcgcttaagtgctgacctttaatcagatccacgatgcgcagctcgaagggaatgtcgttcttcttggcaaagatgtaaacagcgcggcagggctgggacagcaggtccaggtacagctccaggcccatagtgggga

SEQ ID NO: 124663 - DNA, 402 bp, Homo sapiens
  misc_feature (1)...(402): n = a,t,c or g
tgcccggcaccgcgcccgagcccactccattcagatcatgaaggtggaggagatcgcggccagcaagtgccgccggccggctgtcaagcagttccacgactccaagatcaagttcccgctgccccaccgggtcctgcgccgtcagcacaagccacgcttcaccaccaagaggcccaacaccttcttctaggtgcagggccctcgtccgggtgtgccccaaataaactcaggaacgccccggtgnnnnnnnnnngnnnnnnnnnnnnnnnnnnnnnntataaatggggggggcccctttaaaagaaccannnnnnnnnncggggggaggggaagaaaatatttttttttgggggccccaaaattgaatccccgggccgggtttttaaaaaggggggaggggga

SEQ ID NO: 124664 - DNA, 1261 bp, Homo sapiens
atgtttgcgcctaatcatgtcgtcgccaagtccagcttctggtatttcgtatctcagttaaagaagatgaagaagttttcaggggagattgcctactctgggtgggtgtttgagaagtcccctctgcgggtgaagaacttccgcatctggctgcgctgtgactccctgagcggcacccacaacctgtatcgggaataccaggacctgaccacggcgggcggtcacccagtgctaccgagtcatggactctaggcactgcgcacaggcccactccatccagatcatgaaggtggaggagatcgcagccggcaagtgccgccggccgtccgtcaagcagttcctcgactctaaggtcaagttcccgctgccccaccaggtcatgcgccgtcagcacaagccacgtttcaccaccaagagtaaaaatgattttgaatggcttggactcatgcatgatagactgtcatggcagcaaaaactctaccagcagagattggttacattagtaagagcacagaaagaacagggaaaggtaatcacagcaaacaacaaaaagtaccttactgtgaaaagctgtgctatctcttgggaaggtctatcggtgcgggcctcttgttatttagcccagctggcgtaaagcggcatgtgctgcaagccgattaagttgggtaacgccagggtttccccagtcacggacgttgtaaaacggacggccagtgaattgtaatacggactcactatagggcgaattgggtaccggggccccccctcgagcaactgcagggtcacatccaactctaccagggtggctaccaagtgtctggggagatactggctcacccaggaaaacagggaacatcaccttatgccacaaggcccggaggcagcttctccgcagaagtcgtgtgctgccatgcccaggtactcatccaacacgggcacgggcctgcaggtccctaagggtaccaagtagtcagggaccttatatttgcgcgtcaggtaagagcaggatggcccacactctccgtcaaggtgaagtccccgtccttcaaggctggcaccttcttgagggggttcaccctgggcaaaggcatcgcttaagtgctgacctttaattagatccacgatgcgcagctcgaagggaatgtcgttcttcttggcaaagatgtaaacagcgcggcagggctgggacagcaggtccaggtacagctccaggcccatagtggggaccgaccgacctgaccggaaaccagagggagtcagc

SEQ ID NO: 124665 - DNA, 1290 bp, Homo sapiens
gctgggcatagggtgatttttcagaggtctggcttcccagggaactcaaactgcttgcctactgtcctgcgctgggctccaaacccagccagcctcactcaccatttgtggtttcagtgtaagccttctccttggggaaaaatgtctgagaagaagctttttggaccaaatggtgagcggatgcctttctccaaagtgaaggctctgtgtgctggtctccaggccacagtggctgcccccaagaatgccgaggagaataaggccatccaggatgtggccaaagacactgccttcctgggcatcacagatgaggcaactgaaggccagttcatgtacttgacgggcgggaggctgacctacagcaactggaagaaggatgagccaaatgaccacggctcaggggaggactgcgttattctcctgaacaatgggctctggaatggcatctcctgcacctcctccttcattgccatctttcagtgggcccattatcagtacagacaagcggaaaattaccccaaaggtgagcttcataccctacgggttaaattatgcgggcccagctggccaacaaatgccatccactttcggagcaggcttctgatgccattgggacccacagttctgctcatgaccatggctgtttttcagctatctcaggcagtggccatgtgcagctggtgctgtggcctcgtgctgccccctgctggttgcctccaagacaaggccagcaaacccagagagactcaagcccagccaggtctctgtgtccgaggcaatttcagaatcccctcaagacaggactttgctgctgctcttgcccgagccctgtcggggctggatttgtgggcttctctctgggttccctttgcggactttttgggttcatccctctctgtgccttggttttcatatttggaaaatgacgaggaggatttaactagattatctctaaggttgaatggggaaagaacattcctggaatcaccaggcaagaagaggattggagctggtactcctcccatgagtcaagaggcagtcatgttggcagtgatggagagagatcctgggcagtgcaggggtgaggaagggcctactgagtgcagggccatgtggcctggctggggaggcagacattctctgccaggtcaccctgccatgctgtgcagcttcctgggctcagaccttgaaataagaggcagcaatggaggctgggagcctccttttatccctgggctccagccagaactggctagaggaatccagggttcaggaagaggtgctgaatag

SEQ ID NO: 124666 - DNA, 445 bp, Homo sapiens
tccttggcttggacagaggaactcaagcttgggctgggcagagatttttttctgctgggcagacttcccattgttcctcagcagagcactcagaagcacatcatcgagggaaattggtttgtcatcaaaggcttgggaagacagctctgctgagacgcatgctctggctggacaggttagggctttgggggcccttctggaagtctgccagtgtccttggtcctaggacacccagatactctctcagcctgggaggatcttcagggagaggctaggtgttggtttgggtagctcagcatctgtctgcagtcagcagtttgtacaccagggatggatcagctgccccatgctccttagggattctggactggggaaccctcccaagcacagccgagccagggagggaaggcccagcggacgcgtgggtcgacccgggcgtccgaag

SEQ ID NO: 124667 - DNA, 603 bp, Homo sapiens
atgtcggacagtgatctaggtgaggacgaaggcctcctctccctggcgggcaaaaggaagcgcagggggaacctgcccaaggagtcggtgaagatcctccgggactggctgtacttgcaccgctacaacgcctacccctcagagcaggagaagctgagcctttctggacagaccaacctgtcagtgctgcaaagacatggctcttactctctgtcagtccgcctcagccgccctgcatcctgggaccggatcagacactacaggatccactgccttgacaatggctggctgtacatctcaccgcgcctcaccttcccctcactccaggccctggtggaccattactctgagctggcggatgacatctgctgcctactcaaggagccctgtgtcctgcagagggctggcccgctccctggcaaggatatacccctacctgtgactgtgcagaggacaccactcaactggaaagagctggacagctccctcctgttttctgaagctgccacaggggaggagtctcttctcagtgagggtctccgggagtccctcagcttctacatcagcctgaatgacgaggctgtctctttggatgatgcctag

SEQ ID NO: 124668 - DNA, 957 bp, Homo sapiens
tttcgtccaaactctctggcctgacaaccaatgttgtggacattattttggctcatcactttgggcaggaagagttacaggccaacctggacctgatccaaacctacagaatgcatattgcccaagacatcaaccaagacaacctgcagctcttcttgaattcctacaatggacgcagagacctggagatcgaaagacccatactgggccaaaatgataacaaatcaaaaacattaaaggggttctactttactggtggtaggggacaattcgcctgcagttgaggctgtggtcgaatgcaattcccgcctgaaccctataaatacaactttgcctaaagatggcggactgtgggggactgcccccagggtagttcagccctgggaagctcaccgaggccttcaagtactttttgcagggaatgggctacatccccttggttctctgttacagtaccatctggcagcatgacttcggttgcccgatcacggaacccactcaacctcgagtagcctcggctctggagaaagtcccttcagccggtctgtcaccagcaatcagtcagatggaacttcaagaatccttgtgagtcccctgatgtcctggacagacaacagaccatggaggtgtcctgctaagcagatgctcctcccctggaccattgcaagtccatccttcaaatgaccactccataatataacatttcatccaggtaaactggcctctactatctttaactcatgcatggccactgaacctctctctagtagcctggatttatcattctctctgcctgcccacccccttttttgtatagcccaagaaccacttccatgccatactgtaacattccaacatctttagctgatcagatctctccatatcctctcttgccagctttttcccgtgctcccccaactatgtatcagataagattctttgatcccgacaaaaaaa

SEQ ID NO: 124669 - DNA, 2049 bp, Homo sapiens
  misc_feature (1)...(2049): n = a,t,c or g
ataaatcctgtttcaatgcattctttaactttgaggatatgcaagagatcacccagcacgtttgctgtctgtcatgtggatgccccaggccagcaggaaggtgcacccgtcntttcccaacagggtatcagtaccccacaatggatgagctggctgaaatgctgcctcctgttcttacccacctaagcctgaaaagcatcattggaattggagttggagctggagcttacatcctcaagcagatttgcactcaaccatccagagcttgtggaaaggcccttgtgctcattaatggttgacccttgccgctaaagggctggattgactgggcagcttccaaactctctgggcctgacaaccaatgttgtgagaaattattttggctcatcactttgggcaggaagagttacaggccaacctggaccctgatccaaacctacagaatgcatattgcccaagacatcaaccaagacaacctgcagctcttcttgaattcctacaatggacgcagagacctggagatcgaaagacccatactgggccaaaatgataacaaatcaaaaacattaaagtgttctactttactggtggtaggggacaattcgcctgcagttgaggctgtgatggcggactgtgggggactgccccaggtagttcagcctgggaagctcaccgaggccttcaagtactttttgcagggaatgggctacattcccgtatgtgcagctcagtcacctgagcaccgagtcagtaccatctgccagcatgactcggctcgcccgatcacgaacccactcaacctcgagtagcctcggctctggagaaagtcccttcagccggtctgtcaccagcaatcagtcagatggaactcaagaatcctgtgagtcccctgatgtcctggacagacaccagaccatggagatttccctcgatgatgtgcttctgagtgctctgctgaggaacaatgggaagtctgcccagcagaagaaaatctctgccaagcccaagcttgagttcctctgtccaaggccagggacctgtgaccatggaagcagagagaagcaaggccacagccgtggccctgggcagtttcccggcaggtggcccggccgagctgtcgctgagactcggggagccattgaccatcgtctctgaggatggagactggtggacggtgctgtctgaagtctcaggcagagagtataacatccccagcgtccacgtggccaaagtctcccatgggtggctgtatgagggcctgagcagggagaaagcagaggaactgctgttgttacctgggaaccctggaggggccttcctcatccgggagagccagaccaggagaggctcttactctctgtcagtccgcctcaaccgccctgcattctgggaccggatcagacactacaggattcactggcttgacaatggctggctgtacatctcaccgcgcctcaccttcccctcactccaggccctggtggaccattactctgagggctggcccgctccctggcaaggatatacccctacctgtgactgtgcagaggacaccactcaactggaaagagctggacagctccctcctgttttctgaagctgccacagggggaggagtctcttctcagaggaggggctccgggagtcccctcagcttctacatcagccctgaatgacgaggctgtctcttttggatgatgccctaggcccccaagggagaggccaaaaggggaaacccacggttggccaccttagaaccccaattcagcctcctgggcaccccagaggcaaggctgtgcactcagggagggagggtgggacacagaggtgcatntagggtcccacctgtacccttgctctttcctctcttagcccttagaagtcacctactttccttcagggccatgatcccacctgcgacctctaatgcgagtgcanagaaggggggaccagggccagggttcccaaaaagagaataagccttcctgggggggcccggacccaattaggttctttgagagttggggtttccaataccccttctggagg

SEQ ID NO: 124670 - DNA, 426 bp, Homo sapiens
tctttccctaagttatcgcggacatctttgcttaattcatgggctttttcctaattctccttagtccttctagaacacaggtcagcagatgtttatgaatccagtccccgtgatctgagtctaggtcccagtggggatgcatactgggaacagcttgctcactggtagggaatttgtccctttcttcagctgtcattctatcatttacttgactaagataccaggtatctccaaattctcaggctgcagctaaagccgcattcttttcattaaaggccatggtttgatctaacaatagcatgacgtctctccaagtgaagtcgaagatttgccctaggtctaccttggcaagatcaggtctaccttgatctgctttaaatcagagagagagaaggggacatatacccgggttgtgctaaattccct

SEQ ID NO: 124671 - DNA, 1551 bp, Homo sapiens
atgcgcaaggacagttgcgccagcagcatgcatcagcaagttagcagaagcaagaagagagctgggcagaagacaccccctgaagatcaagagggaggccagcgggcactacgcagcagccacatcagactgggacaattcctgcttatagaggactgtaaaaccccttccccatcctcacttggggctgacgctattgccaagcagaggaaaactagtgtttctgctgctgcgtcagtgagtgcaactattcccatccgcagggtccagggaccgaccgttgtgggttcttgggcaagaggtgtttctgctgctgcatcgggaccaagaggaacaggcccaaaaggaaaagcgagatcagagaaaggctgcagccttagtcatggccctcagacaaacaaacctttggtggttcagaaaggacagaaaatggagcaggccaatcacccggtagggcttgttatcagtgtggtttacaaagacattttaaaaaagattgtccaacgagaaacaagccaccccctcatccatgtccgctatgccgaggcaatcactggaaggcgcactgccccggaggacaaaggttctctggggagggatatgttagccaaagctggagctattatctacatgaatatggggaacaagttacccatttggtgtcacctacttgaggaaggaatctaccttgaagtctgggcattggaaggacaatttggaagggcaaaaaatgcctgcccagtccaaatcaggttaaaagatcccaccacatttccttatcaaaggcaatatcccttaaggcctgaagctcataaaggattacaggatattgttaaacatgtaaaagctcaaggcttagtaaagaaatgcagcagtccctgcaacaccccaattctaggagtacaaaaaccgaacggtcagtggagtctagtgcaagatcttagactcatcagtgaggcagtaattcctctatatccagttgtacccaacccctataccctgctctctcaaataccagaggaagcagaatggttccctgttctggacctcaaggatgccttcttctgtattcccctgcactatgactcccatgactcccagtttctctttgcctttgaggatcccacagaccacacatcccaacttatatggaccgtcttgccccaagggtttagggatagccctcatctgtttggtcaggcactggcccaagatctaggccacttctcaagtccaggcactctggtccttcagtatgtggatgatttacttttggctaccagttcggaagcctcatgccagcaggctactctagatctcttgaattttctagctaatcaagggtacaaggcatctaggtcaaaggcccagctttgcctacagcaggtcaaatatctaggcctaatcttagccagagggaccaggacccttggcaaggaacgaatacagcctatactggcttatcctcaccctaagactttaaaacagttgtgggggttccttcaaatcaccgcttttgccaactatggatccccagatagagcaagatag

SEQ ID NO: 124672 - DNA, 1377 bp, Homo sapiens
atgaagccatcagtgtgggccctaattcaactcaacttgagtccttatgagaaggggatattgggactcacaaagagacaccagggacgtctgtgcacagacggaagacaaggaattcaacctcttcctccttctcaggcacacacggggatccctcttctccatccctactctatccaggtggattgcgccattgacagaggaaaactatgtttctgctgctgcatcggtgagtgtaactattctgaccagcagggtccagggactgttgcgggttcttgggcaagaggtatttctgctgctgtgtcagtgagtgcaactattctgatcagcagggtccagggaccattgcatgttcttgggcaagaggtgtttctgctgctgcgtcgacaaacaaaccttgctggttcagagaggacagaaaatggagcaggccaatcacctggtggggcttgttatcagtgtggtttgcaaggacactttacaaaagattgtccaatgagaaacaagctgccccctcgcccatgtccactataccaaggaaatcactggaaggatggggaaccaatcgagcatgactgccaacaaattatagtccagacttctgctgctcgagaggatcttttagaagtccccttagctaatcctgaccttaacctatataccgatggaagttcatttgtggagaatggggaagtagctaaagcggtcatcgcccaattcccgacaacagttggggtgtcctgtttagatgggagattgagagtgttggaagttctggccagggcaatcaggcaggagaaggaaataaagggtattcaattaggaaaagaggaagtcaaattgtccctgtttgcagatgacatgattgtatatctagaaaaccccatcatctcagcccaaaatctccttaagctgataagcaacttcagcaaagtctcaggatacaaaatcaatgtgcaaaaatcacaagcattcttatacaccaataacagacaaacagagagccaaatcatgagtgaactcccattcacaattgcttcaaagagaataaaatacctaggaatccaacttacaagggatgtgaaggacctcttcaaggagaactacaaaccactgctcaacgaaacaaaagaggatacaaacaaatggaagaacattccatgctcatgtgtagaaagaatcaatatcatgaaaatagtcatactgcccaaggtaatttatagattcaatgccatccccatcaagctaccaatgactttcttcacagaattggaaaaaaactactttaaagttcatacggaaccaaaaaagagcctgcattgccaagtcaatcctaagccaaaagaacaaagctggaggcatcacgctacctga

SEQ ID NO: 124673 - DNA, 2094 bp, Homo sapiens
atggggagaaaacagcacaaaaaggctgaaaattctaaaaaccagaatgcctattctcctccaaaggatcacaactccttgccagcaagggaacaaaactggacagagaatgagtttgacaaattgacagaagtaggcttcagaagcaaggcagaccaacattcaaattcaggaactacagagaacaccgcaaagatactccttgagaagaacaacgccaagacacataattgtcagattcacattgaaatgaaggaaaaaatgttaagagcagccagagagaaaggtatagggcagcaggtcttctgcaatgaaggtcttaatgctctactttcagacaagttcttaaagatgatgtgtccgcagtttgttccttcagatgttcagatgtgtccagagtttcttcctcctggtgggttcgtggtctcactgacttcaggagtgaagctgcagaccttcacagtgagtgttacagctcttaaaggcggcatatctggagttgttcattccttctggtgggttcgtggtcttgctggcctcatgagtgaagctgcagaccttcgtggagtgaacctgcagaccttcatggtgagtgttacagctcataaaggctttgcggacccaaagagtgagcagcagcgagatttattgcgaagagtgaaagaacaaaggttccacagcctggaaagtgacctgagccagttgcccctgctggctctggtcgcctgcttttattcccttatcttgccccacccacatcctcctgagagagctgactggtccattttacagagagctgattgtctgggcactctggcagcccagagggagctcgtcccagacaatcaagaggaaaagaggggaagcgagaaagagatggagacctggtattgtggccaatcatcccgtgaaaagggaatggcggtccatgcatgggattcagcctctgatcaagcccagcaggcatcagcccgctgccctgagtgcggggcttgccaagcctgcgctcacctggaacccgcactggcctgtgagcaccgcacgcagccccagctcctgcctgcgcctctctcttcacacttccctaattcaggggctaaataccagacacctattggccagttaaaagtgactagcacagccgccggactaaagacacgggtgtcaggctttctgggaaagggctctctaacaaaccccgactcttcagagttgggagcattgaaggaaataagcaaagaaatctccaaaggaccacaaaaccccccaggctgtcagttttgtccccttcaagctgtagggggtggggaatttggccccacccaggtacatgaccctttctccctctctgatttaaagcagatcaaggcagacctggtgaagttttcagatggtcctgatagacgactgtcctcaaggtccgttaccatccggggaatcctgggacagtctgtaaccaggcctgaagctcataaaggattacaagatattgttaaacatttaaaagctcaaggcttagtaaggaaatgcagcagtgactgcaacaccccaattctaggagtacaaaaactgaatggtcagtggagactagtgcaagatcttggactcatcaataaggcaataattcctctatatccagttgtacccaacccctataccctgctctctcaaatatcagaggaagcagaatggttcactgttctggacctcaaggatgccttcttctgtattcccctgcactctgactcccagtttctctttgcctgtgaggaccccacagaccacacatcccaacttacacagacgatcttgccccacgggtttagggatagcccttacctgtttggtcaggcactggcccaagatctaggccacttctcaagttcaggcactctggcccttcagtatgtggatgatttacctttggctaccagtttggaagcctcatgccaacaggctactctagatctcttgaactttctagctaatcaagggtacaaggcatctaggtcaaaggcccagctttgcctacagcaggtcgaatatctaggcttaatcttagccagaggggccagggccctcagcaaggaatga

SEQ ID NO: 124674 - DNA, 2406 bp, Homo sapiens
atgtctatgggctttctggttgaagaaagtgaaccagtagtttggagaggccttatggtaatgtcggccattgagaaattgttgaggcaggtatcgggttaccttctggcccagggtgtgtctaggaatgtcgtccatgagcctggagtggggtcctcacaggtctgctctgtgccctgtcctactgtggctaagctgaattcaggggctaaataccgggcacctgtcggccagttaaaagctactagcgcggcaaccagactaaagacacgggtgtcaggctttctgggaaggggctctctaacatcccctgactctttggagttgggagcgttggtttgcctagaaccagcttccacttttcctgtacttctgggccgagccaagggtcgacagagaggaaagccattcagctccggggtccgaacaacaagaggacctatcagcttacccccatatcctagcctccctatagctccccgtcctattaacgataatcctcctctaatctcccctgcccagaaggaaatatgcgaagaaatctccaaaggacaacaaaaacccctgggctatcggttatgtccccttcaagctgtagggggaggggaatttggcccaacctgggtacatgtccccttctccctctctgatttaaagcagatcaaggcagacctggggaatttttcagatgatcctgataggtacataaatgtcctacagggtctaggacaaatcttctatctcatttggagagatgtcatgctattgttagatcaaaccctggcctttaatgaaaagaatgcagctttagctgcagcccaagagtttggagatacttggtatcttagtcaagtaaatgacagaatgacagctgaagaaaggggcaaaatccctaacggtcagcaagctgtccccagtatggatccccactgggaccttgactcagatcatggggactgcagttgcaaacatctgttgacctgtgttctagaaggactaaggagaattaggaaaaaggaccaagaggaacaggcccaaaaggaaaagcaagatcagagaaagaccgcagctttagtcatggccctcagacaaacaaactttggtggttcagagaggacagaaaatggagcaggccaatcacccgagagggatacattagccaaagctggagctattatctacatgaatatggggaacaagttacccatttgttgtcccctacctgaagagggaataaaccctgaagtctgggcattggaaggacaatttggaaaagcaaaaaatgcccacccagtccaaatcaggctaaaagaccccaccacttttccttatcaaaggcaatatcccttaaggcctgaagctcataaaggattaaaggatattgttaaatatttaaaagctcaagccttagtaaagaaatgcagcagtccctgcaacagcccaattctaggagtacaaaaaccaaacagtcagtggagactagtccaagatcttagactcatcaatgaggcagtaattcctctatatccagttgtacccaacccctatatcctgctctctcaaataccagaggaagcagaatggttcactgttctggacctcaaggatgccttcttctgtattcccccgcactctgactcccagtttctttttgcctttgaggatcccacagaccacatgtcccaacttatgtggacagtcttgccccaagggtttaaggatagccctcatctgtttggtcaggcactggcccaagatctaggttacttctcaagtccaggcactctggtccttcagtacgtggatgatttacttttggctaccagttcagaagcctcgtgccagcaagctactctagatctcttgaactttctagctaatcaagggtacaagcgtttgctgactatggatccccggacacagcgagatagccaggcccctctatactctaatcaaggagagaaccagagagacaaaaagtcaaagaaagaagtacaaagagaggaagagacagacaaagagggagtcagaaagagagaaagagagagacaaaggagaagtcaaagagaaagaaagagagatggaacctcggtgtccactctggctgtgctcgaggagcccttcagcctgccgatgcgctatgggggcccctacctggggctggccaagaccagagctgactccctctgcttgtggggaggtgtggagggagaggcacgggtgggagctggggcttcgtgcagcactcgcaggccagtgcgggttccaggtgagcacaggctcggcaggccctgcactgggcatggccagccagcacctgctgggcttgatcgggggatgtgctccttctgggctgccagagtgcccgggctaggtggtgcaaagtcccacggcgactgccattga

SEQ ID NO: 124675 - DNA, 1779 bp, Homo sapiens; identical to SEQ ID NO: 119401

SEQ ID NO: 124676 - DNA, 1466 bp, Homo sapiens
ctcttagcagagaggagacctggagagggtatcttctctatgcagatggtcctcccgatgtctgcccagccttatggcggcaggctgctctaggtctcttgatctttctagctactcaagggtgcaaggtgtctaattcaaaggcccagttttgcccacagcaggagacccacagagcacatactcttctattagaatgggaaccacaggcagaaacagccttcacaaccttaaagcaggccttattacaagctgcagctttaacccttcccacacgacaaaacttctctttatatgtcacagacagagcagagatagctcttggagtccttattcagacttgtgggacaaccccacaacctgtggcatacctaaccatcgaaaaggggaaggagaggggagaacagcagcataagcagctggcagaggcagcagaaaggaaagagagaaagagacaggaagtcagagaaagagagaaagagaaagagacagagagacagtcaaagaaggaaagagaagaagagacaaagatggagtcagagagaaagagagagacagaaaaagaagtgtccactctggctgcgctcgaggagcccttcagcccacctcagccctctctggggctggctgaggctggagccggctccctcttctcgtggggaggtgtggagggagaggtgcgggggggaggcagggctgcacacagcgctcatcggctggtgcaggttccgggaggccaggtgagggtgcaggttttcgagaatccattgctaaaggccattaaatccgaccttcctcggtcctccctgtggtctgggaggaaaactagtgtttctgctgctgcgttgaaggaaataagaaaagaaatctccaaaggaacacaaatccccctgggctatcggttatgtccccttcaagctgtagggggaggggaatttggcccaaccaagatacatgtccccttctccctctctgatttaaagcagatcaaagcagacctggggaagttttcagatgatcctgataggtacatagatgtcctacagggtctagggaaaacctttgacctcacttggagagatgtcatgctactgttagatcaaaccctggcctttaatgaaaagaatgcggctttagctgcagcctcagagtttggaggtatctggtatcttagtcaagtaaatgatagaatgacagctgaagaaagggaccaattccctactggtcagcaagccatccccagtatggatccccactgggaccttgactcagatcatggggactggagtcataaacatctgttgacttgtgttctagaaggactaaggggaattaggaaaaagcccatgaattattcaatgatgtccaccataattcagggaaaggaagaaaatccttctgccttcctccagcagctatggaagtccttaagaaaatatactcccccgtcatccaaatcactctag

SEQ ID NO: 124677 - DNA, 690 bp, Homo sapiens
aattcgggggctaaataccgggtaactgttggccagttaaaagcgactagcatggccaccggactaaagacacggaaggaaacaagcaaagaaatctccaaaggactacaaaaacccctgggctattggttatgtccccttcaagctgtagggggaggggaatttggcccaacctgggtacatgtctccttctccctctctgatttaaagcagatcaaggcagacctggggaagttttcagatggtcctgataggtacatagatgtcctacagggtccagggcaaaccttctatctcacttggacagatgtcatgctattgttagatctaaccctggcctttaaagaaaagaatgtagctttagctgaagccctagagtttggagatacctggtatcttagtcaagtaaatgatagaatgacagcaaaagaaaggaacaaattccctaccggtcagcaagccgaccccagtatggatccccactgggacctcgactcagatcagggggactggagtcacaaacatctgttgacctgtgttctagaaggactaaggagaattaggaaaaagcccatgaattattcaatgatgtccaccataactcagggaaaggaagaaaatccttttgccttcctcaagcagctactggaggacttacgaaaatatactcccatcacccaactcacttga

SEQ ID NO: 124678 - DNA, 405 bp, Homo sapiens
ctgctgtaggcaaagctgggccttcaacctagacaccttgtacccttgattagctagaaagttcaagagatctagagtagctttctggcacaaggcttccaaactggtagctaaaagtaaatcatccacatattgaaggatcagagtgcctggacttgagaagtggcctagatcttgggccagagcctgaccaaacagatgagggctatccctaaacccctgaggcaagaccgtccatgtaagttgggaagtgtggtctgtgggatccaacggtcccaactctgaagagtcaggggttgttagagagccctttcccagaaagcctgacacccgtgtctttagtctggcggccgtgctagtcgcttttaactggccgacaggtgcccggtatttagcccccaaatt

SEQ ID NO: 124679 - DNA, 411 bp, Homo sapiens
ggactaagaggaatggcccaaaaggaaaagcgagatcagagaaaggccacggccttagtcatggccctcagacaaacaaaccttggtggttcagagaggacagaaaatggagcaggccaatcacccggatcccacagaccacatgtcccaacttatgtggacggcttgccccaagggtttagggatagccctcatctgtttggtcaggcactagcccaagatctaggccacttctcaagtccaggcactctggtccttcagtatgtggatgatttacttttggctaccagttcggaagcctcatgccagcaggctactctagctctcttgaactttctagctaatcaagggtacaagcgtctagatcgaaggcccagctttgcctacagcaggtcaaatatctatgcctaa

SEQ ID NO: 124680 - DNA, 1208 bp, Homo sapiens
ttctagagcataagtcaacagatgtttgtgactccagtccccatgatctgagttgaggtcccagtggggatccatattggggatggcttgctgaccggtagggaatttgtccctttcttcagctgtcattctatcatttacttgactaagattccaggtatctccaaactcccaggctgcagctaaagccgcattcttttcattaaaggccagggtttgatctaacaatagcatgacatctctccaagtgagactgaaggtttgccctagaccctgtaggacatctatgtacctatcaggatcatctgaaagcttccccaggcctacgctgatctgcagttcctccttgtacttctggtagaatttggctgtgaatccatgctggtgcctggagctctttttggttggtaagctattgattattgccacaatttcagatcctgttattggtctattcagagattcaaattcttcctggtttagtcttgggagagtgtatgtgtcaaggaatttgtccatttcttttagattttctagtttatttgcgtagaggtgtttgtagtattctctgatggtagtttgtatttctgtgggatcggtggtgatatcccctttatcatttgttattgcatctacttgatacttctctctttttttctttattagtcttgctagcggtttgttgatcctttcaaaaaaccagctcctggattcattaattttttgaagggttttttgtgtctctatttccttcagttctgctctgattttagttatttcttgccttctgctagcttttgaatgtgtttgctcttgcttttctagttcttttaattgtgatgttagggtgtcaattttggatctttcctgctttctcttgtgggcatttagtgctataaatttccctctacacactgctttgaatgtgtcccagagattctggtatgttgtgtctttgttctcgttggtttcaaagaacatctttatttctgccttcatttcattatgtacccagtagtcattcaggagcaggttgttcagtttccatgtagttgagcagttttgagtgagtttcttaatcctgagttctagtttgattgcactgtggtctgagacacagtttgttataatttctgttcttttacatttgctgaggagagctttacttccaagtatgtggtcaattttggaataggtgtggtgtggtg

SEQ ID NO: 124681 - DNA, 350 bp, Homo sapiens
ctactctggtggggacttggagaacctttgtgtggacactctgtatctagctaatctagtggggacgtggagaacctttgtgtctagctcagggattgtaaacgcaccaatcagcgccctgtcaaaacagaccactgggctctctgtaaaatggaccaatcagaaggatgtggctgtaacactcacgggaaaggtctgcagcttcactcctgagccagtgagaccacgaacccaccagaaggaagaaactccgaacacatccggacgtcaggaggaacaaactccggacacgctgcctttaagaactgtaacactcaccgctagggtccacggcttcattcttgaagtca

SEQ ID NO: 124682 - DNA, 405 bp, Homo sapiens
atgcctgagcctcccaccacctccgtgggatcctgtgcggcccgagcctccccagtgagtgccatcccctgctccacagcacccagtcccatcgaccacccaagggctgaggagtgtgggcgcacggcgtgggactggcaggcagctccacctgcagtcccggtgcgggatccactgggtgaagccagctgggctcctgagtctgggtttgtgaatgcaccaatcaacactgtatctagctactctggtggggacttggagaacctttgtgtcgacactctgtatctagctaatctagtggggacgtggagaacctttgtgtctagctcagggattgtaaacacaccaatcagcgccctgtcaaaacagaccactgggctataccaatcagcaggatgtgggtga

SEQ ID NO: 124683 - DNA, 1704 bp, Homo sapiens
tttgttcagggccaagggctcgcttttggagctttctcctgatatctcagctgattgggtaataaacatcttttaggatcaattgaccctcgagggagttgggtgacaggggagtatattttcttaaggcctcccatagctgcttgaggaaggcagtaggattttcttcctttccctgagttatggtggacatcattgaataattcatgggctttttcctaattctccttagtccttctggaatacaggtcaacagatgtttgcgactccagttcccatgatctgagtctaggtcccagtggggatccataatggggatggcttgctgcccattagggaatttgtccctttcttcggctgtcattttgtcatttacttgactaagataccaggtatctccaaattctcgggctgcagctaaagctgcattcttttcattaaaggccagggtttgatctaacaatagcatgacatctctccaagtgaggtcgaaggtttgccctggaccctgtaggacatctatatacctaccaggatcatctgaaaactttcccaggtctaccttgatctgctttagaatgccagcaatacaccctgaactcggagaaaacataatctttaccctcaaaaagctcacagtctggtgctcagttgaccaaacatcgtgtttcttttctaccgagttgcaggtctataagttgtccttttaattcccagccacctctggcctctgcttaccatggccctgccttctgacttgctgtttgctcagctccttagtgcatgggaagagcagaaacatcaggggaagagcgctgagatctgctgtgcacctgtgccgcacagcccttcccatgtagacatgtgtagcttttgggtttgccagtggatggaacttatccgcatcaagtagccttcataaatagattatccaccatttccatcactctctggataccctcacatgtttaccaccaaaactcctgcgcagagactggtcctcttttgcaaactgcctttggctcccccgcgaagagtagttttccacttagaaccagccaactctctataaaatttacctccgtgattctaattttgctccctccgccgtgggcaagttggcaatgtctgaatgtctgaagtcatttttgcttgtcacgactggggaggacagcacaagatgtcaacagtgccaaggctgagaaaccctggtttaccttaaccttaaaagaacaattcgaatgcttgggaagggatgtctgccacatctgtactggagagaagcatggcccccagtcaaggacatggagagttccatgtctggatctagaccgtgtccatccacaaagatgcctcctgctcttctccgacatgaaaattggtccaatcaacattttcctttggccagggtagcttaccagcagctcctccataaggtccataattgcaatttctcattctcatttgcctggctggcttcacccttctgtcctctctgcaccttcccacaagtgaccgaatgtttgtgcacgcaggctccattcatgcgcatgcacacacccggcttgtgtccttcttccctctcgtcccttgaacccgtagctcttgattctgcctgtaggagcaatgatgttgtagcaaccatgacaaaagaaacaaaatcagaaggcagatccaggccgctccctgccacctgccctctgt

SEQ ID NO: 124684 - DNA, 494 bp, Homo sapiens
gaggaaaactatgtttctgctgctgcatcggtgagtgtaactattctgaccagcagggtccagggactgttgcgggttcttgggcaagaggtatttctgctgctgtgtcagtgagtgcaactattctgatcagcagggtccagggaccattgcatgttcttgggcaagaggtgtttctgctgctgcgtcgacaaacaaaccttgctggttcagagaggacagaaaatggagcaggccaatcacctggtggggcttgttatcagtgtggtttgcaaggacactttacaaaagattgtccaatgagaaacaagctgccccctcgcccatgtccactataccaaggaaatcactggaaggatggggaaccaatcgagcatgactgccaacaaattatagtccagacttctgctgctcgagaggatcttttagaagtccccttagctaatcctgaccttaacctatataccgatggaagttcatttgtggagaatggg

SEQ ID NO: 124685 - DNA, 691 bp, Homo sapiens
acgactgtcctcaaggtccgttaccatccggggaatcctgggacagtctgtaaccaggcctgaagctcataaaggattacaagatattgttaaacatttaaaagctcaaggcttagtaaggaaatgcagcagtgactgcaacaccccaattctaggagtacaaaaactgaatggtcagtggagactagtgcaagatcttggactcatcaataaggcaataattcctctatatccagttgtacccaacccctataccctgctctctcaaatatcagaggaagcagaatggttcactgttctggacctcaaggatgccttcttctgtattcccctgcactctgactcccagtttctctttgcctgtgaggaccccacagaccacacatcccaacttacacagacgatcttgccccacgggtttagggatagcccttacctgtttggtcaggcactggcccaagatctaggccacttctcaagttcaggcactctggcccttcagtatgtggatgatttacctttggctaccagtttggaagcctcatgccaacaggctactctagatctcttgaactttctagctaatcaagggtacaaggcatctaggtcaaaggcccagctttgcctacagcaggtcgaatatctaggcttaatcttagccagaggggccagggccctcagcaaggaatga

SEQ ID NO: 124686 - DNA, 458 bp, Homo sapiens
cagtagggaatttgtccctttgttcagctgtcattctatcatttactggacgatgataccaggtatctccaaactcttgggctgcagctaaagccacattattttcattaaaggccagggtttgatctaacaatagcatgacatctctccaagtgagatgtaggacatctatgtacctatcaggatcatctgaaaactttcccaggtctacctggatctgcgatgcggtagcagaaacacctcttgcccaagaacctgcaacggtccctggaccctgatgatcagaatggttgcactcaccaatgcagcaatagaaacacctcttgcccaagaacccacaatggccttggaccctgttgataggaatagttgcgctcactgatgcagcagcagaaacacctgttgcccaagagctcacaacagtctctgtaccctgctgataggaatagttgcgctca

SEQ ID NO: 124687 - DNA, 546 bp, Homo sapiens
atgaaggaacaaactctggacacaccatctttaagagctgtaacactcaccgcggaggtctgcggcttcattcttgaagtcagtgagaccaagaacccaccggaaggaataaattccaggcacattttggtgaccacaaagggactttcgcctattgccaagcagtaccaagaggaacaggccaaaaaggaaaagcaagatcagagaaaggccacagccttagtcatgaccctcagacagacaaaccttggtggttcagagaggacagaaaatagagcaggccaatcacctggtagggcttgttaccagtgtggtttggaaggacaccttaaaaaagattgtccatggtatggctttctcaatgttaatctcctgtcccgacagctgtcctcaaggtctattaccatccaaggaattctgggacgggctgtaaccaggtatttctcccacctcctcagttgtaattgggagactttgctacagatagatcaaggccatcaagctacagatggtcttacaaatggaaccccaaatgagctcaactaa

SEQ ID NO: 124688 - DNA, 669 bp, Homo sapiens
atgatccaacaactggactcagggtgcccaggtcaagcgccagctcatgtcatcaccctcactgagccccgggtatgtttaaccattgagggccaggaaattcacttcctcctggacactggtatggccttctcagtactaatctcctgtcctggacaactgtcttcaaggtccgttaccatccgaggaatcctgggacagcctgtaaacaggatcccacagaccacacatcccaacttacgtggaccatcttgccccaagggtttagggatagccctcatgtttggtcaggcactggcccaagatctaggtctcttctcaagtccaggcactctggtccttcagtatgtggatgatttacttttggctaccagtttggaagcctcatgccagcaggctactctagatctcttgaactttctagctaatcaagtgtacaaggtgtctaggttgaaggcccagctttgcctacagcaggtcaaatatctaggcctaattttagccagaggaaccagggccctccaggatggggaaccaattgagcatgactgccaacaaattatagtccagacttatgctgcccgagatgatctcttggaagtccccttagctaatcctgaccttaacctatataacgatggaagttcatttgtggagaatgggatatga

SEQ ID NO: 124689 - DNA, 675 bp, Homo sapiens
ctactgctgcaccaagtcattttggtgatactcaacaatattgtccatatcccattttcctggttccttcagctctgattttgaagaactttcttccatagggatgtagtctacctgaggtgacatctgccaccacttggggctgacacctgtgggttcacactcactgctaagctgctccagatgacaagtggcctgagtaggagctgtcactgctgccacaattggaactggcattctgctacagcaattggcatttcttgtctgcaattggctgcttctatcaggatcatctgaaaacttccccaggtctgccttgatctgctttaaatcagagagggagaaggggacatgtatccaggttgggccaaattcccctccccctacagcttgcaagggacataactgatagcctgggggtttttgtggtcctttggagatttctttgcttgtttccttcataatgtagaatccgtgggagccctgagcttgttttcctgcaactagacagtcccatctatccagcaggaagtagctagagtggtcatcagccaaattcccaacagcagttggggtgtccttgctactttcttctgtgtgtagatcccagtgattcttgatggatgctatgtcccggatggacttagtcagatatacttctgcaagagtttccat

SEQ ID NO: 124690 - DNA, 482 bp, Homo sapiens
ctctatctagctactctggtggggacttggagaaactttatgtctagctaagagattgtaaatacactaatcagcactctgtgtctagctcaaggtttgtaaacataccaatcagcaccctgtgtctaactcagggtttgtgaatgcacccaatggacactctgtatctagctactctgggtggggacttggagaacctttgtgtccacactctgtatctagctaatctagtggggatgtggagaacctttgtgtctagctcagggatcgtaaacgcaccaatcagcaccctgtcaaaacagaccacttgactctctgtaaaatggaccaatcagcaggatgtgggtggggcgagacaagagaataaaagcaggctgcctgagccagcagtgacaacccccctcgggtcccctcccacgccgtggaagctttgttctttcgctctttgcaataaatcttgctactgcccaaaaaaaaaaaaa

SEQ ID NO: 124691 - DNA, 2334 bp, Homo sapiens
atgggctgctttgtaattcacacaaaggcactgtgtgagctagccttgctcagaagggcagctcagcagctcattgaagtgttccctgaattcctgccaagaggacctatcagcttacccccatatcctagcctccctatagctccccgtcctattaacgataatcctcctctaatctcccctgcccagaaggaaatatgcgaagaaatctccaaaggacaacaaaaacccctgggctatcggttatgtccccttcaagctgtagggggaggggaatttggcccaacctgggtacatgtccccttctccctctctgatttaaagcagatcaaggcagacctggggaatttttcagatgatcctgataggtacataaatgtcctacagggtctaggacaaatcttctatctcatttggagagatgtcatgctattgttagatcaaaccctggcctttaatgaaaagaatgcagctttagctgcagcccaagagtttggagatacttggtatcttagtcaagtaaatgacagaatgacagctgaagaaaggggcaaaatccctaacggtcagcaagctgtccccagtatggatccccactgggaccttgactcagatcatggggactgcagttgcaaacatctgttgacctgtgttctagaaggactaaggagaattaggaaaaagtacatgaattattcaatgatgtccaccataactcagggaaaggaagaaaatccttctgcctccctcgagcggctatgggaggccttaagaaaatatactcccctgtcaaccaaatcacttgagggtcaattgattctaaaagataagtttattacccaatcagccacagatatcaggagaaagttccaaaagcaagccctgggccctaaacaaaatttggagacattattaaacctggcaacctcagtattctataacagggaccaagaggaacaggcccaaaaggaaaagcaagatcagagaaagaccgcagccttagtcatggccctcagacaaacaaaccttggtggttcagagaggacagaaaatggagcaggccaatcacccgagagggatacattagccaaagctggagctattatctacatgaatatggggaacaagttacccatttgttgtcccctacctgaagagggaataaaccctgaagtctgggcattggaaggacaatttggaaaagcaaaaaatgcccacccagtccaaatcaggctaaaagaccccaccacttttccttatcaaaggcaatatcccttaaggcctgaagctcataaaggattaaaggatattgttaaatatttaaaagctcaagccttagtaaagaaatgcagcagtccctgcaacagcccaattctaggagtacaaaaaccaaacagtcagtggagactagtccaagatcttagactcatcaatgaggcagtaattcctctatatccagttgtacccaacccctatatcctgctctctcaaataccagaggaagcagaatggttcactgttctggacctcaaggatgccttcttctgtattcccccgcactctgactcccagtttctttttgcctttgaggatcccacagaccacatgtcccaacttatgtggacagtcttgccccaagggtttaaggatagccctcatctgtttggtcaggcactggcccaagatctaggttacttctcaagtccaggcactctggtccttcagtacgtggatgatttacttttggctaccagttcagaagcctcgtgccagcaagctactctagatctcttgaactttctagctaatcaagggtacaagcgtttgctgactatggatccccggacacagcgagatagccaggcccctctatactctaatcaaggagagaaccagagagacaaaaagtcaaagaaagaagtacaaagagaggaagagacagacaaagagggagtcagaaagagagaaagagagagacaaaggagaagtcaaagagaaagaaagagagatggaacctcggtgtccactctggctgtgctcgaggagcccttcagcctgccgatgcgctatgggggcccctacctggggctggccaagaccagagctgactccctctgcttgtggggaggtgtggagggagaggcacgggtgggagctggggcttcgtgcagcactcgcaggccagtgcgggttccaggtgagcacaggctcggcaggccctgcactgggcatggccagccagcacctgctgggcttgatcgggggatgtgctccttctgggctgccagagtgcccgggctaggtggtgcaaagtcccacggcgactgccattga

SEQ ID NO: 124692 - DNA, 1353 bp, Homo sapiens
atgcaagaaaaacaccatgggaacacagacgcagagactgaactgaggcaagctagagaacaccaaggactgccagcccgcatagaagacaggagcagaaggaaacaagcaaagaaatctccaaaggaccacaaaaaaccccagctatcggttatgtctccttcaagctgtagggtaggggaacttggcccaacctggatacacatccccttcaccctctctgatttcaagcagatcaaggtagaactggggaagttttcagatgatcctggtaggtatatagatgtcctacagggtctagggcaaactttcaacctcgattggagagatgtcatgctattgttaggtcaaacactggcctttaatgaaaagaatgtggctttagctgcagcccgagagtttggagatacctggtatcttagtcaggtaaatgatagaatgacagccaaagaaagggaaaaattccctacaggtcagcaagccatccccagtatggatccctgctgggacctcgactcagatcatggggactggagatgcaaacatctgttgacctgtgttctagaaggactaaggagaattaggaaaaagcccatgaattattcattgatgtccaccataactcagggaaaggaagaaaatccttctgccttccctgagcagctacaggaggccttaagaaaatatactcccttgtcacctgactccctcaaagcctgggccacagagcaagattccatctcaaaaaaaagaaaaagattgtccaatgaaaaacaagctgccctctcacccatgtccactatgccgaggcaatcactggaaggcacagtgccccagaggacaaaggttctctgggccagaagcccccaaccagatgatccaacaacaggacagagggtgcccggggcaagcgccagctcatgtcatcaccctcactgagccccgggtacgtttaaccattgagggccaggaaactgacttcctcctggacactggcgcggccttctcagtgttaatctcctgtcttggacgactgtcctcaaggtctgttaccatccgatgaatcctgggacagcctgtaaccaggtatttctcccacctctcagttgtaattgggagactttgctcttttcacatgcctttcttattatgcctgaaagttccacacccttattaggcagggacatattagccaaggctggagctattatctacatcaatatggggaacaagttacccatttgttgtccccctacttgtggagggaatcaaccctgaagtctgggcattggaaggacaatttggaagggcaaaaaatgcccgcccattacaaatcaggttaaaagatcccac

SEQ ID NO: 124693 - DNA, 1997 bp, Homo sapiens
attggttgtcattatttattttatttttatttatttatttatttttagagacacggtctgactttgttaccccggctggagtgcagtggtgcaatcatggctcactgcagccttaacctcctgggctcaagtgatcctctcgccaaggctaggataagtagctaggactacagatgcgccccatcacgcccagctaattttacaacttctgtagagatggagtgttgctgggttgcccaggctggtcttgaattcctgggctcaagcgatcctcctgtgtccggaatttggtgggttcttggtctcactgacttccagaatgaagccgcggaccctcgcggtgagtgttacagttcttaaagacagcgtgtccagagtttgttccttctgatgttcagatgtgttcagagtttcttccttctggtgggttcgtggtctcgctgacttcaggagtgaagctgcagaccttcacgctagacacaaaagttctccatgtccccttctccctctctgatttaaagcagatcaaggcagacctggggaagttttcagatgatcctgataggtacaaagatgtcctacagggtctagggcaaacattcgatctcgcttggagagatgtcatgctattgttagatcaaatcctagcctttattgaaaagaatgcagctttagctgcagcccgagagtttggagatacctggtatcttagtcaagtaaatgatagaatgacagccaaagaaagggacaaattccttactggtcagcaagccatccccactatggatccccactgggactttgactcagatcatggggactggagtcataaacatctgttgacctgtgttcttgaaggactaaagggaattaggaaaaagcccatgaattattcaatgatgtccactataactcagggacaagaagaaaagccttctgccttcctcgagcggctaagagaggccttaagaaaatatactcccctgtcacccgaatcactcgagggtcaattgattctaaaagataagtttattacccagtcagctgcagatatcaggagacagctccaaaagcaagccctgggccctgaacaaaatctgcaggaattattaaacctggcaaccttggtgttctataacagggaccaagaggaacaggcccaaaaggaaaagcgagatcagagaaaggctgcagccttagtcagggccctcagacaaacaaaccttggtggttcagagaggacagaatatggagcaggccaatcacccaggagggatatattagccaaagctggagctattatctacatgaatatggggaacaagttacccatttgttgtcccctacttgaggagggaatcaaccctgaagtgtgggcattggaaagacaatttggaagggcaaaaaatgcccgcccagtccaaatcaggctaaaagaccccaccacttttccttatcaaaggcaatatcccttaaggcttgaagctcataaagcattacaggatattgtaaaacatttaaaacctcaaggcttagtaaggaaatgcagcagtccctgcaacaccccagttctaggagtacaaaaaccaaatggtcagtggagattagtgcaagatcttagactcatcaatgaggcagtaattcctgtatatctagttgtagcaaacccctataccctgctctctcaaataccagaggaagcagaatggtttatggttctggacctcaaggatgccttcttctgtattcccctgcactctggctcccagtttctctttgcctttgaggatcccacagaccacatgtcccaacttatgtggatggtcttgccccaagggtttagggatagccctcatctgtttggtgaggcactggcccaagatctaggccacttctcaagtccaggcactctggtccttcagtatatggatgatttacttttggctaccagttgggaagcctcatgccagcaggctactcttgaactttctagctaa

SEQ ID NO: 124694 - DNA, 1110 bp, Homo sapiens
atgtttcggaaggatgaagaactgacttcctcacagagggatttagctgtaaggaactgggcatggagcctagcccgtggtgagcgctcagcaaacatgcacgcagtacacacctcgcttctagtggaaaggacaatactgaccacgaccaaggaaagagggtctaccttgcaatatcccttaagacctggagctcataaaggattgcaagatattgttaaacgtttcaaagctcaagccttaataaggaaatgcagcagtccctgcaacaccccaattctaggagtacaaaaaccgaatggtcagtggagactagtgcaagatcttagacttatcaatgaggcagtaattcctctatatccagttgtacccaacccctataacctgctctctcaaataccagaggaagcagaatggttcactgttctggacctcaaggatgccttcttctgtattcccctgcactctgactcccagtttctctttgcctttgaggatcccacagaccacacgtcccaacttacgtggacggtcttgcccccagggtttagggatagccctcccctgtttggtcaggcactggcccaagatctaggccacttctcaagtccaggcactctggtccttcagtatgtggatgatttacttttggccaccagttcagaagcctcttgccagcaggctactctagatctcttgaactttctagctaatcaagggtacaagacatctaaattgaaggcctacctctgcctacaacaagtcaaatatctagacctaatcttagccagaggaactagagccctcagcaaagaacaaattcagcctatactggtttatcctccccctaagacattaaaacaattggattttgccgatttcggaaccaccatcaaacaggattttcgcctgctggggcaaaccagcgtggaccgcttgctgcaactctctcagggccaggcggtgaagggcaatcagctgttgcccgtctcactggtgaaaagaaaaaccaccctggcgcccaatacgcaaaccgcctctccccgcgcgttggccgattcattaatgcagctggcacgacaggtttcccgactggaaagcgggcagtga

SEQ ID NO: 124695 - DNA, 5173 bp, Homo sapiens
cgaaggtctgcagcttcactcctgagccagcaagaccacgaaccaaccagaaggaagaaactccgaacacatctgaacatcagaaggaacaaactccggacacgccgcctttaagaactgtaacactcaccgggagggtccgcagcttcattcttgaagtcaaccgatcaaccagagagaaggttaacaaggaaatccaggacttgaactcagctccgcaacaagcgggcctaatagacatctacagaactctccaccccaaatctacagaatatacattcttctcagcaccacatcacacttattctaaaattgaccacataattggaagtaaagcactactcagcaaatgtaaaagaacagaaattacaaaaaactgtctctcagaccacaatgcaatcaaattagaactcaggattaagaaactcactcaaaactgctcaactaaatggaaactgaacaacctactcctgaatgactactgggtacataatgaaatgaaggcagaaataaagatgttctttgaaaccaacgagaacaaagacacaacataccagaatctctgggacacatttaaagcactgtgtagagggaaatttatagcactaaatgcacacaagagaaagcaggaaagatctaaaatcgacaccctaacatcacaattaaaagaactagagaagcaagagcaaacaaattcaaaagctagcagaagacaagaaataactaagatcagaggagaactgaaggagatagagacacacaaaaaacccttcaaaaaatcaatgaatccagaagttggttttttgaaaggatcaacaaaattgatagaccgctagccagactaataaagaaaaaaagagagaagaatcaaatagacacaataaaaaatgataaaggggatatcaccaccgatcccacagaaatacaaactaccatcagagaatactacaaacacctctacacaaataaactagaaaatctagaagaaatggatacattcctcgacacatacactctcccaagactaaaccaggaagaagttgaatctctgaatagaccaataacaggctctgaaattgtggcaataaccaatagcttaccaaccaaaaagagtccaggaccagaaggattcacagccgaattctaccagaggtacaaggaggaattggtaccattccttctgaaactattccaatcaatagaaaaagagggaatcctccctaactcattttatgaagccagcatcattctgataccaaagccgggcagagacacaaccaaaaaagagaattttagaccaatatccttgataaacattgatgcaaaaatcctcaataaaatactggcaaaccgaatccagcagcacatccaaaagcttatccaccatgatcaagtgggcttcatccctgggatgcaaggctggttcaatatacgcaaatcaataaatgtaatccagcatataaacagagccaaagacaaaaaccacatgattatctcaatagatgcagaaaaagcctttgacaaaattcaacaacgcttcatgctaaaaactctcaataaattaggtattgatgggacgtatttcaaaataataagagctatctatgacaaacccacagccaatatcatactgaatgggcaaaaactggaagcattccctttcaaaactggcacaagacagggatgccctctctcaccactcctattcaacatagtgttggaagttctggccagggcaatcaggcaggagaaggaaataaagggtattcaattaggaaaagaggaagtcaaattgtccctgtttgcagacgacatgattgtttatctagaaaaccccatcgtctcagcccaaaatctccttaagctgataagcaacttcagcaaagtctcaggatacaaaatcaatgtacaaaaatcacaagcattcttatacaccaacaacagacaaacagagagccaaatcatgagtgaactcccattcacaattgcttcaaagagaataaaatacctaggaatccaatttacaagggatgtgaaggacctcttcaaggagaactacaaaccactgctcaaggaaataaaagaggacacaaacaaatggaagaacattccatgctcacgggtaggaagaatcaatatcgtgaaaatggccatactgcccaaggtaatttacagattcaatgccatccccatcaagctaccaatgactttcttcacagaattggaaaaaactactttaaagttcatatggaaccaaaatagagcccgcatcgccaagtcaatcctaagccaaaagaacaaagctggaggcatcacactacctgacttcaaactatactacaaggctacagtaaccaaaacagcatggtactggtaccaaaacagagatatagatcaatggaacagaacagagccctcagaaataatgccgcatatctacaactgtctgatctttgacaaacctgagaaaaacaagcaatggggaaaggattccctatttaacaaatggtgctgggaaaactggctagccatatgtagaaagctgaaactggatcccttccttacaccttataccaaaatcaattcaagatggattaaagatttaaacgttagacctaaaaccataaaaaccctagaagaaaacctaggcattaccattcaggacataggcgtgggcaaggacttcatgtccaaaacaccaaaagcaatggcaacaaaagccaaaattgacaaatgggatctaattaaactaaagagcttctgcacagcaaaagaaactaccatcagagtgaacaggcaacctacaacatgggagaaaattttcgcaacctactcatctgacaaagggctaatatccagaatctacaatgaactcaaacaaatttacaagaaaaaaacaaataaccccatcaaaacgtgggcgaaggacatgaacagacacttctcaaaagaagacatttatgcagccaaaaaacacatgaagaaatgctcatcatcactggccatcagagaaatgcaaatcaaaaccactatgagatatcatctcacaccagttagaatggcaatcattaaaaagtcaggaaacaacaggtggaatattggtggacttgtccccaagttaaattatgatttaaagagacacttagaaaaagaggaaaagcctactaaaactgagcaggctatcagcaaagacaaaaatgcagagaagaacaaccgtttatctcttcagggagaaattattattgcaattatattgataacagaacctgggttgaaagggagaggaatcccaattttcataattgaagatggaggaacaagttatgtggttgctctgcagatactatgcaaattagttgaactaactcagaaaccagttgatcagccctttgattacatttgtggtgtgagcacagctttactcctgaagtcagcaagaccacgaacccactggaaggaagaagctccagacacatctgaacatctgaaggaacaaactccggacacaccatctttaagaactgtaacactcactgctagagtctgcggcttcattcttgaagtcagcgagaccaagaactcaccggaaggaaccaattccggacatattttgacatcccagatgggactatcacctattgccaagcggagggaaactagtgcttctgctgctgcgttggtgagtgcaactattccaatctgcagggtccagggaccattgcgggttcttgggcaagaggtgtttctgctgctgcttcgccttcctacagctccccttcctattaatgataagcctcctctaatctcccctgcccagaaggaaacaagcaaagaaatctccaaaggaccacaaaaacccctgggctatcggttatgtccccttcaagcagtagggggaggggaatttggcctaacccgggtacatgtccccttctccctctatgatttaaagcagatcaaggcagacttggggaagttttcagatgatcctgataggtacatagatgtcctacagggtctagggcaaactttctatctcacttggagagatgtcatgctattgttagatcaaaccctggcctttaatgaaaagaacgcagctttagctgcagcccgagagtttggagatatctgggaccaaggggaacagtccaaaaaggaaaagcaagatcagagaaagaccgtagccttagtcatggccctcagacaaataaaccttggtggttcagagaggacagaaaatggagcaggtcaatcagccgggtttagggatagccctcaactgtttggtcaggcactggcccaagatctaggccacttctcaagtccaggcactcttgtccttcaatatgtggatgatttacttttggctaccagtttggaagcctcatgccagcaggctactctagatctcttgaactttctagctaatcaagggtacaaggtgtctaggtcgaaggcccagctttgcctacagcaggtcaaatatctaggcctaatcttagccagagggaccagtgcccagttagcagaactactggcacttaccctagccttagaactgggaaatggaaaaagaataaatgtgtatacagatagcaagtatgcttatctaatcctgcatgatcatgctgcaatatggaaagaaagggcgttcttaacctctgggggaacccccattaaataccacaaggaaattatggagttattgcacacagtgcaaaaacccaaggaagtggcagtcttacactgccaaagccatcaacaagctcaaggctctgtggctctacaatcagcagatggaaaaggcagccaggcttttgtcattttcttcaagtcagcaggttccctctggccaaagatatgttcagaaatgccatccaggatccatggcctggaaatggaagccttcagaatccacttggtgctctattccactgtggctgaggtggaacccaaaaaacaagacaaaattcttctcactattcccacccatttttataagcacatgagtctctctccacgaccaccactggcccaggcccacagaatggagcttcctgagagtcgaactgcagtgattgtttttgctcttctggatctagccacccagtggagctaccgagctctgggctggtactggggactgtctgcaaagagtcctgtgatgtaa

SEQ ID NO: 124696 - DNA, 2049 bp, Homo sapiens
atgcaggactgggcggcggccaaagcggatcggacagtgctccgagaacgggtgcgcatagaaattgcatcaacgcatatagcgctacagcacgccatagtgactggcgatgctgtcggaatggacgatatcccgcaagaggcccggcagtaccggcataaccaagcctatgcctacagcatccagggtgacggtgccgaggatgacgatgagcgcattgttagatttcatacacggtcccaggagaaaaaggaagaagctatcaccttactgaaggattccatcaaatatggtccagagtttgcagatgcatattcaagcttagcttcgttattggctgagcaggcccctgaaggcctttgtccgttgtcgtcaggactaggtcggtctcgcccaatggcgacagagtggtcacccgggaaccggatctgcgcggctccgtggcctaaagaggtggccgagcctgcttgcgtccctaggccgccttcccgggccctccacgccttaatggcctccgccgcgcggcgttcaagcggccgccatactttccggcccaccacgcccggcgccgcccaaaggcgctgcgtcccagcgactctgcgggggtttcgtcgaggcccggcaggcttgggtcgggagacgcggcggccggcggggtcccgtcggggagacgcagccgccgccatcagtcatccagccgccctcccgcggggcagggctcgggaccagcagcccgccatgcctgagcctcccaccccctccgtgggctcctgtgcggcccgagcctcccagattagcgcggccccctgctccacggcgcccagtcccatcgaccacccaagggctgaggagtgccggcgcaccgtgtgggactggcaggcagctccacctgcagcccaggtgcgggatccattgggtgaagccagctgggctcctgagtctggtggagatgtggagaacctttatgtcttgctcagggattgtaaatacaccagtcagcaccctgtgtctagctcagggtctgtgaatgcaccaatcgacactctgtatctagctactctgctcagggattgtaaatacaccaatcggcactctgtatctagctcaaggtttgtaaacacaccaatcagcaccgtgtctagctcagagtttgcgaatgcaccaatcgacactctgcatctagctactctgaaggaagaaactccgaacacatctgaacatcagaaggaacaaactccggacatgccgcctttaagaactgtaacagtcacggcgagggtccgcggcttcattcttgacgtcagtgagaccaagaacccaccaattccagacacattttggcgacccagatgggaccttcgccaatcaccaagcagaggacaggcaagggtgcaggttttcgagaatgcgtcggtaaggaccgctaaatctgactttccttggtcctccatgtggtctgggaggaaaactagtgtttctgctgctgcgttggtgagcgcaactattccgatcagcagggcccatggacgattgattgtgggttcttgggcaagaggggtttctgctgctgcgtcgcagataaaggtagacctggggaagttttcagatgatcctgataggtatatagatgtcctacagggtgtagggcaaaccttcaatctctcttggagagatgtcatgctattgttagatcaaaccctggcttttaatgaaaagaatgcggctttagctgcagcccaagagtttggagatacctggcatcttagtcaagtaaatgatagaatgacagctgaagaaagggacaaattccctaccagtcagcaagccatccccagtatggagccccactgggatctcgactcagatcatggggactggagtcacaaacatctgttgacctgtgttctacaaggactaaggagaactgggaaaaagcccatgaattattcagtgatgcccaccataactcagggaaaggaagaaaatccttccaccttcctcgagcggccatgggaggccttaagaaaatatactccccaaatcacttga

SEQ ID NO: 124697 - DNA, 2022 bp, Homo sapiens
atgaatgctcatccggagttccgtatggcaatgaaagacggtgagctggtgatatgggatagtgttcacccttgttacaccgttttccatgagcaaactgaaacgttttcatcgctctggagtgaataccacgacgatttccggcagtttctacacatatattcgcaagatgtggcgtgttacggtgaaaacctggcctatttccctaaagggtttattgagaatatgtttttcgtctcagccaatccctgggtgagtttcaccagttttgatttaaacgtggccaatatggacaacttcttcgcccccgttttcaccatgggcaaatattatacgcaaggcgacaaggtgctgatgccgctggcgattcaggttcatcatgccgtttgtgatggcttccatgtcggcagaatgcttaatgaattacaacagtactgcgatgagtggcagggcggggcgcaatatcccttaaggcctgaagctcataaaggaatacaggatattgttaaatatttaaaagctcaaggcttaggaaggaaatgcagcagtccctgcaacaccccaattctaggagtacaaaagctgaatggtcaatggagactagtgcaagatcttagactcatcaatggggattcttctagagctcgaaactgcaggctatgcaagctatgtttgcagaaaacagcatgtcttcagtttacagccccacacaggaagctgagtactggctaccgcatggaattctgcaacctgcagactgcttctttgaggcagcaagtacatcaaggagtatgtggccaagggaagctggctctctaccaccttcttactacatggaatatggattttgccgatttcggaaccaccatcaaacaggattttcgcctgctggggcaaaccagcgtggaccgcttgctgcaactctctcagggccaggcggtgaagggcaatcagctgttgcccgtctcactggtgaaaagaaaaaccaccctggcgcccaatacgcaaaccgcctctccccgcgcgttggccgattcattaatgcagctggcacgacaggtttcccgactggaaagcgggcatctggaccacgggtcccactcgtatcgtcggtctgataatagtctggacccacgatcccactcgtgttgtcggtctgatatcggtctgggaccacggtcccacttgtattgtcgatcagactatcagcgtgagactacgattccatcaatgcctgtcaagggcaatcaggcaccgtgtatgaaatctaacaatgcgctcatcgtcatcctcggcaccgtcaccctggatgctgtaggcataggcttggttatgccggtactgccgggcctcttgcgggatatcgtccattccgacagcatcgccagtcactatggcgtgctgctagcgctatatgcgttgatgcaatttctatgcgcacccgttctcggagcactgtccgaccgctttggccgccgcccagtcctgctcgcttcgctacttggagccactatcgactacgagatcatggcgaccacaccctcctgggaggatgaggaaccaatcgagcatgacagccaacaaattatagtccagacttatgccacccgagatgatctcttagaagtccccttagctaatcctgaccttaacctatatgccgatggaagttcatttgtggagaatgggatacgaagggcaggttatgccatagttagtgatgtaactgtacttgaaaactctttggcagcagtgactctccaaaaccgccaaggcctagacctcctcactgctgagaaaggaggactctgcaccttctcagggaaagagtgttgtttttacactaaccagtcagggataagttcccctctggaggacactacaactgcagggccctttcttcaccccatccagcaggaagtagctagagctatcatcggccaattcccaacagcatttggggtgtcctgtttagaggggagattgagaggtgaagccagctggacttcctgggtcgagtag

SEQ ID NO: 124698 - DNA, 2166 bp, Homo sapiens
ctaggagcttggaagaaagctgcgcccagccagtcttcggggaggagctgcattacacacaggcttcggaggcttccgtggagaagcttggaggtaatggctgtcgtaaatgctagttattttcagagagttctcgaagatttggaataaaggtgagaaaagaagagagtgctgcttaggaataacgggaaaggagtgtcgttctgtgagggtcgttgtttcggggatggcttgctgaccagtagggaatttgtccctttcttcagctgtcattctatcatttacttgactaagataccagatatcttcaaactcttgggctgcagctaaaactgcattgttttcattaaaggccagggtttgatctaacaatagcatgacatctctccaagtgagatcaaaggtttgctctaggctgtgtaggacatctatatacctatcgggattgtctgaaaacttccccaggtctgccttgatctgctttaaatcagagagggagaaggggacatgtacccaggttgggccaaattcccttccccctacagcttgaaggggacataaccgatagcccaggggtttttgtggtcccttggagatttctttgcttgcttccttctgggtgggggagattagaggaggcttatcattaataggaaggggagctgtagaaaggctagtatatggaggtaagctgagaggttctgctgtgggatgtaaattgcatgctttgcatagttgtggattctccttcaatgaaaagaaagcttgggcataaggtatttcactccatttgccctcctgacacagcagcagatccccctcttgcccaagaacctgcagcagtccctggaacttgctgatcagagtagttgtgctcaccagtgcagcagcagaaatactagttttcctccgcttagtgataggtgatagtcccttcgtgtttgccaagatgtgtccagagttggttccttctggtgggttcctggtctcactgacttcaagaatgaagccacgggccttcatggtgagtgttacagctctgttgtttcctgactttttaatgattgcctttctaactggtatgagatggtatctcattgtggttttgatttgcatttctctgatggccagtaatgatgagcattttttcatgtgttttttggctgcataaatgtcttcttttgagaagtgtctgttcatatcattcgccgactttttgatggggttgtttgtttttttcttgtaaatttgtttgagttcattgtagattctggatattagccctttgtcagatgagtagattgcaaaaattttctcccattttgtaggttgcctgttcactctgatggtagtttcttttgctgtacagaagctctttagtttaattagatcccatttgtcaattttggcttttgttgccattgctcttggtgttttagatgtgaagtccttgcccatgcctatgtcctgaatgatattgcctaagttttcttctagggtttttatggttttaggtctaacatgtaagtctttaatccatcttgaattaattttagtataaggtgtaaggaagggatccagtttcagctttctacatatggctagccagttttcccagcactgtttattaaatagggaatcgtttccccattgcttgtttttctcaggtttgtcaaagatcagatagttgtagatatgcggcattatttctgagggctctgttctgttccattggtctatatctctgttttggtaccagtaccatgctgttttggttaccgtagccttgtagtatagtttgaagtcaggtggcgtgatgcctccagctttgttcttttggcttaggattgacttggcgatgcgggctcttttttggttccatatgaactttaaagtagttttttccaattctgtgaagaaagtcattgggagcttgatggggatggcattgaatctataaattaccttgggcagtatggccattttcacgatattgattcttcctacccatgagcatggaatgttcttccatttatttgtgtcctcttttatttcattgagcagtggtttgtagttctccttgaagaggtccttcacatcccttgtaagttggattcctaggtattttattctctttgaagcaattgtgaatgggagttcactcat

SEQ ID NO: 124699 - DNA, 2151 bp, Homo sapiens
atgagtggaactctcaaaggcatgttgcccaagcgagacttgcccatctatcctatctatcctgacctttgccccctgggtcctaatgcctgtgagacaaacttcctctcgcctctcttctctgagaaggaaataagcaaagaaatctccaaaggtccacaaaaacccctgggctatcgattatgtccccttcaagctataggggcaggggaatttggcccaacccgggtacatgtccccttctccctctctgatttaaagcagatcaaggcagacctggggaagttttcagatgatcctgataggcacatagatgtcctacagggtctagggcaaacctttgacctcgcttggagagatgtcatgctactgttagatcaaaccctggccttttatgaaaagaatgtggctttagctgcagcccgagagtttggagatacctggtatcttagtcaagtatgtttaactattgagggccaggaaattgacttcctcctggacagtggcacggccttctcagtgttaatctcctgtcctggacaactgtcctcaaggtctgttaccatccgaggaatcctgggacagcctgtaaccaggcctgaagctcataaaggattacagaatactgttaaacatttgaaagctcaaggcttagtaaggaaatgcagcagtcccggcaacaccccaattctgggagtacaaaaacccaatcgtcagtgcagactagtgcaagatcttagactcatcaatgaggcagtgattccactatatccagttgtacccaacccctataccctgctctctcaaataccagaggaagcagaatggttcatggttctggacctcaaggatgccttcttctgtattcccctgcactctgattcccagttcctctttgcttttgaggatcccacagaccacacgtcccaacttatgtggatggtcttgccccaggggtttagggatagccctcatctgtttggtcaggcactggcccgagatctaggccacttctcaagtctaggcactctggtccttcaatatgtggatgatttacttttggctaccagttcggaagccttgtgccagcaggctactctagatctcttgaactttctagctaatcaagggtacaaggtgtctaggtcgaaggcccagctttgcctacagcaggatggggaaccaatcgagcatgactgccaacaaattatagtccagacttatgccacccgagatgatctcttagatgtccccttaactattcctgaccttaacctatataccgatggaagttcagttgtggagaatgggatacaaaggacaggttacaccatagttagtgatgtaaccatacttgaaagtcccgtggcagccatcttgctgttacttgcctttggggcctgtatttttaaccttcttgtcaaatttgtttcctctagaatcgaggccttcgagctacagatggtcttacaaatggaaccccaaatgagttcaactaacaacttctaccgaggacccatggaccgacccgctggcacttcccctggcctagagagttcccctctgaaggacactacaactgcaggagctgtaacactcaccacggaggtctgcagcttcactcctgagccagcgagaccacgaacccaccagaaggaagaaactccgaacacatctgaacatcagaaggaacaaactccagacacgctgcctttaagaactgtaacactcaccgcaagcgtccacggcttcattcttgaagtcaatggttcaggaaaaactggaaaggcaactatagtgtggcaagatgccacgcagaactggcagcacaaaatccaggaacgttttaaaactacgcaacaggcggagttagaagaggtatcagctcttgaaggcttacttctcaatactggctgcgagagcaagatgcccacgacgaccttgggaactacaagtccgccatacagcgggagcgcccggagtagggacgaccgacaccagcccgtacccaccctcgtgcgcgacggccccttccgccggtcaacccggaagagttcgcggtggccgcggcagacggaagccgaacgagttcttcggcggctgcaggatggggactccaaagtgaaagtggcggtcggatacgacccatga

SEQ ID NO: 124700 - DNA, 3887 bp, Homo sapiens
gaggccaggtgagggtgcaggttttcgagaatccattgctaaaggccattaaatccgaccttcctcggtcctccctgtggtctgggaggaaaactagtgtttctgctgctgcgttgaaggaaataagaaaagaaatctccaaaggaacacaaatccccctgggctatcggttatgtccccttcaagctgtagggggaggggaatttggcccaaccaagatacatgtccccttctccctctctgatttaaagcagatcaaagcagacctggggaagttttcagatgatcctgataggtacatagatgtcctacagggtctagggaaaacctttgacctcacttggagagatgtcatgctactgttagatcaaaccctggcctttaatgaaaagaatgcggctttagctgcagcctcagagtttggaggtatctggtatcttagtcaagtaaatgatagaatgacagctgaagaaagggaccaattccctactggtcagcaagccatccccagtatggatccccactgggaccttgactcagatcatggggactggagtcataaacatctgttgacttgtgttctagaaggactaaggggaattaggaaaaagcccatgaattattcaatgatgtccaccataattcagggaaaggaagaaaatccttctgccttcctccagcagctatggaagtccttaagaaaatatactcctctgtcacccaactcactagtgggtcaattgatcctaaaagataagtttattacccaatcaaccacagatatcagaagaaagctccaaaatagggaccaagaggaacaggcccaaaaggaaaagcgagatcagagaaaggccatagccttagtcatggccctcagacaaaccttggtggttcaaagaggacagaaaatggagcaggccaatcacctggtggggcttgttaccagtgtggtttgcaaggacaccttaaaaaagattgtccaacgagaaacaagccgccccatcgtccatgtccactatacggaggcaatcactggaagtcacactacccagagggcaaagcttctctgggccagaagcccccaaccagatgatccaatgacaggactgaggatgactgcggcaagcacccgttcatgtcatcaccccctcactgagccctgggtatgtttaatcattgagggccaggaaattgacttcctcctggacactggcacgaccttctcagtgttaatcccctgtcttggacgactgtcctcaaggtccgttaccatccaaggaatcctgggacagcctgtaaccaggtatttctcccacctcctcagttgtaattgggagactttgctcttttcacatgcctttcttgttatgcctgaaagtcccacacccttattagggagggatatattagccaaagctggagctattatctccatgaagacagggaacaagttacccatttgttgtcccctacttgagggaatcaaccctgaagtctgggcattggaaggacaatttggaagggcaaaaaatgcccatccactccaaatcaggctaaaagaccccatcagttttccttatcaaaggcaatatcccttaaggcctgaagctcataaaggattacaggatattgttaaacatttaaaagctcaagactcagtaagaaaatgcagcagtccctgcaacaccccaattctaggagtacaaaaactgaacagtcagtggagactagtgcaagatcttagactcatcaatgaggcagtaattcctctatatccagttgtacgcaacccctatacccttctctctcaagtaccagaggaagcagaatggttcactgttctggacctcaaggatgccttcttctgtattcccctgcactctgactcccagtttctttttgcctttgaggatcccacagaccacacatcccaacttatgtggatggtcttgccccaaaggtttagagatagccctcatctgtttggtcaggcacaggcccaagatctaggccacttctcaagtccaggcactctggtccttcaatacagcgagatagccaagaccctctatactctaatcaaggagatggagagggcaaatactcacctagtagaatgggaaccagaggcagaaacagccttcgaaaccttaaagcaggccctagtacaagctccagctttaagccttcccacaggacaaaacttcgctttatatgtcatagagagagcagggatagctcttggagtccttactcagactcacaggacaaccccacaaccagtggcatacctaagtaaggaaattgatgtagtagcaaaaggctggcctcactgtttaaggacagttgtggcagtggctgtcttagtgtcagaggctatcaaaataatacaaggaaaggatttcactgtctggactactcatgatgtgaatggcatactaggtgccaaaggcggtttatggccatcagacaactgcctacttagataccaggcactactccttgaggaaccagtgcttcaaatacatatgtgcatagccatcaaccctgccacttttctcccagaagatggggaaccaatcaagcatgactgccagcaaattatagtccagacttatgccacccaagatgatctcttagaagtccccttagctaatcctgactttaacctatataacagtggaagttcatttgtagagaatgggatacaaagggcaggttatgccatagttagtgatgtaactgtacttggaagtaagcctctttccccagggactagcacccagttagcagaactagtggcacttacccgagccttagaactgggaaaaggaaaaagaataaatgtgtatacagatagcaagtatgcttatctaatcctacatgcccatgctgcaatatggaaagaaagggagttcctaacctctgggggcacccccattaaataccacaaggaaattatggagttattgcacacagtgcaaaaacccaaagaggtggcagtcttacactgccaaagccatcagaaggggagtgcaaggaggatcttctgtctcaccagaattcccgggaccagagtatgcaaaaacccccatgtctccctgagtggcatctctgagtggccactgagagaccacacacctctgtgcttcagacccaaggccctgctggcatgggttcatgaggagatctgctccatgggttgcaaagatccaggttggaacagtttgaaggtctcagaagaagataggaagatgcaggaaagtttggaaacttctagagacttgctgaatggttttgaccaaaatgttgataatgatatggacagtaaagtccaggctgagggagcctcagatggagatgaggaacttattgggaaatggcgtaaaggattgtcaatgctatggaagatactctctatagagaatatgatgaatgtctggaaggatggcaccataaaagatgccatcattgttatagaaaaagcagtgaaagccatcaagcctgaaacaataaattcctgccagagaaatctgtgtccagatgttgtacatgacttcacaaggtttacaacagagccaataaaggacataaaagagattggagatttggcaataaaattgggaatttttgagtcctctaatagcacccaattccttaatcagtttgtacctgatgatcggttatccccccataataaattactgaagttttacaaaccggaattttattcatcatacccccttgtttcctgccttgaccattatgtggatcaagttggagccagaatcagcatgagtttctgtgtgacaacagtgacagaggcctctggcagcggcagctggacatgtggtgtgagccagcttaagctgtcctatgccgactaa

SEQ ID NO: 124701 - DNA, 1298 bp, Homo sapiens
atgaaaacaggttataataccacaaaaagatgtaaagataacttcaggttcctgcagctagacaaaatacttgatgtcgtttctaaaggaggacaggcaaaggtgcaggttttcaagaaagcatcagtaagggccactaaatccgaccttcctcggtcctccctgtggtgtaggaggaaaactagtgtttctgctgctgcgtcagtgagcacaactattctgatcaacagggtccagggaccgttgtgggttcttgagcaagaagggtttctgctgctgcgtcgggaaaaatggccacctgagggaggtataaataacaatactatcctgcagcttgacctttgctgtaagagggaaggcaaacggagtgaaataccttatgtccaagctttcttttcattgaagaaggaaataagcaaagaaatctccaagagaccaaaaaaacccccgggctatcagttatgtcccccttcaaagctgtagggggaggggaatttggcccaacccaggtacatgtcccccttcctcactctctgatttaaagcagatccaaggcagacctggggaagttttccagatgatccctgatatgtaccatagatgtccctacaggggctagggcaaaccttcaatcctcacttggagaaatgtcatgctattgttagatcaaacccttgcctttaatgaaaagaatgtggctttagctgcagcccaagagtttgaagatacctggtatcttggtcaagtaaatgatagaatgacagccaaagaaagggacaaattccctactgaccagcaagccatccccagtatgcaatccccactgggacctagactcagatcacggggactggattcataaacatctgctgacctgtgttctagaaggactaaggagaattaggaaaaagcccatgaattactcaatgatgtccaccataactcagggaaaggaagaaaatccttctgccttcctcaagtggctacgggaggccttaagaaaatatactcccctgtcacccaactcactacggggtcaattgattctaaaagatacatttattacccaatcagctgcagatatcaggagaaagctccaaaagcaagccctgggccctgaacaaaatctggaggcattattaaaccaggcaacctcagtgttctataatagggaccaagaggaacaggcccaaaaggaaaagcaatcactggaaggcacactgccccagagtacgatggttctctgggccagaagctcccaaccagatgatccaacaacagaacttatggtgcccagg

SEQ ID NO: 124702 - DNA, 2165 bp, Homo sapiens
cttcactcctgagccagcgagaccacgaaccccaccagaaggaagaaactccgaacacatccgaacatcagaaggaaaaaactccggacacgccgcctttaagaactgtaacactcaccgtgagggtccacggcttcattcttgaagtcagctttgaccaagaacccaccaattccagacacattttggtgaccacaaagggaccactgattatcgccaagtggaggaaaactaatgtttctgctgctgtgctggtgagctcaactattctgatcagcagggtccagggactgttgcaggttcttgggcagggttgtttctgctgctgcatcggtgagcgcaactattccaatcagcagggtccagggaccattgcaggttcttgggcaggggttgtttctactgctgcatcaaatgcgactttagctgcagccccaaagtttggagatacttggtatcttagtcaagtaaatgatagaatgacagctgaagaaagggacaaattccctactggtcagcaagccatccccagtatggatctccactgggacctcaactcagatcatggggactggagtcgtaaacatctgttgtcctgtgttctagaaggactaagaagaattaggaaaaaagccatgaattactcaatgttgtccaccgtaactcagggaaaggaaaaaaatccttctgccttccttgaacagctatggggggccttaagaaaatatactcccctgtcacccaaatcactagagggtcaattgattctaaaagataagtttattacccaatcagccgcagatatcaggagaaagctccaaaagcaagccctgggccctgaacaaaatctggaggcattattaaacctggcaacctcggtgttctataatagggaccaagaggaacaggcccaaaaggaaaagcgagatcagagaaaggccgcagccttagtcatggccctcagacaaacaaacctttggtggttcagaaaggacagaaaatggagcaggccaatcacccggtagggcttgttatcagtgtggtttacaaagacattttaaaaaagattgtccaacgagaaacaagccaccccctcatccatgtccgctatgccgaggcaatcactggaaggcgcactgccccggaggacaaaggttctctggggagggatatgttagccaaagctggagctattatctacatgaatatggggaacaagttacccatttggtgtcacctacttgaggaaggaatctaccttgaagtctgggcattggaaggacaatttggaagggcaaaaaatgcctgcccagtccaaatcaggttaaaagatcccaccacatttccttatcaaaggcaatatcccttaaggcctgaagctcataaaggattacaggatattgttaaacatgtaaaagctcaaggcttagtaaagaaatgcagcagtccctgcaacaccccaattctaggagtacaaaaaccgaacggtcagtggagtctagtgcaagatcttagactcatcagtgaggcagtaattcctctatatccagttgtacccaacccctataccctgctctctcaaataccagaggaagcagaatggttccctgttctggacctcaaggatgccttcttctgtattcccctgcactatgactcccatgactcccagtttctctttgcctttgaggatcccacagaccacacatcccaacttatatggaccgtcttgccccaagggtttagggatagccctcatctgtttggtcaggcactggcccaagatctaggccacttctcaagtccaggcactctggtccttcagtatgtggatgatttacttttggctaccagttcggaagcctcatgccagcaggctactctagatctcttgaattttctagctaatcaagggtacaaggcatctaggtcaaaggcccagctttgcctacagcaggtcaaatatctaggcctaatcttagccagagggaccaggacccttggcaaggaacgaatacagcctatactggcttatcctcaccctaagactttaaaacagttgtgggggttccttgaaatcactggcttttgctgactatggatcccaggatacagcaagatagccaggcccctctatactctaatcaaggagacccagagagcaa

SEQ ID NO: 124703 - DNA, 403 bp, Homo sapiens
tgaagggtctggcagtgaaaaatcctctgcagcttcagaagaggaggaagaaaaggaaagtgaagaagccatcctagcagatgatgatgaaccatgcaaaaaatgtggccttccaaaccatcctgagctaattcttctgtgtgactcttgcgatagtggataccatactgcctgccttcgccctcctctgatgatcatcccagatggagaatggttctgcccaccttgccaacataaactgctctgtgaaaaattagaggaacagttgcaggatttggatgttgccttaaagaagaaagagcgtgccgaacgaaggagccagacttttctgaagatcaagaagaaaagaaaaaagattcaaaaaaatccaaagcaaacttgcttgaaaggaggtcaacaagag

SEQ ID NO: 124704 - DNA, 1038 bp, Homo sapiens
gtaaaacccaaaggcaaagttcgatggactggttctcggacacgtggcagatggaaatattccagcaatgatgaaagtgaagggtctggcagtgaaaaatcatctgcagcttcagaagaggaggaagaaaaggaaattgcttcaaagagaataaaatatctaggaatccaacttacaagggacctgaaggacctcttcaaggagaactacaaaccactgctcaatgaaataaaagaggatacaaacaaatggatggatgaacattccatgctcatgggtaggaagaatcaatatcgtgaaaatggccatactacccaagaattggaaaaaactactttaaagttcatatggaaccaaaaaagagcccgccttgccaagtcaatcctaagccaaaagaacaaagctggaggcatcacacatatctacaactatctgatctttgacaaacctgacaaaaacaagaaatggggaaaggattccctatttaataaacagtgctgggaaaactggctagccatatgtagaaagctgaaactggatcccttccttacaccttatacaaaaattaattcaagatggattaaagacttaaatgttaggcctaaaaccataaaaaccctagaagaaaacctaggcaataccattcaggacataggcatggtcaaggacttcatgtctaaaacagcaaaagcaatggcaacaaaagccaaaattgacaaattgcatctaattaaactaaagagcttctgcacagcaaaagaaactaccatcagagtgaacaggcaacctgcagaatgggagaaaatttttgcaatctactcatctgacaaaggcctaatatccagaatctacaatgaactcaaacaaatttacaagaaaaaacaaccccatcaaaaagtgggtgaaagatataaacagatacttctcaaaaggagacatttatgcagccaaaagacacatgaaaaaatgctcatcatcactggccatcagagaaatgcaaatgaaaaccacaatgagataccatctcacaccagttag

SEQ ID NO: 124705 - DNA, 1131 bp, Homo sapiens
atgtgcgaactcgatattttacacgactctctttaccaattctgccccgaattacacttaaaacgactcaacagcttaacgttggcttgccacgcattacttgactgtaaaactctcactcttaccgaacttggccgtaacctgccaaccaaagcgagaacaaaacataacatcaaacgaatcgaccgattgttagcgtcggcaaaggagccatgggttctagcaactaacttacctgttgaaattcgaacacccaaacaacttgttaatatctattcgaagcgaatgcagattgaagaaaccttccgagacttgaaaagtcctgcctacggactaggcctacgccatagccgaacgagcagctcagagcgttttgatatcatgctgctaatcgccctgatgcttcaactaacatgttggcttgcgggcgttcatgctcagaaacaaggttgggacaagcacttccaggctaacacagtcagaaatcgaaacatcgggctggtggtcatcctggcttccacggtggtggccatgtcggccgtggcccagctgtgggaggacgagtgggaggtgctgctgatctccctgcagggcacagcgccattcctgcatgtgggggctgtggcagcagtcaccatgctctcctggatcgtggcaggacagttcgcccgcgcagagcggacctcctcccaggtgaccattctctgtaccttcttcaccgtggtgtttgccctctacctggcccctctcaccatctcctctccctgcatcatggagaagaaagacctcggccccaagcctgctctcattggccaccgcggggcccccatgagcaggcgtttgcgaagaaagaccccaaagaaaaaatattccgatgatgatgaagaggaggaatctgaggagaatagtagagactctgaaagtgacttcagtgatgattttagtgatgattttgtagaaactcggcgaaggcggtcaaggagaaatcagaaaagacaaattaactacaaagaagactcagaaagtgacggttcccagaagagtttgcgacgtggtaaagaaataaggcgagtacacaagcgaagactttccagctcagagagtgaaggttatttcttcatcaagagctag

SEQ ID NO: 124706 - DNA, 4582 bp, Homo sapiens
atgaaaagtgaggagcagcctatggatttagaaaaccgttctacagccaatgttctagaagagactactgtgaaaaaagaaaaagaagatgaaaaggaacttgtgaaactgccagtcatagtgaagctagaaaaacctttgccagaaaatgaagaaaaaaagattatcaaagaagaaagtgattccttcaaggaaaatgtcaaacccattaaagttgaggtgaaggaatgtagagcagatcctaaagataccaaaagtagcatggagaagccagtggcacaggagcctgaaaggatcgaatttggtggcaatattaaatcttctcacgaaattactgagaaatctactgaagaaactgagaaacttaaaaatgaccagcaggccaagataccactaaaaaaacgagaaattaaactgagtgatgattttgacagtccagtcaagggacctttgtgtaaatcagttactccaacaaaagagtttttgaaagatgaaataaaacaagaggaagagacttgtaaaaggatctctacaatcactgctttgggtcatgaagggaaacagctggtaaatggagaagttagtgatgaaagggtagctccaaattttaagacagaaccaatagagacaaagttttatgagacaaaggaagagagctatagcccctctaaggacagaaatatcatcacggagggaaatggaacagagtccttaaattctgtcataacaagtatgaaaacaggtgagcttgagaaagaaacagcccctttgaggaaagatgcagatagttcaatatcagtcttagagatccatagtcaaaaagcacaaatagaggaacccgatcctccagaaatggaaacttctcttgattcttctgagatggcaaaagatctctcttcaaaaactgctttatcttccaccgagtcgtgtaccatgaaaggtgaagagaagtctcccaaaactaagaaggataagcgcccaccaatcctagaatgtcttgaaaagttagagaagtccaaaaagacttttcttgataaggacgcacaaagattgagtccaataccagaagaagttccaaagagtactctagagtcagaaaagcctggctctcctgaggcagctgaaacttctccaccatctaatatcattgaccactgtgagaaactagcctcagaaaaagaagtggtagaatgccagagtacaagtactgttggtggccagtctgtgaaaaaagtagacctagaaaccctaaaagaggattctgagttcacaaaggtagaaatggataatctggacaatgccccagacctctggcatagaggagccttctgagacaaagggttctatgcaaaaaagcaaattcaaatataagttggttcctgaagaagaaaccactgcctcagaaaatacagagataacctctgaaaggcagaaagagggcatcaaattaacaatcaggatatcaagtcggaaaaagaagcccgattctccccccaaagttctagaaccagaaaacaagcaagagaagacagaaaaggaagaggagaaaacaaatgtgggtcgtactttaagaagatctccaagaatatctagacccactgcaaaagtggctgagatcagagatcagaaagctgataaaaaaagaggggaaggagaagatgaggtggaagaagagtcaacagctttgcaaaaaactgacaaaaaggaaattttgaaaaaatcagagaaagatacaaattctaaagtaagcaaggtgaaaacccaaaggcaaagttcgatggactggttctcggacacgtggcagatggaaatattcccagcaatgatgaaagtgaagggtctggcagtgaaaaatccatctgcagcttcagaagaggaggaagaaaaggaaagtgaagaagccatccctagcagatgatgatgaacccatgcaaaaaatgtggcctttccaaacccatcctgagcttaatttcttctgtgtgactcttgccgatagtggatacccatactgccttgctttcgcccctcctctgatgatcatccccagatggaagaatggttcttgcccactttgccaacataaactgctcctgtgaaaaatttacaggaacagacgcaggatttgggatgttgccttaaagaaggaaagagcgttgccggaacgaaggaaaagaacgcttggtgtatgttggtatccagtattgaaaacatcattcctccacaagagccaaacttttttcgaccatccgacacgacacgtattgaagcattgcggacgatgccccccttacttgtttgaacggaggacagcacccaacaaggaattgtataacctacagatttgatgattttgatgaaccaattgatgaagctattgaagatgacactcaaagaatccgatggaggaggagttggccgacgaaaagatatctccaccatcacaggccatcgtgggaaagacatctctactattttggatgaagaaagaaaagaaaataaacgaccccagagggcagctgctgctcgaaggaagaaacgccggcgattaaatgatctggacagtgatagcaacctggatgaagaacagagcgaggatgaattcaagatcagtgatggatctcaagatgagtttgctgtgtctgatgaaaacccagatgaaagtgaagaagatccgccatctaatgatgacagtgacactgacttttggagccgtaaactgaggcgacacccctctcggccaatgaggcagagcaggcgtttgcgaagaaagaccccaaagaaaaaatattccgatgatgatgaagaggaggaatctgaggagaatagtagagactctgaaagtgacttcagtgatgattttagtgatgattttgtagaaactcggcgaaggcggtcaaggagaaatcagaaaagacaaattaactacaaagaagactcagaaagtgacggttcccagaaagagttttgcgacgtggtaaagaaataaggcgagtacacaagcgaagactttccagctcagagagtgaagagagctatttgtccaagaactctgaagatgatgagctagctaaagaatcaaagcggtcagttcgaaagcggggccgaagcacagacgagtattcagaagcagatgaggaggaggaggaagaggaaggcaaaccatcccgcaaacggctacaccggatttgagacggatgagggaggagagtttttgacattgctcattggagatgcaaatcagcctgcccgtgacagccagcctagggtcctgccctcagaacaagagagcaccaagaagccctaccggatagaaagtgatgtggaagaggactttgaaaatgtaggcaaagtggggagcccattggactatagcttagtggacttaccttcaaccaatggacagagccctggcaaagccatttgagaacttgattggcaagcctacttgagaagtctcagacccccaaggacaaccagcacagccagtgcaagccttagcctccaaatgggacaagttggtggggcaggaagcaggagcaccagaagaggaggaagatgagcttttgagagtgactgacctttgttgattatgtctgtaacagtgaacagttataagactttttttccatttttgtgctaatttattccacggtagctctcacaccagcgggccagttattaaaagctgtttaatttttcctagaaaactccactacagaatgacttttagaagaaaaatttcaacaaatcctgaagtctttctgtgaagtgaccagttctgaactttgaagattaaataaattgctgtaaattccttttgattttctttttccaggttcatggtccttggtaatttcattcatggaaaaaaatcttattataataacaacaaagatttgtatatttttgactttatatttcctgagctctcctgacttttgtgaaaaagggtggatgaaaatgcattcccgaatctgtgagggccccaaaacagaatttaggggtgggtgcaaagcacttgtgctttagctttttcaaatttaaatatatattatatttaaacattccatggcatagatgatgatttacagacaatttaaaagttcaagtctgtactgttacagtttgagaattgtagataacatcatacataagtcatttagtaacagcctttgtgaaatgaacttgtttactattggagataaccacacttaataaagaagagacagtgaaagtaccatcataattaacctaaatttttgttatagcagagtttcttgtttaaaaaaaaataaaatcatctgaaaagcatttgtacagtaaaatgtataatgaagctttgccaaccagactgtgctagcaacaaatttttttaaataagctttatgcagtggtaataaggtggcctcaaatatattgtgtctgatggagagttattagtgaaatgaatgtggtctttcttaaggcctggatggactgtgtagcaattccttgatgtccagtttggaaagatgtactcttctcaacaagaaaaacttaaatccgtcgtgcccaaatatagttgtgcttttatttccaaaaa

SEQ ID NO: 124707 - DNA, 462 bp, Homo sapiens
gaaagaaaagaaaagaaacaagaagaaaaaaaccattggttcaccaaaaaggattcagagtcctttgaataacaagctgcttaacagtcctgcaaaaactctgccaggggctgtggagtccccagaagttaattgatgggtttctaaaacatgaaggacctcctgcagagaaacccctggaagaactctctgcttctacttcaggtgtgccaggcctttctagtttgcagtctgacccagctggctgtgtgagacctccaagttgtgaaatactgtactgatctaatagaagaaaaagatttggaaaaactggatctagttataaaatacatgaaaaggctgatgcagcaatcggtggaatcggtttggaatatggcatttgactttattcttgacaatgtccaggtggttttacaacaaacttatggaagcacattaaaagttacataaatattaccagag

SEQ ID NO: 124708 - DNA, 435 bp, Homo sapiens
gactctgcttgctggacagcacagacttgctctacttgttcccggagatcaggtggaagtgcttctaaaacagactgatccagctataaaatgccaaacatatgagtaggaagttaaagcatgctcggagatgaggtgtttgggagttaacacgccactttaaatttcaatttgaatactgtggataatcaatgtaaggtacagaccatcaagctaggaaagccacctccaaatcagcacatttttggaacgtcttggccttttgtcattgaagcctgaagtactatgtgtagtctggaaagaagtgtatatatactaccagccactatcacatgaccaggtaagtccaaatatactcacagaatgtcctgcaattggggccaacagatatgaatagccttggtgaagctcaaattagatcccaccccagggagg

SEQ ID NO: 124709 - DNA, 638 bp, Homo sapiens
  misc_feature (1)...(638): n = a,t,c or g
cagggtgtgcccaggccctttctagtttgcagtcttgaccccagctggctgtgtgagaccctccagcacccaatctagctggagctgttgaattcaatgatgtgaagaccttgctcagagaatggataactacaatttcaggttggcttggcctgtgttnagatggnccaaggctgagatgtagtcgtctcatgatttgagaacataaacagactaaactatgcagatttaacccatttctctaactctgataagcttaaagcagctacccccaaatcttttaaattctgggacttgctttgaaaagtaacaaagcccattcctttgatagctgttagtgacatagttgtagaaatgcagttttcctttatccatgcagatctctgactttctccttcaaaaagactggtcctcatttgaagtttttcccccttcctagatccaatggaagaagacattctccaagttgtgaaatactgtactgatctaatagaagaaaaagatttggaaaaactggatctagttataaaatacatgaaaaggctgatgcagcaatcggtggaatcggtttggaatatggcatttgactttattcttgacaatgtccaggtggttttacaacaaacttatggaagcac

SEQ ID NO: 124710 - DNA, 4095 bp, Homo sapiens
atgaggcgaggtggatggaggaagcgagctgaaaatgatggctgggaaacatggggtgggtatatggctgccaaggtccagaaattggaggaacagtttcgatcagatgctgctatgcagaaggatgggacttcatctacaatttttagtggagttgccatctatgttaatggatacacagatccttccgctgaggaattgagaaaactaatgatgttgcatggaggtcaataccatgtatattattccagatctaaaacaacacatattattgccacaaatcttcccaatgccaaaattaaagaattaaagggggaaaaagtaattcgaccagaatggattgtggaaagcatcaaagctggacgactcctctcctacattccatatcagctgtacaccaagcagtccagtgtgcagaaaggtctcagctttaatcctgtatgcagacctgaggatcctctgccaggtccaagcaatatagccaaacagctcaacaacagggtaaatcacatcgttaagaagattgaaacggaaaatgaagtcaaagtcaatggcatgaacagttggaatgaagaagatgaaaataatgattttagttttgtggatctggagcagacctctccgggaaggaaacagaatggaattccgcatcccagagggagcactgccatttttaatggacacactcctagctctaatggtgccttaaagacacaggattgcttggtgcccatggtcaacagtgttgccagcaggctttctccagccttttcccaggaggaggataaggctgagaagagcagcactgatttcagagactgcactctgcagcagttgcagcaaagcaccagaaacacagatgctttgcggaatccacacagaactaattctttctcattatcacctttgcacagtaacactaaaatcaatggtgctcaccactccactgttcaggggccttcaagcacaaaaagcacttcttcagtatctacgtttagcaaggcagcaccttcagtgccatccaaaccttcagactgcaattttatttcaaacttctattctcattcaagactgcatcacatatcaatgtggaagtgtgaattgactgagtttgtcaataccctacaaagacaaagtaatggtatctttccaggaagggaaaagttaaaaaaaatgaaaacaggcaggtctgcacttgttgtaactgacacaggagatatgtcagtattgaattctcccagacatcagagctgtataatgcatgttgatatggattgcttctttgtatcagtgggtatacgaaatagaccagatctcaaaggaaaaccagtggctgttacaagtaacagaggcacaggaagggcacctttacgtcctggcgctaacccccagctggagtggcagtattaccagaataaaatcctgaaaggcaaagcagcagatataccagattcatcattgtgggagaatccagattctgcgcaagcaaatggaattgattctgttttgtcaagggctgaaattgcatcttgtagttatgaggccaggcaacttggcattaagaacggaatgttttttgggcatgctaaacaactatgtcctaatcttcaagctgttccatacgattttcatgcatataaggaagtcgcacaaacattgtatgaaacattggcaagcctacactcataacattgaagctgtcagttgtgatgaagcgctggtagacattaccgaaatccttgcagagaccaaacttactcctgatgaatttgcaaatgctgttcgtatggaaatcaaagaccagacgaaatgtgctgcctctgttggaattggttctaatattctcctggctagaatggcaactagaaaagcaaaaccagatgggcagtaccacctaaaaccagaagaagtagatgattttatcagaggccagctagtgaccaatctaccaggagttggacattcaatggaatctaagttggcatctttgggaattaaaacttgtggagacttgcagtatatgaccatggcaaaactccaaaaagaatttggtcccaaaacaggtcagatgctttataggttctgccgtggcttggatgatagaccagttcgaactgaaaaggaaagaaaatctgtttcagctgagatcaactatgggaataaggtttactcagccaaaagaggcagaagcttttcttctgagtctttcagaagaaattcaaagaagactagaagccactggcatgaagggtaaacgtctaactctcaaaatcatggtacgaaagcctggggctcctgtagaaactgcaaaatttggaggccatggaatttgtgataacattgccaggactgtaactcttgaccaggcaacagataatgcaaaaataattggaaaggcgatgctaaacatgtttcatacaatgaaactaaatatatcagatatgagaggggttgggattcacgtgaatcagttggttccaactaatctgaacccttccacatgtcccagtcgcccatcagttcagtcaagccactttcctagtgggtcatactctgtccgtgatgtcttccaagttcagaaagcttaagaaatccaccgaagaggagcacaaagaagtatttcgggctgctgtggatctggaaatatcatctgcttctagaacttgcactttcttgccaccttttcctgcacatctgccgaccagtcctgatactaacaaggctgagtcttcagggaaatggaatggtctacatactcctgtcagtgtgcagttcgagacttaacctgagtatagaggtcccgtcaccttcccagctggatcagtctgttttagaagcacttccacctgatctccgggaacaagtagagcaagtctgtgctgtccagcaagcagagtcacatggcgacaaaaaagaaagaaccagtaaatggctgtaatacaggaattttgccacaaccagttgggacgagtcgttgttgcaaataccgagaacctcaagaatcgaacagtgacgcaggaataaatttaatagcccttccagcattttcgacaggtggaccctgaggtatttgctgccctttcttgctgaacttcagagggagctgaaagcagcgtatgatcaaagacaaaggcagggcgagaacagcactcaccagcagtcgagccagcgcatctgtgccaaagaatcctttaatatcatctaaaggcagcgagtgaaagaaaagaaaagaaacaagaagaaaaaaaccattggttcaccaaaaaggattcagagtcctttgaataacaagctgcttaacagtcctgcaaaaactctgccaggggcctgtggcagtccccagaagttaattgatgggtttctaaaacatgaaggacctcctgcagagaaacccctgggaagaactcttctggcttcttactttcaggtgtgccagggcctttctagtttgcagtctgaccccagctgggctgtgtgagacctccaccaccccaatctaggctggagctgttgaattcaatgatgtgaagaccttgctcagaggaatgggtaactacaatttcagatccaatggaagaagacattctccaacgttgtgaaatactgtactgatctaatagaagacaaagatttggaaaaactggatctagttataaaatacatgaaaaggctgatgcagcaatcggtggaatcggtttggaatatggcatttgactttattcttgacaatgtccaggtggttttacaacaaacttatggaagccacattaaaagttacataaatattacccagagagcctgatgcctctctgatagctgtgcccataagtgcttgtgaggtatttgcaaagtgccatgatagtaatgcctcggagtttttataattttaaatttcttttaaagcaagtgttttgtacatttcttttcaaaaagtgccaaatttgtcagtattgcatgtaaataattgtgttaattattttactgtagcatagattctatttacaaaatgtttgtttataaagttttatggatttttacagtgaagtgtttacagttgtttaataaagaactgtatgtatattttgtacaggctcc

SEQ ID NO: 124711 - DNA, 891 bp, Homo sapiens
atgatgaatgaaaagaacttggagaaaggactgggcgtggacagtgtggacaaggatgccatgaacgcggccatccagcaggccatcaaggcccagccgtccatgtctcccaagaaggcgcccccagcgcctgcaaaggaggccaggaatgtcgtggccgtgggtactggtggccgtgggacccacgaccgagacccgagtgagaaaccaccccggctccagtggtttgaacagcaggcgaagaagttggcaaagcagcaggaggaggacagcgaggaggaggaagaggacctggatggagacgttctggaaattgggaagtccaaaatcaaggtgctggcagagtcagtgtctgattgggaagatattgattctgatgaagaattggaatgtgaggatactgaagcaatggacgatgtggtggagcaggatgcagaggaggaagaggctgaggaaggcccaccccttggtgccatccctatcacggactgcttattttgttcccatcattccagctcgctgatgaagaatgtggctcacatgaccaaagaccacagtttctttattcctgatatagaatatctttcagatattaagggactgattaaatacttgggaactcattcatcatcgtcaaatgtctgtaaaggtctatgggacctggagaaaaggccgtccattgacctaaagttagaacataatatagcactaaaaggcatttacacgtactttatctgcttcttctcactttattctttgccagtggttcagcgtgctgagtcagtccacgcgtccacggaccaggagatccaggagatgcatgatgatcagtcaaacccacagaatgctgtggtacgggagcactgtgtgggatggggttggggcgtctag

SEQ ID NO: 124712 - DNA, 1548 bp, Homo sapiens
atggcgacgtacacctgcataacttgccgggtggcgttccgcgacgcggacatgcagcgggcccactataagacggactggcaccgctacaacctgcggcggaaggtggccagcatggccccagtgaccgccgagggcttccaggagcgagtgcgggcgcagcgggccgtcgcggaggaggagagcaagggctcggccacctactgcaccgtttgcagtaagaagtttgcctctttcaacgcctacgagaaccacctcaagtcccggcgtcacgttgagctggagaagaaggccgtgcaggcagtgaatcggaaagtggagatgatgaatgaaaagaacttggagaaaggactgggcgtggacagtgtggacaaggatgccatgaacgcggccatccagcaggccatcaaggcccagccgtccatgtctcccaagaaggcgcccccagcgcctgcaaaggaggccaggaatgtcgtggccgtgggtactggtggccgtgggacccacgaccgagacccgagtgagaaaccaccccggctccagtggtttgaacagcaggcgaagaagttggcaaagcagcaggaggaggacagcgaggaggaggaagaggacctggatggagacgttctggaaattgggaagtccaaaatcaaggtgctggcagagtcagtgtctgattgggaagatattgattctgatgaagaattggaatgtgaggatactgaagcaatggacgatgtggtggagcaggatgcagaggaggaagaggctgaggaaggcccaccccttggtgccatccctatcacggactgcttattttgttcccatcattccagctcgctgatgaagaatgtggctcacatgaccaaagaccacagtttctttattcctgatatagaatatctttcagatattaagggactgattaaatacttgggagagaaagttggtgttggcaagatttgcttgtggtgcaacgagaaagggaagtccttctactccacagaagctgtacaggcacatatgaatgacaaaagccactgtaagctcttcacagatggcgatgctgctttggaatttgcagacttctatgattttagctggagacttgcagttggtggacatgactgggtggagaggctgactgcttctcactacttctatggctactacccaggtgccagagtgggtcatcgctccttgatgagatactacaaacagcgatttggcttgtcaagagctgtggcagttgccaaaaatcggaaggccgtgggccgagtacttcagcagtacagagccctgggatggactggcagcacaggagcggctcttatgcgagagcgagacatgcagtatgtccaaaggatgaaatcaaaatggatgctgaagacaggaatgaagaacaatgccaccaagcagatgcactttcgggtccaagggtcccaaaaagaaattcagatattccacagttctgagattgatggcattgccacagctgtagaagatgattttgcttctccaactccaaccaaggatgcaaagaactag

SEQ ID NO: 124713 - DNA, 944 bp, Homo sapiens
attgggaagatattgattctgatgaagaattggaatgtgaggatactgaagcatatggacgatgttggtggaccaaggatccagaggaggaagagcctgaggaaggccccaccccttgctcgctgatgaagaatgtggctcacatgaccaaagaccacagtttctttattcctgatatagaatatctttcagatattaagggactgattaaatacttgggagagaaagttggtgttggcaagatttgcttgtggtgcaacgagaaagggaagtccttctactccacagaagctgtacaggcacatatgaatgacaaaagccactttgagaaactcagtttaacagagtttaacacatccttggtggaaaagaagaaccttagacccagactgaagtatgacttgtctctgtttttgttctgggttaaacatcaagagttcagttttgccagtatacccctgaacagagctggagacttgcagttggtggacatgactgggtggaggagtagctatccagatcacaaggaaggggaggaccccaataaggctgaggagttgccctcagaaaagaacttggaatatgatgatgaaaccatggaattgattctgccttctggtgccagagtgggtcatcgctccttgatgagatactacaaacagcgatttggcttgtcaagagctgtggcagttgccaaaaatcggaaggccgtgggccgagtacttcagcagtacagagccctgggatggactggcagcacaggagcggctcttatgcgagagcgagacatgcagtatgtccaaaggatgaaatcaaaatggatgctgaagacaggaatgaagaacaatgccaccaagcagatgcactttcgggtccaactgactcaaggtgaagacaacaaggatgaagcccttcaggatgatccacttctacttaatgaatag

SEQ ID NO: 124714 - DNA, 2430 bp, Homo sapiens
atggcgacgtacacctgcataacttgccgggtggcgttccgcgacgcggacatgcagcgggcccactataagacggactggcaccgctacaacctgcggcggaaggtggccagcatggccccagtgaccgccgagggcttccaggagcgagtgcgggcgcagcgggccgtcgcggaggaggagagcaagggctcggccacctactgcaccgtttgcagtaagaagtttgcctctttcaacgcctacgagaaccacctcaagtcccggcgtcacgttgagctggagaagaaggccgtgcaggcagtgaatcggaaagtggagatgatgaatgaaaagaacttggagaaaggactgggcgtggacagtgtggacaaggatgccatgaacgcggccatccagcaggccatcaaggcccagccgtccatgtctcccaagaaggcgcccccagcgcctgcaaaggaggccaggaatgtcgtggccgtgggtactggtggccgtgggacccacgaccgagacccgagtgagaaaccaccccggctccagtggtttgaacagcaggcgaagaagttggcaaagcagcaggaggaggacagcgaggaggaggaagaggacctggatggagacgattgggaagatattgattctgatgaagaattggaatgtgaggatactgaagcaatggacgatgtggtggagcaggatgcagaggaggaagaggctgaggaaggcccaccccttggtgccatccctatcacggactgcttattttgttcccatcattccagctcgctgatgaagaatgtggctcacatgaccaaagaccacagtttctttattcctgatatagaatatctttcagatattaagggactgattaaatacttgggagagaaagttggtgttggcaagatttgcttgtggtgcaacgagaaagggaagtccttctactccacagaagctgtacaggcacatatgaatgacaaaagccactgtaagctcttcacagatggcgatgctgctttggaatttgcagacttctatgattttagctggagacttgcagttggtggacatgactgggtggaggtagaggggaggattagaggctgtggcagtagagaagacaatgaatgtctgctggtgtgcaatttctctgttataggagtagctatccagatcacaaggaaggggaggaccccaataagggctgaggagttgccctcagaaaagaacttggaatatgatgatgaaaccatggaattgattctgccttctggtgccagagtgggtcatcgctccttgatgagatactacaaacagcgatttggcttgtcaagagctgtggcagttgccaaaaatcggaaggccgtgggccgagtacttcagcagtacagagccctgggatggactggcagcacaggagcggctcttatgcgagagcgagacatgcagtatgtccaaaggatgaaatcaaaatggatgctgaagacaggaatgaagaacaatgccaccaagcagatgcactttcgggtccaaatggactgtcgaggtatcgcagtgcttgtgttcaaggcaccctcattttacctaataatggccccaaagcacaagagtggtgatgctggtgattcaaatatgccaaagggaagccgtaaagtgcttcctttaagtgaaaaggtaaaagttcttaaggaaaaaaaattatatgctgaggttgctaagatccatggagtgaagctgcagaccttcggggtgagtgttacagctcacaaaggcagtgtggacccaaagagtgagcagcagcaagatttattgcaaagagttaaagaacaaagcttccacagtgtagaagcggacccagcagctgagggagccggctccggcctcagccagctcaggaaggggctcccacagtgcagcagccggctgaacggctcctcaagtgccaccaaagtgggagcccaggcagaggaggcgccgagagcaagcgagggctgtgagggctgccagcacgctgtcacctctcaatatgttaaattggcttatgcaagtgtggggctggcaagtctaacaactgcagggcaggtcaggaggctggagacccagggaagagttgatgctgcagtctctagtctgaaggcagtgcagaggcagaattccctctttctcggaggatctcaggctttttctcctaagtccttcaaccaagtggatgaggccacccgcattagagaagttataaaaccgtgtgcagaggaccgggtcatattttccaacagcgaaagtccatcagcagctacggtgttaaatgcagagcgaaggacccataaactggcagccgtgtgtgaagcaattagatgtggcactgcccccgcagccacgttccagcagccgcctctgttggagctttcaaggctcagcaactcttag

SEQ ID NO: 124715 - DNA, 885 bp, Homo sapiens
atggcaccaaggggtgggccttccctatcacggactgcttattttgttcccatcattccagctcgctgatgaagaatgtggctcacatgaccaaagaccacagtttctttattcctgatatagaatatctttcagatattaagggactgattaaatacttgggagagaaagttggtgttggcaagatttgcttgtggtgcaacgagaaagggaagtccttctactccacagaagctgtacaggcacatatgaatgacaaaagccactgtaagcttcttcacagatggcgatgctgctttggaatttgcagacttctatgattttaggagtagctatccagatcacaaggaaggggaggaccccaataaggctgaggagttgccctcagaaaagaacttggaatatgatgatgaaaccatggaattgattctgccttctggtgccagagtgggtcatccgctccttgatgagatactacaaacaagcgatttggcttgtcaagaacctgtggcagttgccaaaaatccggaaggccgtgggccgagtacttcagcagtacagaagccctgggatcggactcggcagcacaggagcggctcttatgcgagagcgagacatgcagtatgtccaaaggatgaaatcaaaaatgggatgctgaagacacggaatgaacgaacaatgccaccaacgcagatgcactttcgggtccaagtgagattctgagagtctgcttgggattgagcaatccatctcctgcccaagtttcctcctttgccctggagggaccagtgaaaagacagattcataggagagacccttttgctgctacttcattcgttctgacctaataataaaagttagaaccataaaaaaaaaaaaaaaaaa

SEQ ID NO: 124716 - DNA, 378 bp, Homo sapiens
atgaatcccttagctaactcaactctcacagatgtccatccccactttatttttaagcaaatggcagaactagacagggatatggatgaagctggaaaccatcattctcagcaaactaacacaagaacagaaaaccaaacaccacatgttctcactcataagtgggagttgaacaatgagaacacacggacacagggcagggaacatcacacatcagaggaattcatcgcaattcaacctgaatattatcagaaagaaaaatctaattctgacattaatttagaaggcacaagctactggactgaaaatcattgcagtggaatttataaagtgataaactgtcttgaaagtgaaatacatagtgaagaaaatcaagag

SEQ ID NO: 124717 - DNA, 2933 bp, Homo sapiens
atgcatgaagctggaaaccatcattgccagcaaagtaacacaagaaaagaaaaccaaacaccagatgttctcactcataagtgggagggctttgaccagcttcgacttgaaggattgctttgtgatgtgaccctgatgccaggtgacacagatgatgctttccctgtgcatagagtcatgatggcatctgctagtgattacttcaaggctatgttcacaggtggaatgaaagaacaagatttaatgtgcattaaacttcatggtgtgagcaaagtcggtctaaggaaaattattgatttcatttatactgcaaagctttctcttaatatggacaaccttcaagacacgctggaagctgccagtttcctacagattctgccagttttggacttctgtaaagtgtttctcatatctggggtcactttagacaactgtgttgaagttggacggattgccaacacctacaatctaaccgaagtggataaatacgttaacagtttcgtcttgaagaattttcctgcattgctgagcacaggggagttcttgaaactcccttttgagcgtcttgccttcgtgctttccagtaatagccttaagcactgtactgaacttgagctctttaaggctacctgtcgttggcttcgcctggaagagcctcggatggactttgctgcaaaattaatgaagaacatacgatttccactgatgacaccacaggagctcattaattacgtgcaaacggtggatttcatgagaactgacaatacttgtgtgaatttgcttttggaagccagcaattaccaaatgatgccatatatgcagccagttatgcagtcagacaggactgccattaggtctgacaccactcacttggttacactaggaggagtgctgaggcagcagctggttgtcagtaaggaattgcgcatgtatgatgaaaaggcccatgagtggaaatcgttagcccccatggatgccccaaggtaccagcatggcatcgccgtcattggaaattttctctatgtggttggcggacagagtaattatgatacaaaaggaaaaacggcagttgatacagtcttcagatttgatcctcgatacaataaatggatgcaagttgcatctttaaatgaaaagcgcaccttcttccacctaagtgccctcaaaggatatctgtatgcagttggtgggcgaaatgcagcaggtgaactgcccacagtagaatgttacaatccaagaacaaatgaatggacctatgttgccaaaatgagtgagccccactatggccatgctggaactgtgtatggaggagtgatgtatatttcaggaggaattactcatgatactttccaaaaggagctcatgtgctttgaccctgatactgacaaatggatccagaaggcgccaatgaccactgtcagaggtctgcattgcatgtgtacagtgggagaaaggctctatgtcattggtggcaatcacttcagaggaacaagtgattatgatgatgtcctaagctgtgaatactattcacctattccttgaccagtggaccccaattgctgccatgttaagaaggcagagtgatgttggggtcgctgtcttcgaaaataaaatctatgtggttggggggtattcttggaataatcgttgtatggtagagatagtgcagaaatatgatccagataaagatgaatggcataaggtttttgatctgccagaatcccttggtggcattcgtgcttgcacactcacagtttttccaccagaagaaaccacaccatcaccttctagagagtcccctctttctgcaccttaagatcatctctacaactaagatgctgtagttctatctttgcaatgtgtcataaattctcttctttttcccccttaagtagtatatatgttaggattaccctctggtaattgatacagatattggaaaaaagacaacattgatggttatttgtgctctttgtttggcctagaatgtttataaagtggtaacacaaccattctggaaatgtatcccatagaagctgatgtttaacatatgaaaaaaaaagtattgtctataaaatgtttcttcagtactttttaaatgctgtgtattgggtgtaaggtatttgtcatcttacattagtaaacccaataagccaagttgaaggtggattatagtaaatgtacaactgtgctcactaggcttcaagtaaaaagttttcctttcatctttgactgtaagatgtcaaagggaggcagcctgcttgaacaggaaccaatacacaaaaggttgccaattcgcatgagcttacctccctcttttcataaagtatttttgacatatctgtcaacccacttgactgtgtgggtgcattgagaacacaaagtttcctagacacacaggagaagtagctttaaattcacttaatattaatttaaaaagcagcatgaaccctctacttataaacaagggtttggtgtttttaaagtgtgtatacatacatacacatacacacatgcacatatgtcaaatataatttttttaaaaattgagtggcacatcaaagaaatgtgaaattaaaagggaattcttccaaaaagcagcttccattaaaatgggaattcagtatgcacatactgaatgcatatatgtagaaccatacagaatttaggtggataagggctagaaattttgagcaacaaaatttgtcacttgaccagattttatcttcaaaaactgtattctactccttctcctttgctgttgaggtaacttgcatattatatgtattctgtatactcagttcataaggttatttagcacaaagtatagcagcttcacctggagagctgcttttgctcagtaaattcaacttccatgttttatctttttttgttcaataaaaacatttaatgtcaaaaaaaaaaaaaaaaaa

SEQ ID NO: 124718 - DNA, 1228 bp, Homo sapiens
atgaatgaaatagagtttcgcttggaacgtactcctgttgatgaatcagatgatgaaattcaacatgatgagatccccacgggcaagtgtattgctcccatctttgacaagagactcaagcacttccgggtcacagaaggctctccagttacattcacctgcaaaattgttgggatacctgttccaaaggtttactggttcaaagatgggaagcagatttctaagagaaatgagcactgcaaaatgaggcgagaaggagatgggacatgctctctgcacattgaatccactaccagtgatgacgatggcaactacaccatcatggcagccaacccccaggggagaatcagctgttctggccacttgatggtacaaagtttgcccattcgcagtcggctaacctctgctggtcagtctcacaggggaagatcccgagtgcaagaaagagacaaagagcccctacaggaacgctttttccgaccacatttcctgcaggctcctggggatatggtagctcatgaggggcgcctctgtcggctggactgtaaggtgagtggtttaccgcccccggagcatgacatggctactcaatggccaacctgtgctaccagatgcctcccacaagatgctggtcagggagaccggagtccactctctgctcattgacccactcactcagcgcgacgcagggacctataagtgcatcgctaccaacaaaaccgggcagaattcttttagtctggagctctctgtagtagccaaagaggtgaagaaagcacctgtgatcctggagaaactacagaactgcggtgttcccgaaggccaccccgtgagactggagtgccgcgtgataggcatgcccccacctgtgttctactggaagaaagacaatgagaccatcccttgcaccagagagaggatcagtatgcaccaggacacaacagggtatgcctgccttctcattcagccagccaagaaatcagacgctggatggtacacgttgtcagccaagaatgaagccggcatcgtgtcgtgcactgccaggctggatatatacgctcagtggcaccatcagatcccaccgcccatgtctgtccggcccagtggcagtcgctacggatctctcaccagtaaaggacttgacatattttctgccttttcctccatggaaagcacgatggtgtattcatgctcttctcggagtgtagtggagagtgatgaactttaa

SEQ ID NO: 124719 - DNA, 229 bp, Homo sapiens
  misc_feature (1)...(229): n = a,t,c or g
agagccaccgggcacacttcctgcattagaatcactaagagtnacanggagaagaacagaaaacagaggcttctggaagggctttgagggcaacgtggagggatattcccgagaggcngaggcgaagcccagccagttcaggaggctgatctgatcgcccagcagatgagctgccaacagcaaagtgcagacttccttaaaaatgccggcaatggagagagtgaggctg

SEQ ID NO: 124720 - DNA, 485 bp, Homo sapiens
  misc_feature (1)...(485): n = a,t,c or g
aggccaaacccagccaattcagangcttgatctgatcgcccaacaaantgagctnccaaacagcaaattgcaaaacttcctttaaaaatgccggcaatggaaaaaattgaggctggaggttctgaagacccaggaggaactcagagaagcccaaaccaaaggcgagaatcccgccaaggaagaggctcccaagtacccgcaggagcagccctgtgtcctggaaacggaagattttctcagatgtggacaaatggagaccttcaaatacagcaaagagagggaagagccccaggaacatgagtggctgcaggtggaacatggtgtcgatgggattctggaggccgagttcagccttctgcaggagcatctgggtgagggtccagcgaatgccaccgatgaacgaggcccccagcaccaagcgaagccctccacgttgaactgtgtggacagctcctccagcttgaagatcagagagaagatcaaga

SEQ ID NO: 124721 - DNA, 1391 bp, Homo sapiens
tttcgtggagattccggcctggagctcccagggccgagcatttttttcttgggacctgtgagcgctgcatccaattaaccatgggaagggtcagcaccagccaccagccccttaggtgaggactctgcctggggctctgctgatggttccgaatcatggagctgcagagagctcctccagcctggagacgttcttggtgaaagctgtggtctaactccaccggctcttcctgcacattgtattcaagaggggtgcctgcccccgctgactcaggagctccggtgctgtcagccgccacgaatggggaggtgggccctcgatgtggcctttttgtggaaggcggagttgaccctggggctggagcttctctactacttgcttcttcatcggcatcaacttttacaacaagtggctgacaaagagctttccattttccccctcttcatgacgatgctgcacctggccgtgatcttcctcttctccgccctgtccagggcgctggttcagtgctccagccacagggcccgtgtggtgctgagctgggccgactacctcagaagagtggctcccacagcagctctccgggaagtcgccagcctcttccgtaagcccagcgcagaggagatgctgtgcccacctgccaggcagcgtggggaagccagggagctctcccagaaccccatcatcagagcaggggaaggcaggctgcaaggccacagacaggtggccactgtgatttgtgctcctgctcctttctcggtgatgggtctgagccctgagctccagcagtgcattgtgggtaattttgcttccaggtacacaatgaccaaatcctcagctgtcctcttcatcttgatcttctctctgatcttcaagctggaggagctgcgcgcggcactggtcctggtggtcctcctcatcgccgggggtctcttcatgttcacctacaagtccacacagttcaacgtggagggcttcgccttggtgctgggggcctcgttcatcggtggcattcgctggaccctcacccagatgctcctgcagaaggctgaactcggcctccagaatcccatcgacaccatgttccacctgcagccactcatgttcctggggctcttccctctctttgctgtatttgaaggacacagggctgctcctgcgggtacttgggagcctcttccttggcgggattctcgcctttggtttgggcttctctgagttcctcctgggtcttccagaacctccagcctcactctctccattgccggcatttttaaggaagtctgcactttgctgttggcagctcatctgctgggcgatcagatcagcctcctgaactggctgggcttcgccctctgcctctcgggaatatccctccacgttgccctcaa

SEQ ID NO: 124722 - DNA, 2219 bp, Homo sapiens
atggggaggtgggccctcgatgtggcctttttgtggaaggcggtgttgaccctggggctggtgcttctctactactgcttctccatcggcatcaccttctacaacaagtggctgacaaagagcttccatttccccctcttcatgacgatgctgcacctggccgtgatcttcctcttctccgccctgtccagggcgctggttcagtgctccagccacagggcccgtgtggtgctgagctgggccgactacctcagaagagtggctcccacagctctggcgacggcgcttgacgtgggcttgtccaactggagcttcctgtatgtcaccgtctcgctgtacacaatgaccaaatcctcagctgtcctcttcatcttgatcttctctctgatcttcaagctggaggagctgcgcgcggcactggtcctggtggtcctcctcatcgccgggggtctcttcatgttcacctacaagtccacacagttcaacgtggagggcttcgctttggtgctgggggcctcgttcatcggtggcattcgctggaccctcacccagatgctcctgcagaaggctgaactcggcctccagaatcccatcgacaccatgttccacctgcagccactcatgttcctgggggctcttccctctctttgctgtatttgaaggtctccatttgtccacatctgagaaaatcttccgtttccagggacacagggctgctccggcgggtacttggggagcctcttccttggcgggattctcgcctttggtttgggcttctctgagttcctcctggtctccagaacctccagcctcactctctccattgccggcatttttaaggaagtctgcactttgctgttggcagctcatctgctgggcgatcagatcagcctcctgaactgggctgggcttcgccctctgcctctcgggaatatccctccacgttgccctcaaagccctgcattccagaggtaacccagagtcccttccagaagcctctggtttctgttcttctccctgtgactcttagtgattctgatgcaggaagtgtgcccggtggctctgctgccgtcactcctctaggaagatgtgggggtcatctccagagtgggtgggtggggcctgggtgactcagcacacatgcaaatcagagcaaaccaagaaaaccacgactgggcctgtaactgtggtctctctctatcccaaggtgatggtggccccaaggccttgaaggggctgggctccagccccgacctggagctgctgctccggagcagccagcgggaggaaggtgacaatgaggaggaggagtactttgtggcccaggggcagcagtgaccagccagggcaaatggcttataagcaggccactccccagccctgctgccagcactcactgtgctcaagcccgccagggctcatcatggtaacctgggaagctgtggacgggaagttccccaggtggtggggccaaagccaagggactcatgacttttgcccctcccttcagagccctggtcacacaaggggcgagcacccaggccagccctgggactggccaaaagctgggccccaaactgcgctggaatcgcaagcaggagaggggagtgggctggttcttccccaccacttccccaggctctgacaagccgagactcatttcccaaggcacagcagctttctaaagggactgaatttggaactgggttttggaccctcccaggggctggagcttcatcaccctgggcagtgtcttttctcagagagcaggtttctttatagtttggaaataaatggttcacggtccactggccgcccttgtgttgctggaaacgtgggggcagggaggggacagtgtgggcctggcctctcctttcctttccctgcctggagccttttttcaaatgtctggtcttaagccaggcctccttcattttctcgctcctgttagaacaccaggtcccctccccagtggggccccactgcacctgctggcaggaaataaatgaatgtttactgagtactgcattctggagaccttacatgttttcacagcctagtttgaatactggctttgtcactagctgtgtgaccctaagcaaatgacctaacctgtctgtgccgtagttttttaatctgtgaaatggggataatgtctatctcagagtccttttgaagattgagtcattattagtaacagattaaatgttatataagca

SEQ ID NO: 124723 - DNA, 1029 bp, Homo sapiens
atggccttcacagcaacctggatggaatttgagactattattctaagtggagtaactcaggaatggaaaaccaaacatctgactcgcacagcaccatgcatttactcatcacttgtgttaattagatccagtccaggtttggcgggaaatgctgttgctggattgcaaccccgaggtgagattcgggctcacagagcccgagcttttgtcttgcaggctcaagcttctagattcgtcttctcgttaatgcggggacggaccactgggcgctgcctggtcagagctggttgtgaagggcggggaggtttccagcccggaggggcgcgggactggacaaaggtggatggtctgaagcatttgctggagacaggggcctcggtcaacgcacccccggatccctgcaagcagtcgcctgtccacttagccgcaggaagcggccttgcttgctttcttctctggcagctgcaaacgggcgctgacctcaaccagcaggatgttttaggagaagctccactacacaaggcagcaaaagttggaagcctggagtgcctaagcctgcttgtagccagtgatgcccaaattgatttatgtaataagaacgggcaaacagctgaagatctcgcttggtcatgtggatttccagactgtgccaagtttcttacaacaattaaatgtatgcagacaataaaagcaagtgaacaccctgacaggaatgattgtgttgccgtgctcagacagaaacggagtctcggaagtgtagaaaataccagtgggaaaaggaagtgctggggaggacagagtggttttaccacttcggagttggaggagacagaggaggacagtgacctgtcagattatggtgatgatgtggatgggaggaaagacgccttggctgaaccatgtttcatgttgattggggagatttttgaacttcgaggaaagcctcagtaccagctagagatatggcaggtgcccacgggcacacctgaccacctcgaagaggaagcaaatgagaagagcaagggttag

SEQ ID NO: 124724 - DNA, 2869 bp, Homo sapiens
ggctcagactgaaagtaattagaactggaaattagtaaccacttttttctaaacttttcccctttatttttattttcaatgtaaagtaggactttgctataaaacacgtgaccctagggaaacttttgaagttagcggtatagagagtaccaccaccagacgccaccatgcctgcggaaggaggaaaaacggacatggaaaggattggcctctttagtgagatggaatatattactgtgggtgataaatatgtgtcacaatttaatcgaccctttaatgaggctgcaagcaaaaataaacagatgctacctggagggtccaaagaaatgtcagatcttcaggcaggttattttgatccccattttgtaaggatttttgaaggtgaaggctacataaatctgaatcaaaaagcgaatgaagagcaccatcgtttacttaaaggagcaccatttaagttaaatcttcacccaagggactattttgacgctaatccttatttttctgaggaatctttaccaccaattaaaaaagaagagaagaagaaaacaatttcaaatacttttaaaccgtcttctcctggtaaaaagaatgaaattccacaattagttggtgaaatttatcagaatttctttgtggagagcaaagaaatatctgtggaaaaatcactttacaaagaaattcagcagtgtcttgtaggaaataaaggtattgaagtattctacaaaatccaggaagatgtttatgagaccctaaaggataggtattacccttcatttattgtcagtgacctgtatgagaaattgttgataaaagaggaagaaaaacatgcctcacagatgatttccaacaaggatgagatgtcctactggtcctctgaggatcaggacagcagacctgactttcgtgggtaccgcttgaaagcctggggaaggcagattttacgaatcggctggattagtgtccgatgttggatgttccagttggaatcagcaaagggcctcttggattggagccgcatgaggaagacagacacagagagagagagagagagagaagagaggatgagggaggaggaggggacaaagggcccaagagatgaggctggtgaggaagccgtggatgatggtaccaatcagatcaatgaacaagccagttttgctgtaaacaaactcgcgagaactaaatgagagacttgaatataaaaggcaagcgctaaattctattcaaaatgcaccaaaacctgacaagaagattgtttccaagttgaaggatgaaataatcctaatagagaaagaacgcacagaccttcagctgcacatggcaagaacggattggtggtgtgaaaaccttggcatgtggaaagcctccatcaccagtggagaggttacagaagagaatggtgagcaattgccatgttactttgtcatggtaagcctacaagaagttggaggagttgaaactaagaactggacggtccccaaaaggctcagcgagtttcataatttacaccggaaactcagtgagtgcgttccttctttaaaaaaagaccagttgccttctcttagcaagctgcctttcaaatctatagatcacacgtttatggaaaagtttgagaatcaattaaataagtttttacagaatctgctttcagatgaaagactgcgtcagagtgaagcactttatgccttcttgagcccttctcctgactacctctagggtatcgacgtgcagggaaaaaaaaattctttttcattatcctcatttttggaaagacttcctcgcgacttcttctcccaccaggaggaggagacagaggaggacagtgacctgtcagattatggtgatgatgtggatgggaggaaagacgccttggctgaaccatgtttcatgttgattggggagatttttgaacttcgaggaatgtttaaatgggtgagaagaacattaattgccctcgttcaggtcacttttggaagaaccatcaacaaacaaatccgggacacagtcagctggattttcagtgagcaaatgttggtttactacatcaatattttccgggatgctttttggccaaatgggaagttggcaccaccgaccacaatcagaagcaaagagcaaagtcaggaaacaaaacagagagcacagcaaaagctgcttgaaaacattccagatatgcttcagagccttgttggacagcaaaatgcccgccacggtattattaaaaatattccaatgcactgcaagaaacaagagccaacaagcatctgttatatgcgctgatggaactgctgctaattgaactgtgtcctgagctgagagttcatttagatcaactttaaagctgggccaagtttgagactacacaaataaaccaccaggaaaaatgtctggtggtaataataggacatggaaacattttcctctttttccacagaggggctttaactgaggaaccgtattgatttttattttagttacctcccctctagttttatgtgaaaattagtagaaatcagggaggacgggacttatgctgtggtaggcaacagaaaaaaacttctattgattttaatttaatatgaatactttaaagatcaacataccgattgaaatacaaatgttaatatgtgagaacctaggaagtattttaaatatttatgaaaatattttgttttaaaatgaactatgaatattgtacagttaatttcctcactgaggactgtgaacattcttatattatttcatgtatattgaagaacattgttatgcaatgctttgtgtaaagttattgtgaagattttattgtctttatttttaccaaagatttcccatagtttgagcattcaaagcaataaaatataaaaatgaa

SEQ ID NO: 124725 - DNA, 410 bp, Homo sapiens
taagctcagggtcaagttctgagcaaaaagtgtcaaggagcctttttgcaacctcctataatattgaaacagattctgtgccctttaaaggagataataactaacatctggggagcgctttacaatttaaaaaaggcctttcacacacaggcctgtttcatcttcacaacaatcttataaaacagatatattgttcccatttcccaaataatgaaacggaagcgccgaaaagtaagtattgtgctcaatgtcacaggctactaagtggcatgggaaaccaggtctcctgaatctagcctccgggtttctgctctccaccagcccaacctcagaaaattctaataggtgcagggggctttggcaaatagacccatgggaagaaggggaaacttatgtctagttaagtcgct

SEQ ID NO: 124726 - DNA, 985 bp, Homo sapiens
  misc_feature (1)...(985): n = a,t,c or g
atggtgggtgaaaaggttgagaagccagatcctaaagagaagaaaccagaagccaagaaggctgatgctggtggcaagatcctctacaaagaacacgccagaaatctgtcactgccacctcaaccaaaattgataatcagcaatgtaaaaatcccaaaacatcctgctgacgcttacttcaagaagcagcagctgtggaagcccagaaacaggaagctggctggcaagctcagcacgccggctgcccgggacgccccgagggcgcgccctccgcacgaggccccgcccccacccccacctcccgagctgcggtaccgggttccgccccggcccgcgccctctagctggcgccacccaagcggcaagggacgtcgcggccctcccgggattggtgggaggatcgtgggggagcggcagctcaggacggaatacggcaatgaccgccccggtcgcgagggtgaccctgccccgggctgctgtgggggcgcaagaaccctttcactttacggcgagattaagctcagggtcaagttctgagcaaaaagtgtcaaggagcctttttgcaacctcctataatattgaaacagattctgtgccctttaaaggagataataactaacatctggggagcgctttacaatttagaaaaggcctttcacacacaggcctgtttcatcttcacaacaatcttataaaacagatatattgttcccatttcccaaataatgaaacggaagcgccgaaaatatctcctatagggctcttcaaactgtggtcaacttagtaaatgatgttgacagtggaagtgtgatcattttattttcctgcctttggaattgaagattgtaattttgcaaaaattttgttgaagatgatgtagctttggttcaaagagctggagtacaatggcannnnnnnnnnnnnnnnnnnnnnnnnnnnnnnnnnnnccaagtctcttcttcggcctctcagacatggtaccatc

SEQ ID NO: 124727 - DNA, 585 bp, Homo sapiens
agagtctcattctgtaggccaggccggaggacgggaatgagaaaggccatgtacaagaggaagtagtcagccgctaaatccgagatggcgggtgaaaaagttgagaagccagatactaaagagaagaaacccgaagccaagaaggttgatgctggtggcaaggtgaaaaagggtaacctcaaagctaaaaagcccaagaaggggaagccccattgcagccgcaaccctgtccttgtcagaggaattggcaggtattcccgatctgccatgtattccagaaaggccatgtacaaaaaggaagtactcagccgctaaatccaaggttgaaaagaaaaagaaggagaaggttctcgcaactgttacaaaaccagttggtggtgacaaggtcggcgggacccgggggggtaaaacttcgcaaaaatgcctagaatataatcctactgaagatgtgcctcgaaagctgttgagccacggcaaaaaacccttcagtcagcacgtgagaaaactgcgagccagcattacccccgggaccattctgatcatcctcactggacgccacaggggcaagagggtggttttcctgaa

SEQ ID NO: 124728 - DNA, 285 bp, Homo sapiens
atgcatcgccctctactgccacctgctcaacatctgcagcaaggtcaaggccgagatgcagaatctcggcagggagttcattgtccctggaatggacagcgctacgtccctgatctgggcaaccaaggacttatgaatgctgtgatagaggcaccagagaaaaagcccttgttgaagagagagaaacaggatgagtcacagagcgagattaaatgggcatctcagaagaagcacttgaacccggtgcaggccctcagcgagttcaaagccatggacagcatctaa

SEQ ID NO: 124729 - DNA, 3526 bp, Homo sapiens
ggaaatgactgctgtccatgcaggcaacataaacttcaagtgggatcctaaaagtctagagatcaggactctggcagttgagagactgttggagcctcttgttacacaggttacaacccttgtaaacaccaatagtaaagggccctctaataagaagagaggtcgttctaagaaggcccatgttttggctgcatctgttgaacaagcaactgagaatttcttggagaagggggataaaattgcaaaagagagccagtttctcaaggaggagcttgtggttgctgtagaagatgttcgaaaacaaggtgatttgatgaaggctgctgctggagagttcgcagatgatccctgctcttctgtgaagcgaggcaacatggttcgggcagctccagctttgctctctgctgttacccggttgctcattttggctgacatggcagatgtctacaaattacttgttcagctgaaagttgtggaagatggtatattgaaactgaggaatgctggcaatgaacaagacttagggaatcagtataaagccctaaaacctgaagtggataagctgaacattatggcagcaaaaagacaacaggaattgaaagatgttgggcatcgtgatcagatggctgcggctagaggaatcctgcagagcaacgttccgatcctctatactgcatcccaggcatgcctacagcaccctgatgtcgcagcctataaggccaacagggacctgatatacaagcagctgcagcaggcggtcacagggatttccaatgcagcccaggccactgcctcagacgatgcctcacagcaccagggtggaggaggaggagaactggcatatgcactcaataactttgacaaacaaatcattgtggaccccttgagcttcagcgaggagcgctttaggccttccctggaggagcgtctggaaagcatcattagtggggctgccttgatggccgactcgtcctgcacgcgtgatgaccgtcgtgagcgaattgtggcagagtgtaatgctgtccgccaggcctgcaggacctgcgtttcggagtacatgggcaatgctggacgtaaagaaagaagtgatgcactcaattctgcaatagataaaatgaccaagaagaccagggacttgcgtagacagcttcgcaaagctgtcatggaccacgtttcagattctttcctggaaaccaatgttccacttttggtattgattgaagctgcaaagaatggaaatgagaaagaagttaaggaatatgcccaagttttccgtgaacatgccaacaaattgattgaggttgccaacttggcctgttccatctcaaataatgaagaaggtgtaaagcttgttcgaatgtctgcaagccagttagaagccggttgtcctcaggttattaatgctgcaacctgggctttagcaccaaaaccacagagtaaactggcccaagagaacatggatctttttaaagaacaatgggaaaaacaagtccgtgttctcacagatgctgtcgatgacattacttccattgatgacttcttggctgtctcagagaatcacattttggaagatgtgaacaaatgtgtcattgctctccaagagaaggatgtggatggcctggaccgcacagctggtgcaattcgaggccgggcagcccgggtcattcacgtagtcacctcagagatggacaactatgagccaggagtctacacagagaaggttctggaagccactaagctgctctccaacacagtcatgccacgttttactgagcaagtagaagcagccgtggaagccctcagctcggaccctgcccagcccatggatgagaatgagtttatcgatgcttcccgcctggtatatgatggcatccgggacatcaggaaagcagtgctgatgataaggacccctgaggagttggatgactctgactttgagacagaggattttgatgtcagaagcgagacgagcgtccagacagaagacgatcagctgatagctggccagagtgcccgggcgatcatggctcagcttccccaggagcaaaaagcgaagattcgggaacaggtggccagcttccaggaagaaaagagcaagctggatgctgaagtgtccaaatgggacgacagtggcaatgacatcattgtgctggccaagcagatgtgcatgattatgatggagatgacagactttacccgaggtaaaggaccactcaaaaatacatcggatgtcatcagtgctgccaagaaaattgctgaggcaggatccaggatggacaagcttggccggaccattcgagaccattgccccgactcggcttgcaagcaggacctgctggcctacctgcaacgcatcgccctctactgccaccagctgaacatctgcagcaaggtcaaggccgaggtgcagaatctcggcggggagcttgttgtctctgggaactgtgacacctgcggggcactgcaagggctgaaaggctggcctcctcccctttgcctggccactcactgggtggacagcgccatgtccctgatccaggcagccaagaacttgatgaatgctgtggtgcagacagtgaaggcatcctacgtcgcctctaccaaataccaaaagtcacagggtatggcttccctcaaccttcctgctgtgtcaatgaagatgaaggcaccagagaaaaagccattggtgaagagagagaaacaggatgagacacagaccaagattaaacgggcatctcagaagaagcacgtgaacccagtgcaggccctcagcgagttcaaagctatggacagcatctaagtctgcccaggccggccgcccccacccctctggctcctgaatatcagtcactgttcgtcactcaaatgaatttgctaaatacaacactgatactagattccacagggaaatgggcagactgaaccagtccaggtggtgaattttccaagaacatagtttaagttgattaaaaatgcttttagaatgcaggagcctacttctagctgtattttttgtatgcttaaataaaataaaattcataaccaagagatccacattagcttgttagtaatgctctgaccaagccgagatgccattctcttagtgatggcggcgttaggtttgagagaaggaattggctcaacttcagttgagagggtgcagtccagacagcttgactgcttttaaatgaccaaagatgacctgtggtaagcaacctggcatcttaggaagcagtccttgagaaggcatgttccagaaaggtctctgaggacaaactcactcagtaaaacataatgtatcatgaagaaaactgattctctatgacatgaaatgaaaattttaatgcattgttataattactaatgtacgctgctgcaggacattaataaagttgcttttttaggctacagtgtctcgatgccataatcagaacacactttttttcctctttctcccagcttcaaatgcacaattcatcattgggctcacttctaataactgcagtgtttccgccttgcgttgcag

SEQ ID NO: 124730 - DNA, 3828 bp, Homo sapiens
gtcctcctcctagccggactggagggagacaaagcagcgcccgtctgcttcgggcctctggaatttagcgctcgcccagctagccgcagaaatgactgctgtccatgcaggcaacataaacttcaagtgggatcctaaaagtctagagatcaggactctggcagttgagagactgttggagcctcttgttacacaggttacaacccttgtaaacaccaatagtaaagggccctctaataagaagagaggtcgttctaagaaggcccatgttttggctgcatctgttgaacaagcaactgagaatttcttggagaagggggataaaattgcgaaggagagccagttttctctaggaatagcttttggctgctgtagaatacgttcgaaaacaaggtgatttgatgaagactgctgcgggagagttcgcagatgatccctgttcttctgtggagcaaggcaacatggttcaggcagcttgaactttgctctctgctgttacctgcttgctgattttggctgaacatgggaaatgtctacacattacttattcagctgaaagttgtggaagatgatatcttgaaattgaggaatgctggcaatgaacaagacttaggaatatagtataaagccctaaaacccgaagtgaataaggtgaacattatggcagtcaaaagacaacaggaactgaaagatgttggccatcgtgatcagatggctgcagctagaggaatcctgcagaagaatgttctgatcttctatacggcatcccgggcatgcctacagcaccctgatgttgcagcctataaggccaacagggacctgatatacaagcagctgcagcaggccatcacaggcatttccaatgtagcccaggccactgcctcagacgatgcctcccatcaccagggtggaggaggagtagaactagcatatgtactcaataactttgacaaacaaatcattgtggaccccttgagcttcagcgaggagcgctttaggccttccctggaggagcgtctggaaagcatcattagtggggctgccttgatggccgactcgtcctgcacgcgtgatgaccgtcgtgagcgaattgtggcagagtgtaatgctgtccgccaggccctgcaggacctgcgtttcggagtacatgggcaatgctggacgtaaagaaagaagtgatgcactcaattctgcaatagataaaatgaccaagaagaccagggacttgcgtagacagcttcgcaaagctgtcatggaccacgtttcagattctttcctggaaaccaatgttccacttttggtattgattgaagctgcaaagaatggaaatgagaaagaagttaaggaatatgcccaagttttccgtgaacatgccaacaaattgattgaggttgccaacttggcctgttccatctcaaataatgaagaaggtgtaaagcttgttcgaatgtctgcaagccagttagaagccggttgtcctcaggttattaatgctgcaacctgggctttagcaccaaaaccacagagtaaactggcccaagagaacatggatctttttaaaagaacaatgggaaaaacaagtccatgttctcacagatgctgctgatgatattacttccattgatgacttcttggctgtctcagagaatcacattttggaagatgtgaacaaatgtgtcattgctctccaagagaaggatgtggatggcctggaccgcacagctggtgcaattcgaggccgggcagcccgggtcattcacgtagtcacctcagagatggacaactatgagccaggagtctacacagagaaggttctggaagccactaagctgctctccaacacagtcatgccacgttttactgagcaagtagaagcagccgtggaagccctcagctcggaccctgcccagcccatggatgagaatgagtttatcgatgcttcccgcctggtatatgatggcatccgggacatcaggaaagcagtgctgatgataaggacccctgaggagttggatgactctgactttgagacagaggattttgatgtcagaagcgagacgagcgtccagacagaagacgatcagctgatagctggccagagtgcccgggcgatcatggctcagcttccccaggagcaaaaagcgaagattcgggaacaggtggccagcttccaggaagaaaagagcaagctggatgctgaagtgtccaaatgggacgacagtggcaatgacatcattgtgctggccaagcagatgtgcatgattatgatggagatgacagactttacccgaggtaaaggaccactcaaaaatacatcggatgtcatcagtgctgccaagaaaattgctgaggcaggatccaggatggacaagcttggccggaccattcgagaccattgccccgactcggcttgcaagcaagcccggcctgctcgactcagcctgccctgacttggcctgctggcctacctgcactgcatcgccctctactgccacccagctgaacatctgcagcaaggtcaaggccgaggtgcagaatctcggcggggagcttgttgtctctggggtggacagcgccattgtccctgatctgggcaaccaaagaacttgatgaaatgctgtggtgcagacagtgaaggcatcctacgtcgcctctcccaataacaaaaagtcacagggtatggcttcccctcaaccttcctgctgtgtcatggaagatgaaggcaccagagaaaaagccattggtgaagagagagaaacaggatgagacacagaccaagattaaacggggcatctcagaagaagcacgtgaacccggtgcaggccctcagcgagttcaaagctatggacagcatctaagtctgcccaggccggccgcccccacccctcggggctccctgaatattcagttcactgtttcgttcactcaaatggaattttgcttaaattacaacactggatactagggttccacaggggaaatgtggcagacttgaaccagtccaggtggtgaattttccaagaacatagtttaacgttgattaaaaatgcttttacgaatgcaggagcctacttctagctgtattttttgtatgcttaaataaaaataaaaattcataaccaaacgagaatcccacattaagcttgttagtaatgctctgaccaagccgagatgcccattctcttagtgatggcggcgttaggggtttgagagaagggaatttggctcaacttcagttgagagggtgcagtccagacagcttgactgcttttaaatgaccaaagatgacctgtggtaagcaacctgggcatcttaggaagcagtccctggagaaggcatgttccccagaaaggtctctggagggacaaactcactcagtaaaacataatgtatcatcatgaagaaaactgattctctatgacatgaaatgaaaattttaatgcattgttataattactaatgtaccgctgctgcaggacattaataaagttgcttttttaggctacagtgtctcgatgccataatcagaacacactttttttcctctttctcccagcttcaaatgcacaattcatcattgggctcacttctaataactgcagtgtttcccgccttgggcttgcagcagaaaaacctgacaacatagagtttgctaaggcagtaatttagactttaccttatttgtgattactgtagtgattgattgattgattactattaactacaaggtataatttactatcaccttatttaaattttatgaattaatttgaatgtttttttacactaactaacttttcccaataaagtccactatgaaaccacgac

SEQ ID NO: 124731 - DNA, 4548 bp, Homo sapiens
atgaggccgcggaccctcgcggtgagtgttacagctcttaaggtggcgcgtctagagtctgtcccttctgatgttcagatgtgttcggagtttcttccttctggtgggctcgtggtctcgctgggctcaggagtgaagctgcagatcttcgtggtgagtgttacagctcataaaagcagcgtggacccaaagaactcaggagcccagctggcttcagctagtggatcccgcaccagggctgcaggtggagctgcctgccagtcctgcgccgtgcgctcgcattccttagcccttaggtggtcgatgggactgggcgccgtggagcagggggcggtgctcgtcagggaggctccggccgcacaggagcccatggagtgggtgggaggctcaggcatggcgggctgcaggtcccgagccttgctccacgggaaggcagctaaggcccagcgagaaacagagcacagcgccgaaaaggaaattgcagccgaaaagaaaaccaccaatggaaatccagatctaccccctcgtgattgtgatcgcaggatgccagaccagtttgaccaggcggttgtgctgaaccagctgcggtactcagggatgctggagactgtgagaatccgcaaagctgggtataaagtgctgatgaggaatctggctctgcctgaggacgtccgagggaagtgcacgagcctgctgcagctctatgatgcctccaacagcgagtggcagctggggaagaccaaggtctttcttcgagaatccttggaacagaaactggagaagcggagggaagaggaagtgagccacgcggccatggtgattcgggcccatgtcttgggcttcttagcacgaaaacaatacagaaaggtcctttattgtgtggtgataatacagaagaattacagagcattccttctgaggaggagatttttgcacctgaaaaaggcagccatagttttccagaagcaactcagaggtcagattgctcggagagtttacagacaattgctggcagagaaaagggagcaagaagaaaagaagaaacaggaagaggaagaaaagaagaaacgggaggaagaagaaagagaaagagagagagagcgaagagaagccgagctccgcgcccagcaggaagaagaaacgaggaagcagcaagaactcgaagccttgcagaagagccagaaggaagctgaactgacccgtgaactggagaaacagaaggaaaataagcaggtggaagagatcctccgtctggagaaagaaatcgaggacctgcagcgcatgaaggagcagcaggagctgtcgctgaccgaggcttccctgcagaagctgcaggagcggcgggaccaggagctccgcaggctggaggaggaagcgtgcagggcggcccaggagttcctcgagtccctcaatttcgacgagatcgacgagtgtgtccggaatatcgagcggtccctgtcggtgggaagcgaattttccagcgagctggctgagagcgcatgcgaggagaagcccaacttcaacttcagccagccctacccagaggaggaggtcgatgagggcttcgaagccgacgacgacgccttcaaggactcccccaaacccagcgagcacggacactcagaccagcgaacaagtggcatccggaccagcgatgactcttcagaggaggacccatacatgaacgacacggtggtgcccaccagccccaacggcgactacgactacgaccaggatgactatgaggacggtgccatcacttccggcagcagcgtgaccttctccaactcctacggcagccagtggtcccccgactaccgctgctctgtggggacctacaacagctcgggtgcctaccggttcagctctgagggggcgcagtcctcgtttgaagatagtgaagaggactttgattccaggtttgatacagatgatgagctttcataccggcgtgactctgtgtacagctgtgtcactctgccgtatttccacagctttctgtacatgaaaggtggcctgatgaactcttggaaacgccgctggtgcgtcctcaaggatgaaaccttcttgtggttccgctccaagcaggaggccctcaagcaaggctggctccacaaaaaaggggggggctcctccacgctgtccaggagaaattggaagaagcgctggtttgtcctccgccagtccaagctgatgtactttgaaaacgacagcgaggagaagctcaagggcaccgtagaagtgcgaacggcaaaagagatcatagataacaccaccaaggagaatgggatcgacatcattatggccgataggactttccacctgattgcagagtccccagaagatgccagccagtggttcagcgtgctgagtcaggtccacgcgtccacggaccaggagatccaggagatgcatgatgagcaggcaaacccacagaatgctgtgggcaccttggatgtggggctgattgattctgtgtgtgcctctgacagccctgatagacccaactcgtttgtgatcatcacggccaaccgggtgctgcactgcaacgccgacacgccggaggagatgcaccactggataaccctgctgcagaggtccaaaggggacaccagagtggagggccaggaattcatcgtgagaggatggttgcacaaagaggtgaagaacagtccaaagatgtcttcactgaaactgaagaaacggtggtttgtactcacccacaattccctggattactacaagagttcagagaagaacgcgctcaaactggggaccctggtcctcaacagcctctgctctgtcgtccccccagatgagaagatattcaaagagacaggctactggaacgtcaccgtgtacgggcgcaagcactgttaccggctctacaccaagctgctcaacgaggccacccggtggtccagtgccattcaaaacgtgactgacaccaaggccccgatcgacacccccacccagcagctgattcaagatatcaaggagaactgcctgaactcggatgtggtggaacagatttacaagcggaacccgatccttcgatacacccatcaccccttgcactccccgctcctgccccttccgtatggggacataaatctcaacttgctcaaagacaaaggctataccacccttcaggatgaggccatcaagatattcaattccctgcagcaactggagtccatgtctgacccaattccaataatccagggcatcctacagacagggcatgacctgcgacctctgcgggacgagctgtactgccagcttatcaaacagaccaacaaagtgccccaccccggcagtgtgggcaacctgtacagctggcagatcctgacatgcctgagctgcaccttcctgccgagtcgagggattctcaagtatctcaagttccatctgaaaaggatacgggaacagtttccaggaaccgagatggaaaaatacgctctcttcacttacgaatctcttaagaaaaccaaatgccgagagtttgtgccttcccgagatgaaatagaagctctgatccacaggcaggaaatgacatccacggtctattgccatggcggcggctcctgcaagatcaccatcaactcccacaccaccgctggggaggtggtggagaagctgatccgaggcctggccatggaggacagcaggaacatgtttgctttgtttgaatacaacggccacgtcgacaaagccattgaaagtcgaaccgtcgtagctgatgtcttagccaagtttgaaaatgcgttgaccggaaagctgttgactgtctcctttcaggcccacgaagcggttatccatggccaccatccagccccggaagaaaacctccaggttcttgctgccctgcgactccagtatctgcagggggattatactctgcacgctgccatcccacctctcgaagaggtttattccctgcagagactcaaggcccgcatcagccagtcaaccaaaaccttcaccccttgtgaacggctggagaagaggcggacgagcttcctagaggggaccctgaggcggagcttccggacaggatccgtggtccggcagaaggtcgaggaggagcagatgctggacatgtggattaaggaagaagtctcctctgctcgagccagtatcattgacaagtggaggaaatttcagggaatgaaccaggaacaggccatggccaagtacatggccttgatcaaggagtggcctggctatggctcgacgctgtttgatgtggagtgcaaggaaggtggcttccctcaggaactctggttgggtgtcagcgcggacgccgtctccgtctacaagcgtggagagggaagaccactggaagtcttccagtatgaacacatcctctcttttggggcacccctggcgaatacgtataagatcgtggtcgatgagagggagctgctctttgaaaccagtgaggtggtggatgtggccaagctcatgaaagcctacatcagcatgatcgtgaagaagcgctacagcacgacacgctccgccagcagccagggcagctccaggtga

SEQ ID NO: 124732 - DNA, 2637 bp, Homo sapiens
atggcaggacttgggatgggagaggaagggattcctggtggagagcgctgggagcacaagcgcagggcacacatcgtgagcaatcacagaattacgcgtacgggcacacacccatacacgcacagtccatacccgcacaaagacaacgttcacacagcccgcagggagcacaagacacaggatttaggcacaatacgttccgtgggacacagttcagaacacacccagcatacaaccccagacaccgttccgccgctggtggttatagtatgccgcgtttgttaccgccccccgcacggggagacccgcgccgagtacacccggcaccgcgggcagaacaggaggaccaaattctgggtcggcatcaaggaggaaaagaacctggcgcagcaggaacgaactgaagagcaactggcaaacatcgcgcgcggtggttatgtgctgaaagactgcgccggtcagccggaactgattttcatcgctaccggttcagaagttgaactggctgttgctgcctacgaaaaactgactgccgaaggcgtgaaagcgcgcgtggtgtccatgccgtctaccgacgcatttgacaagcaggatgctgcttaccgtgaatccgtactgccgaaagcggttactgcacgcgttgctgtagaagcgggtattgctgactactggtacaagtatgttggcctgaacggtgctatcgtcggtatgaccaccttcggtgaatctgctccggcagagctgctgtttgaagagttcggcttcactgttgataacccactagcttcgcgcgcggttcggttgcgtttgccgttcaacaacgatcaggtggaagcggcggtgggctggaagctggcggttgagcgccacaacggaccgacggcactgatcctctcaaggcagaatctggcccaggtggaacgtacgccggatcaggttaaagagattgctcgtggcggttatgtgctgaaagacagcggcggtaagccagatattattctgattgccaccggttcagagatggaaattaccctgcaagcggcagagaaattagcaggagaaggtcgcaatgtacgcgtagtttccctgccctcgaccgatattttcgacgcccaggatgaggaatatcgggagtcggtgttgccttctaacgttgcggctcgcgtggcggtggaagcaggtattgccgattactggtacaagtatgttggtctgaaaggggcaattgtcgggatgacgggttacggggaatctgctccggcggataagctgttcccgttctttggctttaccgccgagaatattgtggcaaaagcgcataaggtgctgggagtgaaagccgggtcacatattcctcggaagaagtatgatgtgcccggcaagaagagcttttctcccgtgaaatatagcacaattgggagccccagtccagagagaccagtgagtataaccaccatacccaactcgtttgtgatcatcacggccaaccgggtgctgcactgcaacgccgacacgccggaggagatgcaccactggataaccctgctgcagaggtccaaaggggacaccagagtggagggccaggaattcatcgtggtggagaagctgatccgaggcctggccatggaggacagcaggaacatgtttgctttgtttgaatacaacggccacgtcgacaaagccattgaaagtcgaaccgtcgtagctgatgtcttagccaagtttgaaaaagagccagttggtaagcatttaccaacatatgatggccagatcgccatgggcttagaaagtacagcttctgtcaccaggaaacattcatcaccttcgtcattgcagaatgctctaagttgtgagactgctacttcgcttattgaacgccgtgtacgaatggcgcttggcaccggcgatcgtcgcggcctgaatacctggctggcgcgtctgcctatggaagcgaaagagaaagatgaatggcgttactggcaggcggatttattgctggaacgcggacgtgaagctgaagcaaaagagattttgcatcaactcatgcaacagcgtggtttctacccgatggttgcagcacaacgcatcggcgaagagtatgagctgaagattgataaagcgccgcagaatgttgacagcgccctgactcaggggccggagatggcgcgcgtgcgcgagttgatgtactggaatctcgataataccgcgcgtagcgagtgggccaatctggtgaagagcaagtcaaaaacagagcaggctcaactggcgcggtatgctttcaacaaccaatggtgggatcttagcgttcaggcaacgatcgccgggaagctgtgggatcatctggaagagcgattcccgctggcttacaacgatcttttcaaacgctacaccagcggtaaggagatcccgcaaagctatgcgatggcgattgctcgtcaggagagcgcctggaatccgaaagtgaaatcaccggtaggggccagcggcttgatgcagattatgcctggtacagcgacccatacggtgaagatgttctctattcccggttatagcagtcctgcgcaattgctggatccggaaacgaatatcaacattggcaccagttacctgccatatgttatcagcagttcggcataa

SEQ ID NO: 124733 - DNA, 2943 bp, Homo sapiens; identical to SEQ ID NO: 117263

SEQ ID NO: 124734 - DNA, 404 bp, Homo sapiens
gatacgggaacagtttccaggaagcgagatggaaaaatacgctctcttcacttacgaatctcttaagaaaaccaaatgccgagagtttgtgccttcccgagatgaaatagaagctctgatccacaggcaggaaatgacatccacggtctattgccatggcggcggctcctgcaagatcaccatcaactcccacaccaccgctggggagtttgcggtcggggtccccacccttttcgggactggcccccccgacgccagtgccctctgccactgccgactggagacggccactggcaatcattcagtctccgtcgggctccaaaaacaaggaagagttcacagtgagcagtggaccgtgctcatgcgcacccgggcatctgccttggcacagcagctggctttgc

SEQ ID NO: 124735 - DNA, 549 bp, Homo sapiens
atggtgcccacaccgatggagaccacacaccttgacaccgacagcagcgcctgcggtaacaaaaagcccagaggctacgcacctgtacggccaggtttcctggaattcacagaacctgcacctcgaaggacagctgcagtcagcttccttacagggttcttttatgttgaagtaatagggggatcctctagattttggatgtcccctccgaggcctctttttgagagactcaaggcccgcatcagccagtcaaccaaaaccttcaccccttgtgaacggctggagaagaggcggacgagcttcctagaggggaccctgaggcggagcttccggacaggatccgtggtccggcagaaggtcgaggaggagcagatgctggacatgtggattaaggaagaagtctcctctgctcgagccagtatcattgacaagtggaggaaatttcagggaatgaaccaggaacaggccatggccaagtacatggccttgatcaaggagtggcctggctatggctcgacgctgtttgatgtggagggaacagacacctaa

SEQ ID NO: 124736 - DNA, 558 bp, Homo sapiens
atgcaaaactacagaattatagacaagacgagaagagaaacccgcaacagcaaaaaaacaaacaaagaaggaagagaaaaaacagaaagagagggagcagaaaacagacaacagaggacgaaccaagggaagaaagtacaacaggaagcacagcggagaggcatacgatgggaccgagaagacacgggaacaccgccaggaccgacaagtgacaaaaaagacaacgaagaaagcgaagaccggaacaacgcaaggaacaaaagagaacacaacgagaaggaaggaacaacggtcggaccgtgggttggcgttgacgtgcgtgtgctgggcacccctgccattgcaggctactggaacgtcaccgtgtacgggcgcaagcactgttaccggctctacaccaagctgctcaacgaggccacccggtggtccagtgccattcaaaacgtgactgacaccaaggccccgatcgacacccccacccagcagctgattcaagatatcaaggaagaaacttacctttccttctacggcgttccttccaaccccaaaggggcttaa

SEQ ID NO: 124737 - DNA, 627 bp, Homo sapiens
gtggtggagaagctgatccgaggcctggccatggaggacagcaggaacatgtttgctttgtttgaatacaacggccacgtcgacaaagccattgaaagtcgaaccgtcgtagctgatgtcttagccaagtttgaaaatgcgttgaccggaaagctgttgactgtctcctttcaggcccacgaagcggttatccatggccaccatccagccccggaagaaaacctccaggttcttgctgccctgcgactccagtatctgcagggggattatactctgcacgctgccatcccacctctcgaagaggtttattccctgcagagactcaaggcccgcatcagccagtcaaccaaaaccttcaccccttgtgaacggctggagaagaggcggacgagcttcctagaggggaccctgaggcggagcttccggacaggatccgtggtccggcagaaggtcgaggaggagcagatgctggacatgtggattaaggaagaagtctcctctgctcgagccagtatcattgacaagtggaggaaatttcagggaatgaaccaggaacaggccatggccaagtacatggccttgatcaaggagtggcctggctatggctcgacgctgtttgatgtggag

SEQ ID NO: 124738 - DNA, 7234 bp, Homo sapiens
atgcctgagcctcccacccactccatgggctcctgtgcggccggagcctccctgacgagcaccgccccctgctccacggcgcccagtcccatcgaccacctaagggctaaggaatgcgagcgcacggcgcaggactggcaggcagctccacctgcagccctggtgcgggatccactagctgctctggtgaggacgtggagaacctttatgtctagctcaaggattgtaaatacaccaatcggcaccctgtgtttagctcaaggtttccagtggttcagcgtgctgagtcaggtccacgcgtccacggaccaggagatccaggagatgcatgatgagcaggcaaacccacagaatgctgtgggcaccttggatgtggggctgattgattctgtgtgtgcctctgacagccctgatagacccaactcgtttgtgatcatcacggccaaccgggtgctgcactgcaacgccgacacgccggaggagatgcaccactggataaccctgctgcagaggtccaaaggggacaccagagtggagggccaggaattcatcgtgagaggatggttgcacaaagaggtgaagaacagtccaaagatgtcttcactgaaactgaagaaacggtggtttgtactcacccacattcctggattactacaagagttcagagaagacgcgctcaactggggacctgatgagaagatattcaaagagacagaactggtgaatgatatggacaagattaatggaaggatagagagggcagaagcatcaacttgcgagttaggacttcttagaattatccaggttgtcagcccctttcactcctctgtgcatttgtttacaaatgtgggtcctcaggtccggaaccgcattgctgcttgcgagagggctggaatgatggaatacagaagtgcttccctctctctgctgaatgcctcggtggctgaaggatatgtacgggaagaaaaggaaattgcagccgaaaagaaaaccaccaatggaaatccagatctaccccctcgtgattgtgatcgcaggatgccagaccagtttgaccaggcggttgtgctgaaccagctgcggtactcagggatgctggagactgtgagaatccgcaaagctgggtataaagtgctgatgaggaatctggctctgcctgaggacgtccgagggaagtgcacgagcctgctgcagctctatgatgcctccaacagcgagtggcagctggggaagaccaaggtctttcttcgagaatccttggaacagaaactggagaagcggagggaagaggaagtgagccacgcggccatggtgattcgggcccatgtcttgggcttcttagcacgaaaacaatacagaaaggtcctttattgtgtggtgataatacagaagaattacagagcattccttctgaggaggagatttttgcacctgaaaaaggcagccatagttttccagaagcaactcagaggtcagattgctcggagagtttacagacaattgctggcagagaaaagggagcaagaagaaaagaagaaacaggaagaggaagaaaagaagaaacgggaggaagaagaaagagaaagagagagagagcgaagagaagccgagctccgcgcccagcaggaagaagaaacgaggaagcagcaagaactcgaagccttgcagaagagccagaaggaagctgaactgacccgtgaactggagaaacagaaggaaaataagcaggtggaagagatcctccgtctggagaaagaaatcgaggacctgcagcgcatgaaggagcagcaggagctgtcgctgaccgaggcttccctgcagaagctgcaggagcggcgggaccaggagctccgcaggctggaggaggaagcgtgcagggcggcccaggagttcctcgagtccctcaatttcgacgagatcgacgagtgtgtccggaatatcgagcggtccctgtcggtgggaagcgaattttccagcgagctggctgagagcgcatgcgaggagaagcccaacttcacactttccaagcccagaccccctaaccgcaagaggcaggaggtcgatgagggcttcgaagccgacgacgacgccttcaaggactcccccaaccccagcgagcacggccactcagaccagcgaacaagtggcatccggaccagcgatgactcttcagaggaggacccatacatgaacgacacggtggtgcccaccagccccagtgcggacagcacggtgctgctcgccccatcagtgcaggactccgggagcctacacaactcctccagcggcgagtccacctactgcatgccccagaacgctggggacttgccctccccagacggcgactacgactacgaccaggatgactatgaggacggtgccatcacttccggcagcagcgtgaccttctccaactcctacggcagccagtggtcccccgactaccgctgctctgtggggacctacaacagctcgggtgcctaccggttcagctctgagggggcgcagtcctcgtttgaagatagtgaagaggactttgattccaggtttgatacagatgatgagctttcataccggcgtgactctgtgtacagctgtgtcactctgccgtatttccacagctttctgtacatgaaaggtggcctgatgaactcttggaaacgccgctggtgcgtcctcaaggatgaaaccttcttgtggttccgctccaagcaggaggccctcaagcaaggctggctccacaaaaaaggggggggctcctccacgctgtccaggagaaattggaagaagcgctggtttgtcctccgccagtccaagctgatgtactttgaaaacgacagcgaggagaagctcaagggcaccgtagaagtgcgaacggcaaaagagatcatagataacaccaccaaggagaatgggatcgacatcattatggccgataggactttccacctgattgcagagtccccagaagatgccagccagtggttcagcgtgctgagtcaggtccacgcgtccacggaccaggagatccaggagatgcatgatgagcaggcaaacccacagaatgctgtgggcaccttggatgtggggctgattgattctgtgtgtgcctctgacagccctgatagacccaactcgtttgtgatcatcacggccaaccgggtgctgcactgcaacgccgacacgccggaggagatgcaccactggataaccctgctgcagaggtccaaaggggacaccagagtggagggccaggaattcatcgtgagaggatggttgcacaaagaggtgaagaacagtccaaagatgtcttcacttgaaactgaagaaacggtggtttgtactcacccacaattccgtgcattactacaagagttcagagaagaaccgccgctcaaactgggggaccctggtcctccaacagcctctgctctggtcgtccccccagatgagaagatattcaaagagacaggctactggaacgtcaccgtgtacgggcgcaagcactgttaccggctctacaccaagctgctcaacgaggccacccggtggtccagtgccattcaaaacgtgactgacaccaaggccccgatcgacacccccacccagcagctgattcaagatatcaaggagaactgcctgaactcggatgtggtggaacaaatttacaatgcggaaccccgatccttcgatacacccatcaccccttgcactccccgctcctgccccttccgtatggggacataaatctcaacttgctcaaagacaaaggctataccacccttcaggatgaggccatcaagatattcaattccctgcagcaactggagtccatgtctgacccaattccaataatccaggtcatcctacagacagggcatgacctgcgacctctgcgggacgagctgtactgccagcttatcaaacagaccaacaaagtgccccaccccggcagtgtgggcaacctgtacagctggcagatcctgacatgcctgagctgcaccttcctgccgagtcgagggattctcaagtatctcaagttccatctgaaaaggatacgggaacagtttccaggaaccgagatggaaaaatacgctctcttcacttacgaatctcttaagaaaaccaaatgccgagagtttgtgccttcccgagatgaaatagaagctctgatccacaggcaggaaatgacatccacggtctattgccatggcggcggctcctgcaagatcaccatcaactcccacaccaccgctggggaggtggtggagaagctgatccgaggcctggccatggaggacagcaggaacatgtttgctttgtttgaatacaacggccacgtcgacaaagccattgaaagtcgaaccgtcgtagcgtgatgtcttagccaagtttgaaaagctggctgccacatccgaggttggggacctgccatggaaattctacttcaaactttactgcttcctggacacagacaacgtgccaaaagacagtgtggagtttgcatttatgtttgaacaggcccacgaagcggttatccatggccaccatccagccccggaagaaaacctccaggttcttgctgcccgtgcaactccagtatctgcagatggattatactctgcaggctgccatcccacctctcgaagaggtttattccctgcagagactcaaggcccgcatcagccagtcaaccaaaaccttcaccccttgtgaacggctggagaagaggcggacgagcttcctagaggggaccctgaggcggagcttccggacaggatccgtggtccggcagaaggtcgaggaggagcagatgctggacatgtggattaaggaagaagtctcctctgctcgagccagtatcattgacaagtggaggaaatttcagggaatgaaccaggaacaggccatggccaagtacatggccttgatcaaggagtggcctggctatggctcgacgctgtttgatgtggagtgcaaggaaggtggcttccctcaggaactctggttgggtgtcagcgcggacgccgtctccgtctacaagcgtggagagggaagaccactggaagtcttccagtatgaacacatcctctcttttggggcacccctggcgaatacgtataagatcgtggtcgatgagagggagctgctctttgaaaccagtgaggtggtggatgtggccaagctcatgaaagcctacatcagcatgatcgtgaagaagcgctacagcacgacacgctccgccagcagccagggcagctccaggtctaaacacagatctgcagctgtctccactgctcttgtagacactgagtgtgacttcaagaaagcaaaagaagggactgaaatacaaactaccatcagagaatactataaacacctctacgcaaataaagtagaaaatctagaagaaatggataaattcctcgacacatacactctcccaagactaaaccaggaagaagttgaatctctgaatagaccaataacagactctgaaattgaagcaataattaatagcttaccaaccaaaaaaagtccaggaccagatggattcacagccgaattctaccagaggtacaaggaggagctggtaccattccttctgaaactattccaatcaatagaaaaagtgggaatcctccctaactcattttatgaggccagcatcatccgataccaaagcctggcagagacacaaccaaaagagaattttagaccaatatccctgatgaacatcgatgcaaaaatcctcagtaaaatactggcaaaccaaatacagcagcacatcgaaaagcttatccaccacgatcaagtgggcttcatccctgggatgcaaggctggttcaacatatgcaaatcaataaacataatccagcatataaacagaaccaatgacaaaaaccatatgattatctcaatagatgcagaaaaggcctttgacaaaattcaacaacgcttcatgctaaaaactctcaataaattagtgttggaagtcctggccagggcaatcaggcagcagaaggaaataaagggtattcaactaggaaaagaggaaatcaaattgtccctgtttgcagatgacatgattgtatatctagaaaaccccatcgtctcagcccaaaatctccttaagctgataggcaacttcagcaaagtctcaggatacaaaatcaatgtgcaaaaatcacaagcattcttatacaccaataacagacaaacagagagccaaatcatgagcaaactcctattcacaattgcttcaaagagaataaaatacctaggaatccaacttacaagggacgtgaagggcctcttcaaggagaactacaaaccactgcttaacgaaatcaaagaggatacaaacaaatggaagaatattccatgctcatgggtaggaagaatcaatatcgtgaaaatggccatactgcccaaggtaatttatagattcaatgccatccccaatgactttcttcacagaattggaaaaaactactttaaagttcatatggaaccaaaaagagcccacattgccaagtcaatcctaagccaaaagaacaaagctggaggcatcacgctacctgacttcaaactatactataaggctacagtaaccaaaacagcatggtactggtaccaaaacagagatatagaccaatggaacagaacagagccctcagaaataacgctgcatatctacaaccatctgatctttgacaaacctgacaaaaacaagaaatggggaaaggattccctatttaataaatggtgctgggaaaactggctagccacatgtagaaagctgaaactggatcccttccttacaccttatacaaaaattaattcaagatggattaaagacttaaatgttagacctaaaaccataaaaaccctagaagaaaacctaggcattaccattcaggacataggcatgggcaaggacttcatgtctaaaacaccaaaagcaatgggaacaaaagccaaaattgacaaatgggatctaattaaactaaagagcttctgcacagcaaaagaaactaccatcacagtgaaaaggcaacctacagaatgggagaaaatttttgcaatctactcatctgacaaagggctaatatccagaatctacaatgaactcaaacaaattcacaagaacaaccaaccccatcaaaaagtgggcgaaggatatgaacagacacttctcaaaagaagacatttatgcagccaaaagacatga

SEQ ID NO: 124739 - DNA, 5713 bp, Homo sapiens
attgattctgtgtgtgcctctgacagccctgatagacccaactcgtttgtgatcatcacggccaaccgggtgctgcactgcaacgccgacacgccggaggagatgcaccactggataaccctgctgcagaggtccaaaggggacaccagagtggagggccaggaattcatcgtgagaggatggttgcacaaagaggtgaagaacagtccaaagatgtcttcactgaaactgaagaaacggtggtttgtactcacccacaattccctagattactacaagagttcagagaagaacgcgctcaaactggggaccctggtcctcaacagcctctgctctgtcgtccccccagatgagaagatattcaaagagacaggctactggaacgtcaccgtgtacgggcgcaagcactgttaccggctctacaccaagctgctcaacgaggccacccggtggtccagtgccattcaaaacgtgactgacaccaaggccccgatcgacacccccacccagcagctgattcaagatatcaaggagaactgcctgaactcggatgtggtggaacagatttacaagcggaacccgatccttcgatacacccatcaccccttgcactccccgctcctgccccttccgtatggggacagtaaatctcaacttgctcaaagacaaaggctataccacccttcaggatgaggccatcaagatattcaattccctgcagcaactggagtccatgtctgacccaattccaataatccagggcatcctacagacagggcatgacctgcgacctctgcgggacgagctgtactgccagcttatcaaacagaccaacaaagtgccccaccccggcagtgtgggcaacctgtacagctggcagatcctgacatgcctgagctgcaccttcctgccgagtcgagggattctcaagtatctcaagttccatctgaaaaggatacgggaacagtttccaggaaccgagatggaaaaatacgctctcttcacttacgaatctcttaagaaaaccaaatgccgagagtttgtgctttcccgagatgaaatagaagctctgatccacaggcaggatatgacatccacggtctattgccatggcggcggctcctgcaagatcaccatcaactcccacaccacctgctggggaggtggtggagaagctgatccgaggcctggccatggaggacagcaggaacatgtttgctttgtttgaatacaacggccacgtcgacaaagccattgaaagtcgaaccgtcgtagctgatgtcttagccaagtttgaaaagctggctgccacatccgaggttggggacctgccatggaaattctacttcaaactttactgcttcctggacacagacaacgtgccaaaagacagtgtggagtttgcatttatgtttgaacaggcccacgaagcggttatccatggccaccatccagccccggaagaaaacctccaggttcttgctgcccatgcgacatccagtatcatgcagggggattatacatctgcacgcatgccatcccacctcatcgaagaggtttattccctgcagagactcaaggcccgcatcagccagtcaaccaaaaccttcaccccttgtgaacggctggagaagaggcggacgagcttcctagaggggaccctgaggcggagcttcccggacaggatccgtggtccggcagaaggtcgaggaggagcagatgctggacatgtggattaaggaagaagtctcctctgctcgagccagtatcattgacaagtggaggaaatttcagggaatgaaccaggaacaggccatggccaagtacatggccttgatcaaggagtggcctggctatggctcgacgctgtttgatgtggaggtgagaactggctgccatgtgttggggtgggctgggtgctggcatctgagaacatggatcacggccaagttcatgtggagagaagacaagatggagcattttgctctctcaacctctttttttcgagcccccaaaattgtaccattaacgcctcccttctcctcacagtttctcttctcctgtgtagtaaatgcatctgtaatattaggaatgaatgcaaaattaagatgtcatctattcttctacccttccttagggaagctatagatctaattttttaaacactgataaaaatctacatttaaaaaaatgttatagctgtatatacaaattagaaactttggatatacttgcattttactttgttttttctttacagccatctgtttgaaaggaagaatgtctatctcgtaatggaatttagccattggcatcaacccagtactgatttttgttttgttttaagtagaccgcttattgaaaagaaatcttactaattgtctagatgagagtttggcaaactggtctgtgggtcagatcttgcctgcctcctttttttctaaacaaagttttattggaacacagccaagctcattcctttagatatattccctggctgtttttgtacagagttgagtagttgtgacagagaccatgtgatccacaaagtctaaaaatctttactatgcagcccttaacagataagtgtgccagctcatcgtctagattagcttccattttttatgatcacagtaattcagcgtatatctgatgactttatattgaggctgtataaaattctaaatattataaattctagaatccgtgggtggcttttcattaggtgatgtttttgattggtttggttggttcaattatgcctgtttttaagtataaaaaaatcaggtgctttgtacaaagccataattccatttctccctgacaaggaatagataatagcagttaaactcttggcttcctgcaaaacgtgagctgtgaattagcatagaaagctactggcttggccgggcgcggtggctcactcctgtaatcccagcactttgggaggccaaggcgggcggatcatgaggtcaggagatcgagaccatcctggctaacacggtgaaaccccatctctactaaaaatacaaaaaaaaaaattagacttgcgtggtggcatgcacctgtaatcccagctactcgagaggctgagacaggagaatcgcttgaactcaggaggtggaggttgcagtgagccaggatcacgccactgcactccagcctgggcgacagagtgagactccgtcaaaaaaaaaaagaaaaaaagaaagctactggcttttgcatggaggatgcagagaatgtctggttattagggatataaactagagactcttttcagcgtctccaatttatagccctcctgcttgtccaggtttggatcagccctgtgttgttagccccttcatatggggtcttattttcttccaccaatctgtacaggaaagtctacagttaaactggtaaagtccctgttcccactctgcatatggaaggccattgctgctccttgtgaagaggagccagaactgctcagcatgcgtgatttggagaattttcctctgtgatcctagattttgtatttgaagactaaccatccgcaaagaggattggaggcagaactggagatattaatacaagagtagacttggcttgggttgcagggaagctttcttaagtcccccggccaagcatgtacgtttccaggccacttccacgtagctaatccaaacagctagtagaataatgctgagaagtggagagtcaaagcaagatgttagactctgccagttagtgaggttttcccaaaagcgtgagattaactagttagaaatcaagatagccagagaggtgccatttttcatatttcaggcccctccatgcatgcatgcacatcgaatatatttaatcttctgcacagaggacttcactcaaagcctgtcttatggtttagatgctttctgttgccaaccacttcatgacttaactcttctgttgactcttgcccaccagtgcaaggaaggtggcttccctcaggaactctggttgggtgtcagcgcggacgccgtctccgtctacaagcgtggagagggaagaccactggaagtcttccagtatgaacacatcctctcttttggggcacccctggcgaatacgtataagatcgtggtcgatgagagggagctgctctttgaaaccagtgaggtggtggatgtggccaagctcatgaaagcctacatcagcatgatcgtgaagaagcgctacagcacgacacgctccgccagcagccaagggcagctccaggtgaaggcgggacagagcccacctgtcttttgctacctgaacgcaccaccctctgggcctaggctggctccagtgtgccatgcccagccaaaacaaacacagagctgcccaggctttctggaagcttctggtctgagggaggtgtctccgaggatccttttgcctgccgccttcattgatcctgtattaagctgtcaactttaacaagtctgcacagttttcaaaagctttacttacttcttaggaggacacatggccttaaaaaaagggagggggaggaaccacggttgccaccaaagcagccggaagtggccttaacttgtggaaccaacactaaatcgaccgtaactgtgctactgaaggggaactgcctttcccccttctggggaagaacttaacagagcgtggaaggggggcattctctgtcaatgatgcactaacctcccaacctgattttccccgaatctggagggaaggtgaggggagtgggaagggggatggagagctcgaggggacagtgtgtttgagctggaggtctgcgggcagcctttctcatggaatgacatgaatcaacttttttctttgtttcatcttttaagtgtaccgtgcttgcctgttcggtgcatgtgttcataaactccaacaccttaatccatggtttccatggagcattaaaaagcaaagggaaaaaggatgtgtaatggtgtacacagtctgtatattttaataatgcagagctactacgtctcaattgttactttataaggtggttttattaacaaacccaaatcctggattttcctgtctttgctgtattttgaaaaacacgttgtttgactccattgttttacatgtaagcaaagtctgccatctgtgtctgctgtattataaccagataagcagcctacaggataactgtatttataaacccactcttccaaccagctggctcccagtgctggtttttagaaccaggaatgaagtcattttggagtcttttccatgtctaaaaagatttaagttaaaaaaccaaagtgttacttggaaggttagcttctatccattctgggataagattacagatataaataacccatgttgacctatgggggagagacgctgcattcccaggaaacggtctttaaccacttggagggaatcttcaaaggacccttgacattaaatgctgaggctttaatacaccacatattttatcccccaagtttataaatggtggtctgaacaaggcacctgtaaataaatcagcatttatgaccagaagaaaaataatctggtcttggactttttatttttatatggaaaagttttaaggacttgggccaactaagtctacccacacgaaaaaagaaatttgccttgtccctttgtgtacaaccatgcaaaactgtttttttggtccccggaagttctgacaataaaagatactagctaaaaaaaaaaaaaaaaa

SEQ ID NO: 124740 - DNA, 672 bp, Homo sapiens
cctgaaagatgctacgaaaccgtatgaatggacatagttcaagatgccactttcgtgtatgccacactgcagactgctcactaccaccgagatgccggcctccctgtctacctgtatgaatttgagcaccacgctcgtggaataatcgtcaaaccccgcactgatggggcagaccatggggatgagatgtacttcctctttgggggccccttcgccacaggtgcaaaggtcccacctgataccccaactgggtgtccagtctcccacctctggatgcagacccacccctccattggctggccacagggagctcaccagttcctaatctgttatgctctcccaaatgaaagtcttctgctccggaagcagcagaagcagcaggagtagggtgggagaaaccccaatgatgggaatctgccctgctggccacgctacaacaaggatgaaaagtacctgcagctggattttaccacaagagtgggcatgaagctcaaggagaagaagatggctttttggatgagtctgtaccagtctcaaagacctgagaagcagaggcaattctaagggtggctatgcaggaaggagccaaagagggtttgcccccaccactccaaagtctatacacaggggtggtctcttcaataaagaagtgttgattagacctgaaaaaaa

SEQ ID NO: 124741 - DNA, 816 bp, Homo sapiens
cttgagttcgctgaccctagtgcagtgtggtggaattcgacccacccctccattggctggccacagggagctcaccagttcctaatctgttatgctctcccaaatgaaagtcttctgctccggaagcagcagaagcagcaggagtagggtgggaggtcagtgtcccctgctctgtccgaaatcccacatcccattctgcccccaggcctttccatgggtaaggagaaggcacttagcctccagatgatgaaatactgggccaactttgcccgcacaggaaaccccaatgatgggaatctgccctgctggccacgctacaacaaggatgaaaagtacctgcagctggattttaccacaagagtgggcatgaagctcaaggagaagaagatggctttttggatgagtctgtaccagtctcaaagacctgagaagcagaggcaattctaagggtggctatgcaggaaggagccaaagaggggtttgcccccaccatccaggccctggggagactagccatggacatacctggggacaagagttctacccaccccagtttagaactgcaggagctccctgctgcctccaggccaaagctagagcttttgcctgttgtgtgggacctgcactgccctttccagcctgacatcccatgatgcccctctacttcactgttgacatccagttaggccaggccctgtcaacaccacactgtggctcagctctccagcctcaggacaaactcttttttttccccttcttcaaaatcctcccaaccttccaatgtctccttgtgaatcccttctttatgggaggttg

SEQ ID NO: 124742 - DNA, 1532 bp, Homo sapiens
ccgctacctggtgcccgcaggtgcctgcatgagttctggggccagctggcctcgatgtacgtcagcacgcgggaacggtacaagtggctgcgcttcaacgaggactgtctgtacctgaacgtgtacgcgccggcgcgcgcgcccggggatccccaactgccagtgatggtctggttcccgggaggcgccttcatcgtgggcgctgcttcttcgtacgagggctctgacttggccgcccgcgagaaagaggggctggtgtttctgcaacacaggctcggcatcttcagcttcctgagcacggacgacagccacgcgcgcgggaactgggggctgctggaccagatgggcggctctgcgctgggtgcaggagaacatcgcagcctttcgggggagacccagggaaattttgaccctgttcggccagtcggcgggggccatgagcatctcaggactgatgatgtcacccctagcctcgggtctcttccatcgggccatttcccagagtggcaccgcgttgttcagacttttcatcactcgtaacccactgaaagtggccaagaaggttgcccacctggctggatgcaaccacaacagcacacagatcctggtaaactgcctgagggcacttatcagggaccaaggtgatgcgtgtgtccaacaagatgagattcctccaactgaacttccagagagacccggaagagattatctggtccatgagccctgtggtggatggtgtggtgatcccagatgaccctttggtgctcctgacccaggggaaggtttcatctgtgccctaccttctaggtgtcaacaacctggaattcaattggctcttgccttatatcatgaagttcccgctaaaccggcaggcgatgagaaaggaaaccatcactaagatgctctggagtacccgcaccctgttggccaaaaactcctggggggctgagcatggatccaagtcactggtgggcccacctctggcccagctggcacccaggcctcagaatatcaccaaggagcaggtaccacttgtggtggaggagtacctggacaatgtcaatgagcatgactggaagatgctacgaaaccgtatgatggacatagttcaagatgccactttcgtgtatgccacactgcagactgctcactaccaccgagatgccggcctccctgtctacctgtatgaatttgagcaccacgctcgtggaataatcgtcaaaccccgcactgatggggcagaccatggggatgagatgtacttcctctttgggggccccttcgccacaggcctttccatgggtaaggagaaggcacttagcctccagatgatgaaatactgggccaactttgcccgcacaggaaaccccaatgatgggaatctgccctgctggccacgctacaacaaggatgaaaagtacctgcagctggattttaccacaagagtgggcatgaagctcaaggagaagaagatggctttttggatgagtctgtaccagtctcaaagacctgagaagcagaggcaattctaa

SEQ ID NO: 124743 - DNA, 2614 bp, Homo sapiens
ccggtaccgaattgcagtttcgacctagacccacgcgggcgaaaataacatgaaacatgagatagcgttctgcatgaagtgaaatgaaaaatagatgctgggaaggatgtctaactgggagatagcttgcgatgtaaatatgtaaatatattatgaatgaccagtgggcaaggcaaaattgcctacacagccctacctatggcccctctgaaaatgttctttcttcagcagaatcgaagccagaaattcaacttagtccctcctgccctctgattttctccagtcagcaagctctcagccaacatgtgtggctgagtcatctctctcagctgttttcaagtttatgggcaggaaaatcctctccacctgggaaaacactatccagaagatcagaaacaacagcaggatccattctgctttagtggcaaagcagaatggattcaagagggagaagactccagactcctgtttgggagagtaagcaaaaatggcacttcaaaggcactttccagcccacctgaagaacaacagccagcacagtccaaggaagacaacacagtggtggatatagggtccagccctgaacggagggcagatctagaggaaacagacaaagtattgcatggtttagaagtctcaggatttggagaaatcaaatatgaagagtttgggccaggctttatcaaggagtcaaacctccttagcctccagaagacacaaactggggagacaccttacatgtacactgagtggggagacagctttggcagtatgtcagtcctcatcaaaaacccaaggacacactctgggggaaagccttatgtgtgcagggaatgtgggcgaggctttacgtggaagtcaaacctgatcacacatcagaggacacactcaggggagaaaccttatgtgtgcaaggattgtggacgaggctttacttggaagtcgaacctctttacacatcagcggacacactcagggctcaagccttatgtgtgcaaggaatgtgggcagagctttagcctgaagtcaaacctcattacccaccagagggcgcacactggggagaagccttatgtttgcagggaatgtgggcgtggctttcgccagcattcacacctggtcagacacaagaggacacattcaggagagaagccttacatttgcagggagtgtgagcaaggctttagccagaagtcacacctcatcagacacttaaggacacacacaggagagaagccttatgtatgcacagaatgtgggcgtcactttagctggaaatcaaacctcaaaacacaccagaggacacactcaggggttaaaccttatgtctgcctggagtgcgggcagtgctttagcctgaagtcaaaccttaacaaacaccaagaggtcacacacgggggagaagccatttgtatgtacggagtgtgggcgaggctttacccggaaatcaaccctgatcacgcaccagaggacacactcaggggagaagccatttgtatgtgctgagtgtggacgaggctttaatgataagtccaccctcatttcacaccagaggacacattcaggggaaaagccttttatgtgcagggagtgtggcagaaggtttcggcagaagcctaacctgtttaggcacaagagggcacactcaggtgcctttgtgtgcagggagtgtgggcaaggcttttgtgctaagttaactctcattaaacaccagagagcacacgcaggggggaagcctcatgtgtgcagggagtgtgggcaaggctttagccggcagtcacacctcattagacaccagaggacacattcaggagagaagccttatatttgcagaaagtgtggacggggctttagtcggaagtccaaccttatcagacatcagaggacacactcaggatagaaactttatgtgtatagggaatgtggtacagcctttagccaggagtcatacttcatcagacaccagaggacacacacagtgctgtggctttttcagccattgctagataccaaagtggagacattctgtgtgtgattatgcatgagaactgtactggtaagacttgtatctccatccacctgaaggagaatttgctggctcattttcaggagccctgcccttcctcactgtgggatggtgggttgtggaaacccggtcaggtaatgatagtggcaggaggcagtcaaaatgcccagggcagataggggtgtggtatcctgtgtggaaaccccaacctctaaagcttgaaggacaagtcccgggctaacatcctcaatactgaatttgaggaacctgtcttccccatttggtgggctttccctccgattgatccccccccccttcacctattttacgtatacctgccctttcctaattggtttttacactgctgtgcccaccttttgagtggtgcctttgcatacttacaaatcagtcaacgtgtattcccctattctgagcccataaaagacccagactcagctgcagtgaggagagaaatcaccctgctgtgggggttggggaccactccctgcatcccctctccactgagagctgttcttttgctcaataaaattcttttctacccatcctccccaaaaaaaaaaaaaaaaa

SEQ ID NO: 124744 - DNA, 451 bp, Homo sapiens
  misc_feature (1)...(451): n = a,t,c or g
aactttccaacagccagggtatggaggttggtttaccccctttaccccttaaaaatttttattttccctaaaggctttaaattttggagggaggttgggccaatatggccccccccaaaaagaagggttctttccaaaaaatcccagggaggtttttaaatggccccctataaggaaaaaaatattaccttgccagcccgggtaaaatttgggccccccaagggttctttaaaacgggcgccccnnnnnnnnnnnnnngaggttattttcacaagacatagctataatttgtaaaacattcagactattgaaagatcacattcaaattatatttctaagaatagagccatatatgaacagagagcaaaacaagctaatacattaatgaatattcactgaattcttcatactgcacaggacacaaatttggtatttgcacatgttgtcaatt

SEQ ID NO: 124745 - DNA, 422 bp, Homo sapiens
  misc_feature (1)...(422): n = a,t,c or g
cttcctgggcttgtgccatccaccctactggttatctgatagaacaagctggtggctgatgggtgactgctaggcgtgactgaggtaatagatgaaaagtgttctatgttatcacattggttttcctgtacctttggttactctacgtcatgaccagctgctgcctatgacaaaattgatgtttacaggcctgctttttgcttataattgacaacatgtgcaaaaataccaaatttgtgtcctgtgcagtatgaagaattcagtgaatattcattaatgtattagcttgttttgctctctgttcatatatggctctattcttagaaatataatttgaatgtgatctttcaatagtctgaatattttacaaattatagctatgtcttgtgaaaataacctcaaaaagaaaaatacgactctgn

SEQ ID NO: 124746 - DNA, 4260 bp, Homo sapiens
atgttacgacgctaccgccctgacatcaccagttgccatggtagcaccgccgagagtaaaggaggggtggtgctagacgtttcgggcagagctcggccgctgcggaggacaaggaactctccctctcccactagtctgacttcttccaaaatgagcggcctggatgggggcaacaagctccctctcgcccaaaccggcggcctggctgctcccgaccatgcctcaggagatccggaccgagaccagtgccaagggctccgtgaagaaaccgaggcgacacaggtgatggcgaacacaggtgggggcagcctggagaccgttgcggaggggggtgcatcccaggatcctgtcgactgtggccccgcgctccgcgtcccagttgccgggagtcgcggcggtgcagcgaccaaagccgggcaggaggatgctccaccttctacgaaaggtctggaagcagcctctgccgccgaggctgctgacagcagccagaaaaatggctgtcagcttggagagccccgtggccctgctgggcagaaggctctagaagcctgtggcgcagggggcttggggtctcagatgataccggggaagaaggccaaggaagtgacgactaaaaaacgcgccatctcggcagcagtggaaaaggagggagaagcaggggcggcgatggaggaaaagaaggtagtgcagaaggaaaaaaaggtggcaggaggggtgaaagaggagacacggcccagggccccgaagatcaataactgcatggactcactggaggccatcgatcaagagttgtcaaacgtaaatgcccaggctgacagggccttccttcagcttgagcgcacagtttggccgcatgcgaaggctccacatgcagcgcataagtttcattatccagaatatcccaggtttctgggttactgcctttcgaaaccacccccagctgtcacctatgatcagtggccaagatgaagacatgctgaggtacatgatcaatttggaggtggaggagcttaaacaccccagagcaggctgcaaattcaagttcatctttcagggcaacccctacttccgaaatgaggggcttgtcaaggaatatgaacgcagatcctctggccgggtggtgcctttttccactccaatcccgctggcacctgagggcaagaacccccaggctcatatccacagaaaccgggaagggaacactatccctagtttcttcaactggttttcagaccacagccttctagaattcgacagaattgcagagattatcaaaggagaactgtggcccaatcccctacaatactacctgatgggtgaagggccccgtagaggaattcgaggcccaccaaggcagccagtggagagcgccagatccttcaggttccagtctggctaatctctgtcctgtgagaagcttctgcacaagtttccttaccacctcctcttggacctatgcttggccaacagcatgcagtcttccatctgctttctcttcatactgtggattatcttttcctttggttctaaatcttcagtaatcggttgcaagattgttggcttacctgcctgtgccattcttcctctgggccttcatgcttttctgcattgtgttaacatgtttcaagtgcatggccttctacggcttctatgccaagcgtatgatactatagatatagtgtaccatactgcctttctttgcatggcttggaccctatctgtgaccatgctcttctcccaatttaagtggttctgtaccacaaagaatcttgatacattttcacaaataactgattgggcttcatactttatgctggctgtgtcctgatacccatgtacttatggtaagctatttgggtattaccactgcaagacaaaactgatatcttaacccggccatcaacccaaattggacattccagactaccaccaactggatcccagctgccttcctgggcttgtgccatccaccctactggttatctgatagaacaagctggtggctgatgggtgactgctaggcgtgactgaggtaatagatgaaaagtgttctatgttatcacattggttttcctgtacctttggttactctacgtcatggaccagctgctggtgagtatgaagcctgtgctatagcccacccctactcactctcaccttctggttgaactttgcttaggccaccattgtctgcctcatcaggaactatctgtagacgtagctcccagggagctcacagcaacaccccctacccccaggatgggcagtaatatgtgacagagcccaaagcaaggctgggaacgcagtcccttccagcttagtctttctgactcctagccaacaaaccatccttaatgtgagcaacttctttaggcatttcctcttttccccgcctgcacccactctgaacatgacaaaagttgccagagttggggcattgaggaagagatatttctggaatgtgagacttgttatgcctctgtctctttctctccctcctcctcccctctccctccccctctccctcccatcccttttcttccctttcactctgaagcagttttagcttattaacagaaaacaaaactggcaaagcaggctttttgtttaatttgctctttccctgattgtgttcagagagaaaggttatgattaaatgggctccagatctcttattgcccttattcctccaccccacttcttttagcaaggtctgaaagtttcaaagggagacctataggttaattgtttagttataggcagtgttaaattaggcagattttgacatatttatctttttaccccatccattctaccaaaacctgtgtatttcttgagtttttagtttgagaagctggaaagagagagaagggcctcacagtgatgggttcaggacgggtcaaaactctaaggcctttgtggatgtgagcaaaggcaaccaaaacttagcctcactccacttttctaaagatggaaattccttttttgggccttggactgcttctagggtaacatctcgtaggacactcttctactttgtactactttgcacctgccctgatgtcccttgggcctccatcctactgcctggctttcttggccctcatttctcagcttctgcatttccttccctgctcccaacaaaatgaagaagcaggcttgcagcctaggtttttgttgggaagatctccagcctccttgtaggggataaggggatgtgcagcatctgtgtggattttcacggacaagttccagtaggtgggacagtgatgccgtcaaggcttaagttatgatcatgtgtgggtgataaagaccatccaccatcacccttttcccctttgggttttgaagggccttgcccttaaggttacctgagggtttagggaggtcttgaacacaacacagttggagaggtttaatctaagggttggggaaactgagtaaaagtccagagcaggaattgagcctgctgtggcgtgggtttgtgaaaggcttcacaggaaagaacctgcaggatcaggggtgggaggggaggcccctggaggtgctcttccagggaagaggggctggggtttaaaattagcatgcttggaggaagattttccttcaatttttcctaaagtccttgaatttcaccagtagattttttgtaaacaaaaatgaaaggtgatgttttctcccaaattatcctaggagtgacctttatatgtgtggaagattaatggtatatgctccttatgtcactgtttttgagtaaaatccatttcctttctctgtttcagcctatgacaaaattgatgtttacaggcctgctttttgcttataattgaccaaccatgtgccaaaaatccccaaatttgtgtccctgtgccagtaatgaagaattcagtgaatattccattaatgtattagcttgttttgctctctgttcatatatggctctattcttagaaatataatttgaatgtgatctttcaatagtctgaatattttacaaattatagcctatgtccttgtgaaaataaccctcaaaaagaaaaatacgacctctgttgtccttaccttgatatttccttgcccctaggaatggtacttgaccatttatgttcctaagcagtgtaagtaccagtagaatttctctgtcaaactcgaatgatcatttagtacttttgtcttctcccatgtgcttgaaggaaaaataaagtgtcactaccgtatattcttgatttcatcaaaaaataaaaataatttaaaaaattc

SEQ ID NO: 124747 - DNA, 463 bp, Homo sapiens
catcgagacctctagaattgacggcgtatgcaagcgcgctccgggcgggcttctttttagtgctggggcttttgggtcattctcacggaggattccccaacaccatcagcataggtggacttttcatgagaaacacagtgcaggagcacagcgctttccgctttgccgtgcagttatacaacaccaaccagaacaccaccgagaagcccttccatttgaattaccacgtagatcacttggattcctccaatagtttttccgtgacaaatgcttgtcctgctgaaagggactacctgccttggccaggaagcatcagggaaaacaattggacagctctgccgtgctgcaaagatcatgggctgctgcacctaaaatgttcaccaggtggggcccgccaaaactgggcctattgtatctggggcgttacaggtgaactgtaagatgagaacaagatcacaagtcc

SEQ ID NO: 124748 - DNA, 3283 bp, Homo sapiens
cggacaggagccattgtgggcgagagcaagttaaggggagggggtgtaagagccagcgaataagagagagagtaagagggagagagaagaagaggaagaagaggaggcggcggcagcggaggaggaggaggactagtgtggggtggaaaggaagagtgagcgagagcaagttaaggggagggggtgtaagagccagcgaattctttttctttttctattattattttgacgactcctgagttgcgcccatgctcttgtcagcttcgttttaggcgtagcatggccaggcagaagaaaatggggcaaagcgtgctccgggcggtcttctttttagtcctggggcttttgggtcattctcacggaggattccccaacaccatcagcataggtggacttttcatgagaaacacagtgcaggagcacagcgctttccgctttgccgtgcagttatacaacaccaaccagaacaccaccgagaagcccttccatttgaattaccacgtagatcacttggattcctccaatagtttttccgtgacaaatgctttctgctcccagttctcgagaggggtgtatgccatctttggattctatgaccagatgtcaatgaacaccctgacctccttctgtggggccctgcacacatcctttgttacgcctagcttccccactgacgcagatgtgcagtttgtcatccagatgcgcccagccttgaagggcgctattctgagtcttctgggtcattacaagtgggagaagtttgtgtacctctatgacacagaacgaggattttccatcctccaagcgattatggaagcagcagtgcaaaacaactggcaagtaacagcaaggtctgtgggaaacataaaggacgtccaagaattcaggcgcatcattgaagaaatggacaggaggcaggaaaagcgatacttgattgactgcgaagtcgaaaggattaacacaattttggaacaggttgtgatcctagggaaacactcaagaggttatcactacatgctcgctaacctgggttttactgatattttactggaaagagtcatgcatgggggagccaacattacaggtttccagattgtcaacaatgaaaaccctatggttcagcagttcatacagcgctgggtgaggctggatgaaagggaattccctgaagccaagaatgcaccactaaagtatacatctgcattgacacacgacgcaatactggtcatagcagaagctttccgctacctgaggaggcaacgagtagatgtgtcccggagaggaagtgctggagactgcttagcaaatcctgctgtgccctggagtcaaggaattgatattgagagagctctgaaaatggtgcaagtacaaggaatgactggaaatattcaatttgacacttatggacgtaggacaaattataccatcgatgtgtatgaaatgaaagtcagtggctctcgaaaagctggctactggaacgagtatgaaaggtttgtgcctttctcagatcagcaaatcagcaatgacagtgcatcctcagagaatcggaccatagtagtgactaccattctggaatcaccatatgtaatgtacaaaaagaaccatgagcaactggaaggaaatgaacgatatgaaggctattgtgtagacctagcctatgaaatagccaaacatgtaaggatcaaatacaaattgtccatcgttggtgacgggaaatatggtgcaagggatccagagactaaaatatggaacggcatggttggggaacttgtctatgggagagctgatatagctgttgctccactcactataacattggtccgtgaagaagtcatagatttttcaaagccattcatgagcctgggcatctccatcatgataaagaagcctcagaaatcaaaaccaggcgtattctcatttctggatcccctggcttatgaaatctggatgtgcattgtctttgcttacattggagtcagcgtagttcttttcctagtcagcaggttcagtccttatgaatggcacttggaagacaacaatgaagaacctcgtgacccacaaagtcctcctgatcctccaaatgaatttggaatatttaacagtctttggttttccttgggtgcctttatgcagcaaggatgtgatatttctccaagatcactctccgggcgcattgttggaggggtttggtggttcttcaccctgatcataatttcttcctatactgccaatctcgctgctttcctgactgtggagaggatggtttctcccatagagagtgctgaagacttagctaaacagactgaaattgcatatgggaccctggactccggttcaacaaaagaatttttcagaagatccaaaattgctgtgtacgagaaaatgtggtcttacatgaaatcagcggagccatctgtgtttaccaaaacaacagcagacggagtggcccgagtgcgaaagtccaagggaaagttcgccttcctgctggagtcaaccatgaatgagtacattgagcagagaaaaccatgtgatacgatgaaagttggtggaaatctggattccaaaggctatggtgtggcaacccctaaaggctcagcattaggaaatgctgttaacctggcagtattaaaactgaatgagcaaggcctcttggacaaattgaaaaacaaatggtggtacgacaaaggagagtgcggcagccaaggactccgggagtaaggacaagaccagcgctctgagcctgagcaatgtggcaggcgttttctatatacttgtcggaggtctggggctggccatgatggtggctttgatagaattctgttacaaatcacgggcagagtccaaacgcatgaaactcacaaagaacacccaaaactttaagcctgctcctgccaccaacactcagaattatgctacatacagagaaggctacaacgtgtatggaacagagagtgttaagatctagggatcccttcccactggaggcatgtgatgagaggaaatcaccgaaaacgtggctgcttcaaggatcctgagccagatttcactctccttggtgtcgggcatgacacgaatattgctgatggtgcaatgacctttcaataggaaaaactgattttttttttccttcagtgccttatggaacactctgagactcgcgacaatgcaaaccatcattgaaatctttttgctttgcttgaaaaaaaataattaaaataaaaaccaacaaaaatggacatgcatcaaacccttgatgtattaatatttattatagttttcatta

SEQ ID NO: 124749 - DNA, 1386 bp, Homo sapiens
atggccaggcagaagaaaatggggcaaagcgtgctccgggcggtcttctttttagtcctggggcttttgggtcattctcacggaggattccccaacaccatcagcataggtaagcgcaagcgagccagccgtcggtccaggctctccctcacccgagaccactgccccggcaaggctttccctgcggttttccgagccgagaggagcaccggaggcgagcaggaggctgggatgctgcaagggggtgaagagtcgaggcttttcggctcgctgctctggactttgccatggcgtgcgtgcagctcctggaagttgtcccagggtgatgccgactgtctggccgcgccagggcgcataacccgggcccggggtgctcagtccgtggtctccggctgtcgggagacaggctggtggacttttcatgagaaacacagtgcaggagcacagcgctttccgctttgccgtgcagttatacaacaccaaccagaacaccaccgagaagcccttccatttgaattaccacgaaacatcgccgattcccttgaagtcccctcctgtgtctttctgctgtgcacttgtagtgcactccacactacaccgccccagcctctgcagtgtcagctcattagcacacagatctcatattccctctccgcactgtcattgcaaaaattgctgttgtacacctttacagccaacaaatgtgcttgtggattacgcactgtttgcaagaagcagggaaaaggcaaatgtaaccttaaagctgcctttgaccgaagtcatacccttctgatggtagtgggcctgctgcctgttctgtgtgtggtgtttgctgcaataggtgatttcagcttcaggattttccacagttactgtggaaaattttcagagcccacgtcaggcaagggctgcatcactgatggcagctcagatatcgtcgcatttcctgaattatatcccgtcagctgccactgtggcctggacagtgtacatcaaggttcaccctctttcctcaatcttgaagtgccccctttccacccttccgctgaaggagacctatggccagaagcagcttcccctcaccttgtcacccccacaggtcctgctgaaagggactacctgccttggccaggaagcatcagggaaaacaattggacagctctgccgtgctgcaaagatcatgggctgctgcacctaaaatgttcaccaggtgggcccgccaaaactgggcctattgtatctgggataaggattctggggcacaaagaagttaagtcacttgcccagtcacataactgtacagtacagcactatgatgtcagcatcattagcgtggagaagacaggaaatgttgctgtcagttttagtgtagttactctcttctga

SEQ ID NO: 124750 - DNA, 3232 bp, Homo sapiens
  misc_feature (1)...(3232): n = a,t,c or g
gagtgcggaaccgccgcctcggccatgcggctcccggccggggggcctgggctggggcccgcgccgccccccgcgctccgcccccgctgagcctgagcccgacccggggcgcctcccgccaggcaccatggtgcagaagtcgcgcaacggcggcgtataccccggcccgagcggggagaagaagctgaaggtgggcttcgtggggctggaccccggcgcgcccgactccacccgggacggggcgctgctgatcgccggctccgaggcccccaagcgcggcagcatcctcagcaaacctcgcgcgggcggcgcgggcgccgggaagccccccaagcgcaacgccttctaccgcaagctgcagaatttcctctacaacgtgctggagcggccgcgcggctgggcgttcatctaccacgcctacgtgttcctcctggttttctcctgcctcgtgctgtctgtgttttccaccatcaaggagtatgagaagagctcggagggggccctctacatcctggaaatcgtgactatcgtggtgtttggcgtggagtacttcgtgcggatctgggccgcaggctgctgctgccggtaccgtggctggagggggcggctcaagtttgcccggaaaccgttctgtgtgattgacatcatggtgctcatcgcctccattgcggtgctggccgccggctcccagggcaacgtctttgccacatctgcgctccggagcctgcgcttcctgcagattctgcggatgatccgcatggaccggcggggaggcacctggaagctgctgggctctgtggtctatgcccacagcaaggagctggtcactgcctggtacatcggcttcctttgtctcatcctggcctcgttcctggtgtacttggcagagaagggggagaacgaccactttgacacctacgcggatgcactctggtggggcctgatcacgctgaccaccattggctacggggacaagtacccccagacctggaacggcaggctccttgcggcaaccttcaccctcatcggtgtctccttcttcgcgctgcctgcaggcatcttggggtctgggtttgccctgaaggttcaggagcagcacaggcagaagcactttgagaagaggcggaacccggcagcaggcctgatccagtcggcctggagattctmcgccaccaacctctcgcgcacagacctgcactccacgtggcagtactacgagcgaacggtcaccgtgcccatgtacagttcgcaaactcaaacctacggggcctccagacttatccccccgctgaaccagctggagctgctgaggaacctcaagagtaaatctggactcgctttcaggaaggaccccccgccggagccgtctccaagtaaaggcagcccgtgcagagggcccctgtgtggatgctgccccggacgctctagccagaaggtcagtttgaaagatcgtgtcttctccagcccccgaggcgtggctgccaaggggaaggggtccccgcaggcccagactgtgaggcggtcacccagcgccgaccagagcctcgaggacagccccagcaaggtgcccaagagctggagcttcggggaccgcagccgggcacgccaggctttccgcatcaagggtgccgcgtcacggcagaactcagaagaagcaagcctccccggagaggacattgtggatgacaagagctgcccctgcgagtttgtgaccgaggacctgaccccgggcctcaaagtcagcatcagagccgtgtgtgtcatgcggttcctggtgtccaagcggaagttcaaggagagcctgcggccctacgacgtgatggacgtcatcgagcagtactcagccggccacctggacatgctgtcccgaattaagagcctgcagtccagagtggaccagatcgtggggcggggcccagcgatcacggacaaggaccgcaccaagggcccggccgaggcggagctgcccgaggaccccagcatgatgggacggctcgggaaggtggagaagcaggtcttgtccatggagaagaagctggacttcctggtgaatatctacatgcagcggatgggcatccccccgacagagaccgaggcctactttggggccaaagagccggagccggcgccgccgtaccacagcccggaagacagccgggagcatgtcgacaggcacggctgcattgtcaagatcgtgcgctccagcagctccacgggccagaagaacttctcggcgcccccggccgcgccccctgtccagtgtccgccctccacctcctggcagccacagagccacccgcgccagggccacggcacctcccccgtgggggaccacggctccctggtgcgcatcccgccgccgcctgcccacgagcggtcgctgtccgcctacggcgggggcaaccgcgccagcatggagttcctgcggcaggaggacaccccgggctgcaggccccccgaggggaacctgcgggacagcgacacgtccatctccatcccgtccgtggaccacgaggagctggagcgttccttcagcggcttcagcatctcccagtccaaggagaacctggatgctctcaacagctgctacgcggccgtggcgccttgtgccaaagtcaggccctacattgcggagggagagtcagacaccgactccgacctctgtaccccgtgcgggcccccgccacgctcggccaccggcgagggtccctttggtgacgtgggctgggccgggcccaggaagtgaggcggcgctgggccagtggacccgcccgcggccctcctcagcacggtgcctccgaggttttgaggcgggaaccctctggggcccttttcttacagtaactgagtgtggcgggaagggtgggccctggaggggcccatgtgggctgaaggatgggggctcctggcagtgaccttttacaaaagttattttccaacaggggctggagggctgggcagggcctgtggctccaggagcagcgtgcaggagcaaggctgccctgtccactctgctcaaggccgcggccgacatcagcccggtgtgaagaggggcggagtgatgacgggtgttgcaacctggcaacaagcngggggttgnccagccganccaagggaagcacanaaggaagctgtnccctaagacctncccnaaaggcggcctgtttggtaagactgcgccttggtccggtgggttccggcagcaaaagcgggttttgccgcccctgtcgtg

SEQ ID NO: 124751 - DNA, 3195 bp, Homo sapiens
cggagcgaggtggccgcagcgtctccgcgcgcggcccaagcccggcaggagtgcggaaccgccgcctcggccatgcggctcccggccggggggcctgggctggggcccgcgccgccccccgcgctccgcccccgctgagcctgagcccgacccggggcgcctcccgccaggcaccatggtgcagaagtcgcgcaacggcggcgtataccccggcccgagcggggagaagaagctgaaggtgggcttcgtggggctggaccccggcgcgcccgactccacccgggacggggcgctgctgatcgccggctccgaggcccccaagcgcggcagcatcctcagcaaacctcgcgcgggcggcgcgggcgccgggaagccccccaagcgcaacgccttctaccgcaagctgcagaatttcctctacaacgtgctggagcggccgcgcggctgggcgttcatctaccacgcctacgtgttcctcctggttttctcctgcctcgtgctgtctgtgttttccaccatcaaggagtatgagaagagctcggagggggccctctacatcctggaaatcgtgactatcgtggtgtttggcgtggagtacttcgtgcggatctgggccgcaggctgctgctgccggtaccgtggctggagggggcggctcaagtttgcccggaaaccgttctgtgtgattgacatcatggtgctcatcgcctccattgcggtgctggccgccggctcccagggcaacgtctttgccacatctgcgctccggagcctgcgcttcctgcagattctgcggatgatccgcatggaccggcggggaggcacctggaagctgctgggctctgtggtctatgcccacagcaaggagctggtcactgcctggtacatcggcttcctttgtctcatcctggcctcgttcctggtgtacttggcagagaagggggagaacgaccactttgacacctacgcggatgcactctggtggggcctgatcacgctgaccaccattggctacggggacaagtacccccagacctggaacggcaggctccttgcggcaaccttcaccctcatcggtgtctccttcttcgcgctgcctgcaggcatcttggggtctgggtttgccctgaaggttcaggagcagcacaggcagaagcactttgagaagaggcggaacccggcagcaggcctgatccagtcggcctggagattctacgccaccaacctctcgcgcacagacctgcactccacgtggcagtactacgagcgaacggtcaccgtgcccatgtacagttcgcaaactcaaacctacggggcctccagacttatccccccgctgaaccagctggagctgctgaggaacctcaagagtaaatctggactcgctttcaggaaggaccccccgccggagccgtctccaagccagaaggtcagtttgaaagatcgtgtcttctccagcccccgaggcgtggctgccaaggggaaggggtccccgcaggcccagactgtgaggcggtcacccagcgccgaccagagcctcgaggacagccccagcaaggtgcccaagagctggagcttcggggaccgcagccgggcacgccaggctttccgcatcaagggtgccgcgtcacggcagaactcagaagaagcaagcctccccggagaggacattgtggatgacaagagctgcccctgcgagtttgtgaccgaggacctgaccccgggcctcaaagtcagcatcagagccgtgtgtgtcatgcggttcctggtgtccaagcggaagttcaaggagagcctgcggccctacgacgtgatggacgtcatcgagcagtactcagccggccacctggacatgctgtcccgaattaagagcctgcagtccagagtggaccagatcgtggggcggggcccagcgatcacggacaaggaccgcaccaagggcccggccgaggcggagctgcccgaggaccccagcatgatgggacggctcgggaaggtggagaagcaggtcttgtccatggagaagaagctggacttcctggtgaatatctacatgcagcggatgggcatccccccgacagagaccgaggcctactttggggccaaagagccggagccggcgccgccgtaccacagcccggaagacagccgggagcatgtcgacaggcacggctgcattgtcaagatcgtgcgctccagcagctccacgggccagaagaacttctcggcgcccccggccgcgccccctgtccagtgtccgccctccacctcctggcagccacagagccacccgcgccagggccacggcacctcccccgtgggggaccacggctccctggtgcgcatcccgccgccgcctgcccacgagcggtcgctgtccgcctacggcgggggcaaccgcgccagcatggagttcctgcggcaggaggacaccccgggctgcaggccccccgaggggaccctgcgggacagcgacacgtccatctccatcccgtccgtggaccacgaggagctggagcgttccttcagcggcttcagcatctcccagtccaaggagaacctggatgctctcaacagctgctacgcggccgtggcgccttgtgccaaagtcaggccctacattgcggagggagagtcagacaccgactccgacctctgtaccccgtgcgggcccccgccacgctcggccaccggcgagggtccctttggtgacgtgggctgggccgggcccaggaagtgaggcggcgctgggccagtggacccgcccgcggccctcctcagcacggtgcctccgaggttttgaggcgggaaccctctggggcccttttcttacagtaactgagtgtggcgggaagggtgggccctggaggggcccatgtgggctgaaggatgggggctcctggcagtgaccttttacaaaagttattttccaacaggggctggagggctgggcagggccctgtggctccaggagcagcgtgcaggagcaaggctgccctgtccactctgctcagggccgcggccgacatcagcccggtgtgaggaggggcgggagtgatgacggggtgttgccagcgtggcaacaggcggggggttgtctcagccgagcccaggggaggcacaaagggcaggcctgttccctgaggacctgcgcaaagggcgggcctgtttggtgaggacctgcggccttgggtc

SEQ ID NO: 124752 - DNA, 7413 bp, Homo sapiens
  misc_feature (1)...(7413): n = a,t,c or g
ccccgctgagcctgagcccgacccggggcgcctcccgccaggcaccatggtgcagaagtcgcgcaacggcggcgtataccccggcccgagcggggagaagaagctgaaggtgggcttcgtggggctggaccccggcgcgcccgactccacccgggacggggcgctgctgatcgccggctccgaggcccccaagcgcggcagcatcctcagcaaacctcgcgcgggcggcgcgggcgccgggaagccccccaagcgcaacgccttctaccgcaagctgcagaatttcctctacaacgtgctggagcggccgcgcggctgggcgttcatctaccacgcctacgtgttcctcctggttttctcctgcctcgtgctgtctgtgttttccaccatcaaggagtatgagaagagctcggagggggccctctacatcctggaaatcgtgactatcgtggtgtttggcgtggagtacttcgtgcggatctgggccgcaggctgctgctgccggtaccgtggctggagggggcggctcaagtttgcccggaaaccgttctgtgtgattgacatcatggtgctcatcgcctccattgcggtgctggccgccggctcccagggcaacgtctttgccacatctgcgctccggagcctgcgcttcctgcagattctgcggatgatccgcatggaccggcggggaggcacctggaagctgctgggctctgtggtctatgcccacagcaaggagctggtcactgcctggtacatcggcttcctttgtctcatcctggcctcgttcctggtgtacttggcagagaaaggggagaacgaccactttgacacctacgcggatgcactctggtggggcctgatcacgctgaccaccattggctacggggacaagtacccccagacctggaacggcaggctccttgcggcaaccttcaccctcatcggtgtctccttcttcgcgctgcctgcaggcatcttggggtctgggtttgccctgaaggttcaggagcaacacaggcagaagcactttgagaagaggcggaacccggcagcaggcctgatccagtcggcctggagattctacgccaccaacctctcgcgcacagacctgcactccacgtggcagtactacgagcgaacggtcaccgtgcccatgtacagacttatccccccgctgaaccagctggagctgctgaggaacctcaagagtaaatctggactcgctttcaggaaggaccccccgccggagccgtctccaagccagaaggtcagtttgaaagatcgtgtcttctccagcccccgaggcgtggctgccaaggggaaggggtccccgcaggcccagactgtgaggcggtcacccagcgccgaccagagcctcgagggccacccccagcaaggtgcccaaagagctggagcttcggggaccgcagccgggcacgccaggctttccgcatcaagggtgccgcgtcacggcagaactcagaagaagcaagcctccccggagaggacattgtggatgacaagagctgcccctgcgagtttgtgaccgaggacctgaccccgggcctcaaagtcagcatcagagccgtgtgtgtcatgcggttcctggtgtccaagcggaagttcaaggagagcctgcggccctacgacgtgatggacgtcatcgagcagtactcagccggccacctggacatgctgtcccgaattaagagcctgcagtccagagtggaccagatcgtggggcggggcccagcgatcacggacaaggaccgcaccaagggcccggccgaggcggagctgcccgaggaccccagcatgatgggacggctcgggaaggtggagaagcaggtcttgtccatggagaagaagctggacttcctggtgaatatctacatgcagcggatgggcatccccccgacagagaccgaggcctactttggggccaaagagccggagccggcgccgccgtaccacagcccggaagacagccgggagcatgtcgacaggcacggctgcattgtcaagatcgtgcgctccagcagctccacgggccagaagaacttctcggcgcccccggccgcgccccctgtccagtgtccgccctccacctcctggcagccacagagccacccgcgccagggccacggcacctcccccgtgggggaccacggctccctggtgcgcatcccgccgccgcctgcccacgagcggtcgctgtccgcctacggcgggggcaaccgcgccagcatggagttcctgcggcaggaggacaccccgggctgcaggccccccgaggggaccctgcgggacagcgacacgtccatctccatcccgtccgtggaccacgaggagctggagcgttccttcagcggcttcagcatctcccagtccaaggagaacctggatgctctcaacagctgctacgcggccgtggcgccttgtgccaaagtcaggccctacattgcggagggagagtcagacaccgactccgacctctgtaccccgtgcgggcccccgccacgctcggccaccggcgagggtccctttggtgacgtgggctgggccgggcccaggaagtgaggcggcgctgggccagtggacccgcccgcggccctcctcagcacggtgcctccgaggttttgaggcgggaaccctctggggcccttttcttacagtaactgggtgtggcgggaagggtgggccctggaggggcccatgtgggctgaaggatgggggctcctggcagtgaccttttacaaaagttattttccaacagggcactcccaggccctgtcgccattgaggtgcctccgctgggctgtctcctcacccctccctgtgctggagcctgtcccaaaaaggtgccaactgggaggcctcggaagccactgtccaggctcccactgcctgtctgctctgttcccaaaggcagcgtgtgtggcctcgggccctgcggtggcatgaagcatcccttctggtgtgggcatcgctacgtgttttgggggcagcgtttcacggcggtgcccttgctgtctcccttgggctggctcgagcctggggtccatgtccctttgccgtcccgtcatggggcagggaatccatagcggggcccacaggcaggggtatgagtgcgtcccacccaacgcagcaccagccccggccaccgctccccgtgtccccagttccgtctcagctacctggactccaggaccctggagaagggagacctggcagtggagggaggctgtgctgtgtgtccccctgcaggtgtgaccccgcctgctctttcctcccccgccaggtgtggccccgcctgctctttcctcccccaccagtatggccccacctgctctttcctncccccccaaggtgtggccccacctgttctttcctcccctgccgaggtgtgaccccacctgctctttcctccctcccagtatggccccacctgctctttcctcccccgaggtgaggccccgcctgctctttcctcccatgggagccgctgaggcgtgcgcacctgggcacaggttggggctctgcaggatgaggaagacaggccaatcccttccctcccagaagctggccgcccagcaggagggactgaggccagactcatgtccagcaaggaacgtgtggtgtgtcccctgggaagtctctgggccctgggaagagggaaggtgcacgtcctgggatggttgcggggccctgttttgggagacaaaggggtagagggtctgtcttgngcccccccagactctagcccgagcagtgcagccacctactgccccacctcagagaagtgcagcgggaaggaggctggaggtggtgcggcgctgcctcgggtgtctgcgtgaatgagcgtggccaaggaccagtgccacctcatggcaaagagctcccgcagtgtttgttagagtgcacatcctacgtgcccactggcacacacacgtgctcacatacangtcngngtacaggngtacacatgcangcttgcacacatgcacacagaccacatagcacacatgtgcactgaccacacctgtatagaccatgcacagtacacatacgtgcatacacatgcctgcatacaggcatacacatgcacgcttacatgtacacgtgcacagatcacacacatgcacacacgtgtagctcacacacagtatacacatacacaagtgcacagaccacacacagcactaacacatgcacacacaaagtgcataggccacacagcacatgcacacaggtgcacagaccacacagcacacacaagtgcacagagcacactgcacacatgcacacacacacgcgtgcatgcacactcctcgcacttccagccttggagcccttctgtctctggtctttctctttgaccctgctgagtgtaagctgcctggggaggggctacaaggagtaattgtggctttaggggtcgtggtgatgctggaatgtcaagcgccgtcgtggggtatccgactgtccgggctcctggtccgcagtggcagagcgccaggcagagccaatcagggtctcgtgctgcccttcccccccacagcctggcagccatccagaggaggggctctaccagatgccaaggtgccccggtgtctgtatgggtgtccggttgggtcctgtgtttggtctgccctggaggtggctgggccctcctgggatgggtggctcagcctcgaatcccaggccccagcccaggcaggtgctgctgcctgttgtggtttcctggcccagcttctccttctccctctgcataaaatcacagtccgtgagtcttccagctgccaccacggctgggacacgctgggggagggctcctcccatgcctcctgcacacagccgtctgagcagggcaggtgccaacaccccccaccggagacacgctgcccctcagcgatgcccctaccttttggggggcctcgtctcaagcccccccttggaggctgaaatcaccccaggcactgtgagggcttctccagggggacaccctttgagctgtgggtctgatcaccccaagtcccgcacacggaggagaggcacagccagggcgtgtggtttaatgtttgccccttcggggctggaggtctcagtgtttctagattccagaccctgctgccagagagacctgctgccggagagaaggggaggaggactccagctgggctcggtcccccacagtcagggacccccataaaggacacccccttctctctagaaagagctgggctctcagctatttctagttgcttcccagaagccgaggagcagaaggagctgtgagagctttgcagaaacgcccttgtccccgccctcctgagctatgaatgccgtacagagcagaggctggggcattggcaagatcacaggttgatgctgcacagccccattgacacaaaccctcaaagcagacgtgagagggacggttcacaaagcttggacctgccgtggagggtgcccggcagacgtggcgtgagagggacggctcacgaggcttggacctgctgtggagggtgcccagcagacgtggtgtgagaggaacggctcacgagacttggacctggtggagggtgcccagcagacgtggtgtgagagggacggctcacagggcttggaccggagagagatggctcatgagacttggacctgccgtggagggtgcccagcagacgtggtatgagagggatggctcacgaggcttggacctggtggagggtgcccggcagacgtgtgagagggacggttcacaaggcttggacctgccatggagggtgcccagcagacgtggtgtgagagggacagctcacgaggcttggacctgccgtggagggtgcccagcagggggctgagctctgaggggtgggtgctcagtgcacgggtgcccccagtgtcctctgatcctgtccggtgcctcccccaacccccacacccatgcagaactcccaggtcacatgcacgtatgtccagggcatgggggtggcgtgaagaggcctggtcagggcctttaggggctgcaggacggaatggccacctggggagcctgtgtggctgtgccgggcagccatcctgcattcccacccagcgcgcagtctccacctcggccccagcaaagcgctaagcagccggagagacagccagggcggcttcctgaaggatgtgggatggtggactccggggtcgagggaatacgcaggttcctgtcctccgggagacctagagaagctgcacacccaggagctttccatgacccgggagcatgagtgaatggggggttccagtttgctgaactttgctgtcttgtaagggtgggggctgacggccgaccctgggaggaggtgacaccgcagggggaggttgtgggcaacggtggaggaggagagacgggaggggaccatttgggatggaggggcctcttcagagttttaaaaggcgtttgtggggtggagttgagtgtgctctgggcttggacacttgccgtggtgcccctggctggccgaggagactggctctggccagggccccgtcctgagaggtcctcagcgtctgactctcggccaggcgccagcaaggaggggccggtccccggggctaccaggcaggcacgtgcacatcgccatcgccacacgccaactccgcctgggttttacaaagtcgttgccttaatgcatgtggacaggaactccctgaggtcgccccatgccccctggctgtgccaggtacggacgccctggaccctgcgaacaggtggggcgggcgaggggcccaagggacgggctccagagacacgcgcagggcaggaggggtctcacggaggggtctcgcactgaggcgcccagagctggtggtcccgctggacgccatccctctgcccgggatccacacggcccacgtgtgcccgccatgcccgcgccccacgccattgcagtcttccatcctctggccgtgacggtggctgcagcttccccatttgcgccgttgcctctggctgtctgcacttttgttcatgctccaaagaacatttcataatgccttcagtaccgacgtacacttctgaccattttgtatgtgtccttgtgccgtagtgaccaggcctttttttggtggatgtgttaccccgcacacttcaatctcaactttgtgcaccgtccattttctagggatagacgcccagggaatgaactctagttttctaacagattagctgagatattaacttactcacacggacaggttgatgccagagccgtaagaatgcgccagtgcgggtttgcgggggacttcgggtgtggggtcctgcggccgcgatggccgtggaaggttctggggatccctgctgccacggggacgagttcggacgccaggtggacctgtgcactcagtaaaacgcagtgattc

SEQ ID NO: 124753 - DNA, 2121 bp, Homo sapiens
atggagctgtgcaagcagagggaggtgtcccaggactcgggaggacttatccccccgctgaaccagctggagctgctgaggaacctcaagagtaaatctggactcgctttcaggcgcgtgggtcgtacgacaaagtgtcccagcccgtcgtcctctcgagtgcctggtggtaactcaggtgctgatggcgcctgctgcctctccttcaggcccaaagcccacggctgtcagagtgccggctgtcgagagacactcttctgctctggaacctatcaggacgatctcagatcatcctggattttccgggcgggccctgagtccaacaacgagtgtccttacaaggagagggagatttggaagcacacagagtgctgggattacaggtgtgagccactgtgcctggccaacggatgggatttcgatgaggttttggacacacagtccatgctgcagagggtggagattttgggggatcttggcagggtgattcggttttactttgcagcactgtggatccgggcagctgggcggcttctcggggtaaaggcagcccgtgcagagggcccctgtgtggatgctgccccggacgctctagcacagcccagcaaggtggaggtggctgtgtcgtgctcctgtggggctctccttggcatgtgcatgccgccggtggtgctggccttggagggctgcccccgaggcgtggctgccaaggggaaggggtccccgcaggcccagactgtgaggcggtcacccagcgccgaccagagcctcgaggacagccccagcaaggtgcccaagagctggagcttcggggaccgcagccgggcacgccaggctttccgcatcaagggtgcggcgtcacggcagaactcagaagaagcaagcctccccggagaggacattgtggatgacaagagctgcccctgcgagtttgtgaccgaggacctgaccccgggcctcaaagtcagcatcagagccgtgtgtgtcatgcggttcctggtgtccaagcggaagttcaaggagagcctgcggccctacgacgtgatggacgtcatcgagcagtactcagccggccacctggacatgctgtcccgaattaagagcctgcagtccaggcaagagccccgcctgcctgtccagcaggggacaagaacggggatagatatgattgtgggtcccccgcccccttcaactccccggcacaagaagtaccccaccaaaggacccacggcccctccgagagagtcaccccagtactcacctagagtggaccagatcgtggggcggggcccagcgatcacggacaaggaccgcaccaagggcccggccgaggcggagctgcccgaggaccccagcatgatgggacggctcgggaaggtggagaagcaggtcttgtccatggagaagaagctggacttcctggtgaatatctacatgcagcggatgggcatccccccgacagagaccgaggcctactttggggccaaagagccggagccggcgccgccgtaccacagcccggaagacagccgggagcatgtcgacaggcacggctgcattgtcaagatcgtgcgctccagcagctccacgggccagaagaacttctcggcgcccccggccgcgccccctgtccagtgtccgccctccacctcctggcagccacagagccacccgcgccagggccacggcacctcccccgtgggggaccacggctccctggtgcgcatcccgccgccgcctgcccacgagcggtcgctgtccgcctacggcgggggcaaccgcgccagcatggagttcctgcggcaggaggacaccccgggctgcaggccccccgaggggaccctgcgggacagcgacacgtccatctccatcccgtccgtggaccacgaggagctggagcgttccttcagcggcttcagcatctcccagtccaaggagaacctggatgctctcaacagctgctacgcggccgtggcgccttgtgccaaagtcaggccctacattgcggagggagagtcagacaccgactccgacctctgtaccccgtgcgggcccccgccacgctcggccaccggcgagggtccctttggtgacgtgggctgggccgggcccaggaagtga

SEQ ID NO: 124754 - DNA, 777 bp, Homo sapiens
atgaggcctaagctagggcactggctgtgggatggaaaagagggggacacggaaaagaggatgaacaggatttggtggcaacgcagggagagcaggcaggagctaccccagtacagggaagggaaaggagcaggggagccctggactggggaagccgatgttggtcaagggccctggaaaacaatgcttttggcagaatacatgaaaaggaagccctccctaatgaccaccaaggccctggcaaatctgacccatttcacagccctgaccagagctggacccagggtctgctctcagtgtgctgctcatttgcccaaggctccaaatggtcgaagggccccagccaaacactgtttagtaagagaaattaagtctttattgttggttcctgggatccatgaatgtgtgaagagtggccagattcgaaatctggagtctgcccgtgtctcaatggtggccaagtcaaacagtaggtcttactcttcccccttggtctggttagaggcggaaacatggtgtgaaggaattacaagtccagaaggctcaaaatctatagtggaaggaatcatagaggaagaagaagaagatgaggaaggaagtgagtctataagcaagaggaaaaaggaagatgacatggagaatgtcaaccaagctatcatcatcaatttgtctgactgcctggacactcagatgatgtatttcacttttttgttaaaagttaagaaaccctttacttccttaaaaatcattcacaaatcttcctataggtatcactaa

SEQ ID NO: 124755 - DNA, 2034 bp, Homo sapiens
  misc_feature (1)...(2034): n = a,t,c or g
ccgctttatttctctgcgagcatcactaaattctgctgtcatcaagagcagatatatagtagttgactcagtaagtgtaaatgctcagaataagttaaatatgtggttacagtttttgtttaacatccaggtacagctatggatgcacttaatagcatgcagaatttcttacggggtcgtcctaaaaccttcaagtctctggagaatgctattgaatggagtgtgaagagtggccagattcgaaatctggagtctgcccgtgtctcaatggttggccaagtcaaacagtgtgaaggaattacaagtccagaaggctcaaaatctatagtggaaggaatcatagaggaagaagaagaagatgaggaaggaagtgagtctataagcaagaggaaaaaggaagatgacatggagaccaagaaagaccatccatacacctggagaattgaactggcaaaaacagaaaaatactgggacggctggttccgaggcttatccaatctctttcttagttgtcccattcctaaattgctgctcttggctggtgttgatagattggataaagatctgaccattggccagatgcaagggaagttccagatgcaggtcctaccccagtgtggccatgcagtccatgaaggatgcccctgacaaggtagctgaagctgttgccactttcctgatccggcacaggtttgcagaacccatccggtggattccagtgtgtgtttcctgggctgttagtgacctgctgtccacccctccttcaacatcgagctctgttggtaaatacgttcgcaccagaggcccactgtgnatggccactgtctcctctccatcccgcccagccatgtgacactggctcccggtagacgggcaccccgacgatgtaccaaccttttcatgtattctgccaaaagcattgttttccagggcccttgaccaacatcggcttccccagtccaggggctcccctgctcctttcccttccctgtactggggtaagctcctgcctgctcttccctgcgttgcctagggtaaaagccctccagatttgccatactgagcccctcttcctagcatcaggcgatacatctgagttcaaatgtcttcccaggctcagggacctccattccttgagattgtcttgggcatggcccaagccctgcctcatgggatgggacaatgcatggggtggtctttatttttccctttcaaataaaacactagtcaggtaccgttttatcccagtcgtactcttccaggtttggaagacccagagaggccaagatcccatccttaagccatagcgagcggtggtggtggatagcatcacaagaaaccgagccttgaaaatcaggtccagccnggtccaagcacatggccttcccatctgggagagcccacttgtcccaattccaacatgtctgggcacctgccctggggctgaggccaggcgtgctccaggggcctcctgcggccctcacctgccacaggagcaacccaggttaaatacagcccatgcacaaaagccacaggcccaaagcctatgggaattgtttttaatccatccaaattttaaccaattttcataaactgggttcctggaggttgtgcaagtgccccccttggccttcttcaaaaaccttacagcttctctttgcccatttgtggatttcacatcactcccacacagaaaacattacagccctggcaatccccagtctttgcccttccttccaagctgccctcgcacaagcactgtgggcctgtcccctattggcccagggcacgccatttaccaaggggcaggaagggggcagtgttcctggaaggcccatctttttttgttgattgtcttaggtgatgtgtagccccctccacctttccacttcaacaacctcccacccctgtcctggctggcatgggtccggagtctggggacctactttggttttttggtatttatgacctttgtttaaaagaaaataaatatctcccaaccttnnnnnnnnnnnnnngggccggcgcttttaa

SEQ ID NO: 124756 - DNA, 473 bp, Homo sapiens
cggcgagaagacaggccctcggggtggaggtctttggtttcataagagcctgagagagatttttctaagatatgtgtaacacaccaacgtactgtgacctaggaaaggctgctaaggatgtcttcaacaaaggatatggctttggcatggtcaagatagacctgaaaaccaagtcttgtagtggagtggaattttctacttctggtcatgcttacactgatacagggaaagcatcaggcaacctagaaaccaaatataaggtctgtaactatggacttaccttcacccagaaatggaacacagacaatactctagggacagaaatctcttgggagaataagttggctgaagggttgaaactggaagcttaatgtggtttgaggaaagcatcagatttgtccctggaggtgaagagaaatgaacccactatgttttggccttaaaattcttctgtgaatttcaaaaggtgtaac

SEQ ID NO: 124757 - DNA, 572 bp, Homo sapiens
atgtgtaacacaccagcgtactgtgacctaggaaaggctgctaaggatgtcttcaacaaaggatatggctttggcatggtcaagatagacctgaaaaccaagtcttgtagtggagtggaattttctacttctggtcatgcttacactgatacagggaaagcatcaggcaacctagaaaccaaatataaggtctgtaactatggacttaccttcacccagaaatgaaatttcaaaagtgtgaactttttattcttccaaagaattgtaatcctccccacactgaagtctaggggttgcgaatccctcctgagggagatgcttaaaggcatgcctggaagttgtcatgtttgtgccacgtttcagttcagttctgaagtgttattaaatgtgttcctcagacagtgtagcgtcatgttagaggagacgatctgacccaccagtttgtacatcacgtcctgcatgtcccacaccattttttcatgaccttgtaatatactggtctctgtgctatagtggaatctttggttttgcatcatagtaaaataaaataaacccatcacatttggaacata

SEQ ID NO: 124758 - DNA, 467 bp, Homo sapiens
tgttgatatagatttttctggaccaaccatctatggctggtctgtgttggccttcgaagggtggcttgctgcctgtgagatgagttttgacacagccaaatccaaactgtcacagaataatttcgccctgggttacaaggctgcggacttccagctgcacacacatgtgtgagtgtttataatttattccttagtatcagtgcagctgcccaaaatattgtagccattagcatgctgagaagtgatggtactcagatttagcatgccttggtgaatatccatccttgcggcgctatcctcatagcaaaaccttgccaggaggctggtgcacgtggtgtgcaggctgtgctgctggtggtcactggcccctcagcctgcaccccaaacttgaagaagctccagcctctgtagaacaaccactgggatagagggagcccagagcatggcttacctcatggtaagatgag

SEQ ID NO: 124759 - DNA, 1062 bp, Homo sapiens
atgtgtaacacaccaacttactgtgacctgggaaaggctgctgaggatgtcttcaacaaaggatatggctttggcatggggaagatagacctgaaaaccaagtcctgtagtgcagtggaattttctacttctggtcatgcttacactgatacagggaaagcatcaggcaacctagaacccgaatgtaaggtctgtaactatggacttaccttcactcaaaaacggaacacagacaatactcttgggacagaaatctctttggagaataagttggctaaagggttgaaactgagtcttgataccatattggtaccaaacacaggaaagaagagtggggaattgaaggcctcctataaatgggattgttttagtgttggcagtaatgttgatctagatttttccggaccaaccatctatggctgggctgtgttggtctttgaagggtggcttgccggctatcagatgagttttgacacagccaaatccaaattgtcacagaataatttcgccctgggttacgaggctgcagacttccagctgcacacacatgtgaccgatggcactgaatttggaggttctatctaccagaaggttaatgggattgaaatgtcaataaaccttgcttggacggctggagtaacaacacccattttggcattgctactaagtacaagctggattgtagaacttctctctctgctaaagctgtggttctggggacccgtgtgggctcttgttgagctgggggagatacttcgaatactgatatcgccccaaagctgcaactctccggccccgccacggctccttatgtacaaagagagggaatcagtcgccggtgacctcgacggccctcggatcagggatgccccgagtccgagcgggcagggtgctcagcagggccaggtgatgggaatcatggggccatcgagcacggaccctggctcccccggtggcctctctagcggccccgacgcccacccggagaagatgagcccccgctgccccccgcagcccagtcagacgcggagccgccgcgcccggggccggctcccccgctag

SEQ ID NO: 124760 - DNA, 1672 bp, Homo sapiens
atgagtcccctcaagggcacaggtgcggtccccagcctcttgggcccccagtcaacctcactgtccacaccgagccctcctgcgcacgcgcgctgcggagccggacagttggtggtgctggcttggcccggctgttcgtctccgcgccttgctccgaagcgcgcgaccgtggcgcgacacgccggcgcacaggcgctctcggggaggggcggcgcgcaggcgcggctgggggtgcgaggctgcgcaggcgcggacggcgttggtttgaagaccttcagcgttgccctggcggagcagagacaggccctcggggtggaggtgaggagagctgaggccgcgcgggctccagtcccggagagcgatatgtgtaacacaccaacggtactgtgacctaggaaaggctgctaaggatgtcttcaacaaaggatatggctttggcatggtcaagatagacctgaaaaccaagtcttgtagtggagtgatggaattttctacttctggtcatgcttacactgatacagggaaaagcatcaggcaacctagaaaccaaatataaggtctgtaactatggacttacccttcacccagaaatggaacacagacaatactctaagggacagaaatctctttgggagaataagttggctgaagggttgaaactgactcttgataccatatttgtaccgaacacaggaaagaagagtgggaaattgaaggcctcctataaacgggattgttttagtgttggcagtaatgttgatatagatttttctggaccaaccatctatggctgggctgtgttggccttcggaagggtggcttgctggctatcagatgagttttgacacagccaaatccaaactgtcacagaataatttcgccctgggttacaaggctgcggacttccagcttgcacacacatgtgaacgaatggcactgaatttggaggttctatctaccagaaggtgaatggagaagattgaaacatccataaaccttgcttggacagctgggagtaacaacacccagttttggcatgctggctaaagtacatgctgggattgtagaacttctctctctgctaaagtaaataatgccagcctgattggactgggttatactcagacccttcgaccaggagtcaaattgactttatcagctttaatcgatgggaagaacttcagtgcaggaggtcacaaggttggcttgggatttgaactggaagcttaatgtggtttgaggaaagcatcagattttgtccctggaagtgaagagaaatgaacccactatgttttggccttaaaattcttctgtgaaatttcaaaagtgtgaactttttattcttccaaagaattgtaatcctccccacacctgaagtcctaggggttgccgaatccctcctgagggagatgcttgaaggcatgcctgggaagtttgtcatgtttagtgccacgtttcagttccagttctggaagtgttattaaatgtgttcctcagcgacagtgtagcgtcatgttagaggagacgatctgacccaccagtttgtacatcacgtcctgcatgtcccacaccattttttcatgaccttgtaatatactggtctctgtgctatagtggaatctttggttttgcatcatagtaaaataaaataaacccatcacatttggaacat

SEQ ID NO: 124761 - DNA, 927 bp, Homo sapiens
  misc_feature (1)...(927): n = a,t,c or g
ctacacgaaggtttttgcgctggatgtggctgcccggcaccgggtgcagtttgcgatgccggagtctgatgcggttgcgatgctgaaacaattatcctgagaataaatgccttggcctttatatggaaatgtggaactgagtggatatgctgtttttgtctgaatcgccagcggcatcagcaccttgtcgccttgcgtataatatttgcccatggtgaaaacgggggcgaagaagttgtccatattggccacgtttaaatcaaaactggtgaaactcacccagggattggctgagacgaaaaacatattctcaatgggtaccgagctcgaattcgtaatcatggtcatagctgtttccagtgagacgggcaacagctgattgcccttcaccgcctggccctgagagagttgcagcaagcggtccacgctggtttgccccagcaggcgaaaatcctgtttgatgggtggttccgaaatccggaaaatccctgaccgggcagatagttcaccggggtgagaaaaaagagcaacaactgatttaggcaatttggcggtgttgatacagcgggtaataatcttacgtgaaatattttccgcatcagccagcgcagaaatatttccagcaaattcattctgcaatcggcttgcataacgctgaccacgttcataagcacttgttgggcgataatcgttacccaatctggataatgcagccatctgctcatcatccagctcgccaaccagaacacgataatcactttcggtaagtgcagcagctttacgacggcgactcccatcggcaatttctatgacaccagatactcttcgaccgaacgccggtgtctgttgaccagtcagtagaaaagaagggatgagatcattcagtgcgttctcaataagcagcgccctanagttgctagngcccat

SEQ ID NO: 124762 - DNA, 1749 bp, Homo sapiens
atggtgaaagttggaacctcttacgtgccgatcaacgtctcattttcgccaaaagttggcccagggcttcccggtatcaacagggacaccaggatttatttattctgcgaagtgatcttccgtcacaggaaggacagagaaagcgcggatctgggaagtgacggacagaacggtcccagaccctggattggggaggcggttgccgccgctgctgctgacggtgtgacgttctctgttccggtcacaccacatacgttccgccattcctatgcgatgcacatgctgtatgccggtataccgctgaaagttctgcaaagcctgatgggacataagtccatcagttcaacggaagtctacacgaaggtttttgcgctggatgtggctgcccggcaccggaaccggtttacgcagtttcggcttagtgaaacaaaagaaatcaccaatccgtatgccatgcgtttatacgaatccctgtgtcagtatcgtaagccggatggctcatgcatcgtctctctgaaaatcgactggatcatagagcgttaccagctgcctcaaagttaccagctttattactttgaattggctatcccggtggggtacttctaccctggaagtttttccacggcatcccgaattttgctcctccatccacggggactgagagccattactattgctgtatttggtaagcaaaatacgtacatcaggctcgaaccctttaagatcaacgttcttgagcagatcacgaagcatatcgaaaaactgcagtgcggaggtgtagtcaaacaactcagcaggcgtgggaacaatcagcacatcagcagcacatacgacattaatcgtgccgatacccaggttaggcgcgctgtcaataactatgacatcatagtcatgagcaacagtttcaatggccagtcggagcatcaggtgtggatcgcgcgcctaacctgggtaatcggcacgattaatgtcgtatgtgctgctgatgtgctgattgttcccacgcctgctgagttgtttgactacacctccgcactgcagtttttcgatatgcttcgtgatctgctcaagaacgttgatcttaaagggttcgagcctgatgtacgtattttgcttaccaaatacagcaatagtaatggctctcagtccccgtggatggaggagcaaattcgggatgcctggggaagcatggttctaaaaaatgttgtacgtgaaacggatgaagttggtaaagcgcgcctaacctggggtatcggcacgattaatgtcgtatgtgctgctgatgtgctgattgttcccacgcctgctgagttgtttgactacacctccgcactgcagtttttcgatatgcttcgtgatctgctcaagaacgttgatcttaaagggttcgagcctgatgtacgtattttgcttaccaaatacagcaatagtaatggctctcagtccccgtggatggaggagcaaattcgggatgcctggggaagcatggttctaaaaaatgttgtacgtgaaacggatgaagttggtaaagaacccccgtccaccaatacgttccgccattcctatgcgatgcacatgctgtatgccggtataccgctgaaagttctgcaaagcctgatgggacataagtccatcagttcaacggaagtctacacgaaggtttttgcgctggatgtggctgcccggcaccgggtgcagtttgcgatgccggagtctgatgcggttgcgatgctgaaacaattatcctga

SEQ ID NO: 124763 - DNA, 972 bp, Homo sapiens
tgtgacaatctaaaaacttgtcacacttcacatggatctgtcatggcggaaacagcggttatcaatcacaagaaacgtaaaaatagcccgcgaatcgtccagtcaaacgacctcactgaggcggcatatagtctctcccgggatcaaaaacgtatgctgtatctgttcgttgaccagatcagaaaatctgatggcaccctacaggaacatgacggtatctgcgagatccatgttgctaaatatgctgaaatattcggattgacctctgcggaaccagcattgaagagtttcgcggggaaggaagtggttttttatcgccctgaagaggatgccggcgatgaaaaaggctatgaatcttttccttggtttatcaaacgtgcgcacagtccatccagagggctttacagtgtacatatcaacccatatctcattcccttctttatcgggttacagaaccggtttacgcagtttcggcttagtgaaacaaaagaaatcaccaatccgtatgccatgcgtttatacgaatccctgtgtcagtatccacccactctggctgcgcttgaggagcccttcagcccgctggctgcgctgtgggagcccctctctgggctggacgaggacggaaccggctccctcccctcccaggggaggaaggacagagaaagcgcggatctgggaagtgacggacagaacggtcaggacctggattggggaggcggttgcgcgcatgctgctgacggtgtgacgttctctgttccggtcacaccacatacgttccgccattcctatgcgatgcacatgctgtatgccggtataccgctgaaagttctgcaaagcctgatgggacataagtccatcagttcaacggaagtctacacgaaggtttttgcgctggatgtggctgcccggcaccgggtgcagtttgcgatgccggagtctgatgcggttgcgatgctgaaacaattatcctga

SEQ ID NO: 124764 - DNA, 3297 bp, Homo sapiens
atgcgtttatacgaatccctgtgtcagtatcgtaagccggatgcgtcaggcatcgtctctctgaaaatcgactggatcatagagcgttaccagctgcctcaaagttaccagcgtatgcctgacttccgccgccgcttcctgcatgaccgacgatacgagtgggaccgtggttccagactaataatcagaccgacgatacgagtgggaccgtggtccagactaataatcagaccgacgatacgagtgggaccatggtccaggactaataatcagaccgacgatacgagtgggaccgtggtcagatctgattatcagaccgacgatacgagtgggaccgtggtccagactaataatcagaccgacgatacgagtgggaccgtggtcagatctaataatcagaccgacgatacgagtgggaccgtggtccagtctgattatcagaccgacgatacaagtggaacagatgggcccacgagagaatattttcaaagtgtcaggtcgactctagaggatcccctggatgtggctgcccggcaccggtcgactctagaggatccccctattgctgtatttggtaagcaaaatacgtacatcaggctcgaaccctttaagatcaacgttcttgagcagatcacgaagcatatcgaaaaactgcagtgcggaggtgtagtcaaacaactcagcaggcgtgggaacaatcagcacatcagcagcacatacgacattaatcgtgccgatacccaggttaggcgcgctgtcaataactatgacatcatagtcatgagcaacagtttcaatggccagtcggagcatcaggtcgactctagaggatccccagcgagcgaactggcgaggaagcaaagaagaactgttctgtcagatagctcttacgctcagcgcaagaagaaatatccaccgtgggaaaaactccagacaccggcgttcggtcgaagagtatctggtgtcatagaaattgccgatgggagtcgccgtcgtaaagctgctgcacttaccgaaagtgattatcgtgttctggttggcgagctggatgatgagcagatggctgcattatccagattgggtaacgattatcgcccaacaagtgcttatgaacgtggtcagcgttatgcaagccgattgcagaatgaatttgctggaaatatttctgcgctggctgatgcggaaaatatttcacgtaagattattacccgctgtatcaacaccgccaaattgcctaaatcagttgttgctcttttttctcaccccggtgaactatctgcccggtcagctgccccgatggtggattcgttaattgcgcgcgtaggagtaatggctcgcggtaatgccattactttgcctgtatgtggtcgggatgtgaagtttactcttgaagtgctccggggtgatagtgttgagaagacctctcgggtatggtcaggtaatgaacgtgaccaggagctgcttactgaggacgcactggatgatctcatcccttcttttctactgactggtcaacagacaccggcgttcggtcgaagagtatctggtgtcatagaaattgccgatgggagtcgccgtcgtaaagctgctgcacttaccgaaagtgattatcgtgttctggttggcgagctggatgatgagcaggattggtctttgggatgcctgcaggtcgactctagaggatcccccggatctgacctttaccaacttcatccgtttcaccaaaatacgtacatcaggctcgaaccctttaagatcaacgttcttgagcagatcacgaagcatatcgaaaaactgcagtgcggaggtgtagtcaaacaactcagcaggcgtgggaacaatcagcacatcagcagcacatacgacattaatcgtgccgatacccaggttaggcgcgctgtcaataactatgacatcatagtcatgagcaacagtttcaatggccagtcggagcatcagaaccggtttacgcagtttcggcttagtgaaacaaaagaaatcaccaatccgtatgccatgcgtttatacgaatccctgtgtcagtatcgcatcgtctctctgaaaatcgactggatcatagagcgttaccagctgcctcaaagttaccagcgtatgcctgacttccgccgccgcttcctgcaggtctgtgttaatgagatcaacagcagaactccaatgcgcctctcatacattgagaaaaagaaaggccgccagacgactcatatcgatctggctctgaaggggctacgtgttttgctcgtggaaggtaacgacccccagggaacagcctcaatgtatcacggatgggtaccagatcttcatattcatgcagaagacactctcctgcctttctatcttggggaaaaggacgatgtcacttatgcaataaagcccacttgctggccggggcttgacattattccttcctgtctggctctgcaccgtattgaaactgagttaatgggcaaatttgatgaagaggatccccctaaatatgctgaaatattcggattgacctctgcggaacgcagtaaggatatacggcaggcattgaagagtttcgcggggaaggaagtggttttttatcgccctgaagaggatgccggcgatgaaaaaggctatgaatcttttccttggtttatcaaacgtgcgcacagtccatccagagggctttacagtgtacatatcaacccatatctcattcccttctttatcgggttacagaaccggtttacgcagtttcggcttagtgaaacaaaagaaatcaccaatccgtatgccatgcgtttatacgaatccctgtgtcagtatcgtaagccggatgcgtcaggcatcgtctctctgaaaatcgactggatcatagagcgttaccagctgcctcaaagttaccagcgtatgcctgacttccgccgccgcttcctgcaggtcgactctagaggatcccccatcggcaatttctatgacaccagatactcttcgaccgaacgccggtgtctgttgaccagaaggacagagaaagcgcggatctgggaagtgacggacagaacggtcaggacctggattggggaggcggttgcgcgcctcgctgctgacggtgtgacgttctctgttccggtcacaccacatacgttccgccattcctatgcgatgcacatgctgtatgccggtataccgctgaaagttctgcaaagcctgatgggacataagtccatcagttcaacggaagtctacacgaaggtttttgcgctggatgtggctgcccggcaccgggtgcagatttgcgatgccggagtctga

SEQ ID NO: 124765 - DNA, 963 bp, Homo sapiens
atgaaactcatggaaacacttaaccagtgcataaacgctggtcatgaaatgacgaaggctatcgccattgcacagtttaatgatgacagcccggaagcgaggaaaataacccggcgctggagaataggtgaagcagcggatttagttggggtttcttctcaggctatcagagatgccgagaaagcagggcgactaccgcacccggatatggaaattcgaggacgggttgagcaacgtgttggttatacaattgaacaaattaatcatatgcgtgatgtgtttggtacgcgattgcgacgtgctgaagacgtatttccaccggtgatcggggttgctgcccataaaggtggcgtttacaaaacctcagtttctgttcatcttgctcaggatctggctctgaaggggctacgtgttttgctcgtggaaggtaatcttgtccacatgaccgtccgcatcatgttgtggatcagcaggacacagcagcaatccacagcaggcatacaaccgcacaccgaggtatacttccgatttttgactttcgactctagaggatcccctaacgctgaccacgttcataagcacttgttgggcgataatcgttacccaatctggataatgcagccatctgctcatcatccagctcgccaaccagaacacgataatcactttcggaaggacagagaaagcgcggatctgggaagtgacggacagaacggtcaggacctggattggggaggcggttgcgcgcatgctgctgacggtgtgacgttctctgttccggtcacaccacatacgttccgccattcctatgcgatgcacatgctgtatgccggtataccgctgaaagttctgcaaagcctgatgggacataagtccatcagttcaacggaagtctacacgaaggtttttgcgctggatgtggctgcccggcaccgggtgcatgtttgcgatgccggagtctga

SEQ ID NO: 124766 - DNA, 1299 bp, Homo sapiens
atggatttgggaatcatcagcatatggacaatagttgaagctggaaatgcagcctgtccaaaaccaaacatcaacactgcccgtggctttccccgaccacacacatttttgaaatgcaaaacgaaaaataccaagtgcctcaattcgatcaatcaacgattaaaaatattcgagtctgcaaaaggacttgatgtgtgggacagctggccgctgcaaaacgctgacggaacagtagctgaatacaacggctatcacgttgggtttgctcttgcgggaagcccgaaagacgctgatgacacatcaatctacatgttttatcagaagacagcgaataagttcgaggccaacgatccaagtcctggaaaatcagacgcaggaatggtgccggttctgcaacccttacatctaacgggaaaatccgttaattccacactgactattcccgatttatatccccctacttgtctttcagtgctcaatgtgggcactacctctccaaaaagactggagagcacagactataaaatttctgtaactgtaagcccagagcccaatatagcacctaacgcccaatgggatattctgcaaatgtttctgcataaacaaaccaccttcagagcctatttgccctgggctagcttggagaggtgcacagcaaatacactggagtcccttgctttttaccgccctcagtatgagggaacacacagagcagaaaacactcacaaaatccaatacagcatgcagtgtgctgaaatggaacactctaccaaaacatttgacctactgatcttatttcattatggtgaaagttggaacctcttacgtgccgatcaacgtctcattttcgccaaaagttggcccagggcttcccggtatcaacagggacaccaggatttatttattctgcgaagtgatcttccgtcacaggtatttattcgcgataagctcatggagcggcgtaaccgtcgcacaggaaggacagagaaagcgcggatctgggaagtgacggacagaacggtcaggacctggattggggaggcggttgccgccgctgctgctgacggtgtgacgttctctgttccggtcacaccacatacgttccgccattcctatgcgatgcacatgctgtatgccggtataccgctgaaagttctgcaaagcctgatgggacataagtccatcagttcaacggaagtctacacgaaggtttttgcgctggatgtggctgcccggcaccgggtgcagtttgcgatgccggagtctgatgcggttgcgatgctgaaacaattatcctga

SEQ ID NO: 124767 - DNA, 1170 bp, Homo sapiens
atgggtcgaaggaaaataattgccatgacctttaggaaagaacgactcgagacttgcatgcccctgctgtgcgactctaaaagatcccccacgaagcatatcgaaaaactgcagtgcggaggtgtagtcaagcggcgtgaagaggcgatcagaaaatctgatggcaccctacaggaacatgacggtatctgcgagatccatgttgctaaatatgctgaaatattcggattgaccgggggggaagccagtaaggatatacggcaggcattgaagagtttcgcggggaaggaagtggttttttatcgccctgaagaggatgccggcgatgaaaaaggctatgaatcttttccttggtttatcaaacgtgcgcacagtccatccagagggctttacagtgtacatatcaacccatatctcattcccttctttatcgggttacagaaccggtttacgcagtttcggcttagtgaaacaaaagaaatcaccaatccgtatgccatgcgtttatacgaatccctgtgtcagtatcgtaagcgcgatggctcaggcatcgtctctctgaaaatcgactgggtcatagagcgttaccagctgcctcaagttaccagcgtatgcctgacttccgccgccgttcctgcagggtttattgagaatatgtttttcgtctcagccaatccctgggtgagtttcaccagttttgatttaaacgtggccaatatggagggggtcttcgcccccgttttcaccatgggcaaatattatacgcaaggcgacaaggtgctgatgccgctggcgattcaggtatttattcgcgataagctcatggagcggcgtaaccgtcgcacaggaaggacagagaaagcgcggatctgggaagtgacggacagaacggtcaggacctggattggggaggcggttgccgccgctgctgctgacggtgtgacgttctctgttccggtcacaccacatacgttccgccattcctatgcgatgcacatgctgtatgccggtataccgctgaaagttctgcaaagcctgatgggacataagtccatcagttcaacggaagtctacacgaaggtttttgcgctggatgtggctgcccggcaccgggtgcagtttgcgatgccggagtctgatgcggttgcgatgctgaaacaattatcctga

SEQ ID NO: 124768 - DNA, 3198 bp, Homo sapiens
  misc_feature (1)...(3198): n = a,t,c or g
atgaaactcatggaaacacttaaccagtgcataaacgctggtcatgaaatgacgaaggctatcgccattgcacagtttaatgatgacagcccggaagcgaggaaaataacccggcgctggagaataggtgaagcagcggatttagttggggtttcttctcaggctatcagagatgccgagaaagcagggcgactaccgcacccggatatggaaattcgaggacgggttgagcaacgtgttggttatacaattgaacaaattaatcatatgcgtgatgtgtttggtacgcgattgcgacgtgctgaagacgtatttccaccggtgatcggggttgctgcccataaagnatcccccgtgatcggggttgctgcccataaaggtggcgtttacaaaacctcagtttctgttcatcttgctcaggatctggctctgaaggggctacgtgttttgctcgtggaaggtaacgacccccagggaacagcctcaatgtatcacggatgggtaccagatcttcatattcatgcagaagacactctcctgcctttctatcttggggaaaaggacgatgtcacttatgcaataaagcccacttgctggccggggcttgacattattccttcctgtctggctctgcaccgtattgaaactgagttaatgggcaaatttgatgaaggtaaactgcccaccgatccacacctgatgctccgactggccattgaaactgttgctcatgactatgatgtcatagttattgacagcgcgcctaacctgggtatcggcacgattaatgtcgtatgtgctgctgatgtgctgattgttcccacgcctgctgagttgtttgactacacctccgcactgcagtttttcgatatgcttcgtgatctgctcaagaacgttgatcttaaagggttcgagcctgatgtacgtattttgcttaccaaatacagcaatagtaatggctctcagtccccgtggatggaggagcaaattcgggatgcctggggaagcatggttctaaaaaatgttgtacgtgaaacggatgaagttggtaaagcggttatcaatcacaagaaacgtaaaaatagcccgcgaatcgtccagtcaaacgacctcactgaggcggcatatagtctctcccgggatcaaaaacgtatgctgtatctgttcgttgaccagatcagaaaatctgatggcaccctacaggaacatgacggtatctgcgagatccatgttgctaaatatgctgaaatattcggattgacctctgcggaagccaaggatccccgtggcgtttacaaaacctcagtttctgttcatcttgctcaggatctggctctgaaggggctacgtgttttgctcgtggaaggtaacgacccccagggaacagcctcaatgtatcacggatgggtaccagatcttcatattcatgcagaagacactctcctgcctttctatcttggggaaaaggacgatgtcacttatgcaataaagcccacttgctggccggggcttgacattattccttcctgtctggctctgcaccgtattgaaactgagttaatgggcaaatttgatgaaggtaaactgcccaccgatccacacctgatgctccgactggccattgaaactgttgctcatgactatgatgtcatagttattgacagcgcgcctaacctgggtatcggcacgattaatgtcgtatgtgctgctgatgtgctgattgttcccacgcctgctgagttgtttgactacacctccgcactgcagtttttcgatatgcttcgtgatctgctcaagaacgttgatcttaaagggttcgagcctgattgcataaacgctggtcatgaaatgacgaaggctatcgccattgcacagtttaatgatgacagcccggaagcgaggaaaataacccggcgctggagaataggtgaagcagcggatttagttggggtttcttctcaggctatcagagatgccgagaaagcagggcgactaccgcacccggatatggaaattcgaggacgggttgagcaacgtgttggttatacaattgaacaaattaatcatatgcgtgatgtgtttggtacgcgattgcgacgtgctgaagacgtatttccaccggtgatcggggttgctgcccataaaggtggcgtttacaaaacctcagtttctgttcatcttgctcaggatctggctctgaaggggctacgtgttttgctcgtggaagggtttattgagaatatgtttttcgtctcagccaatccctgggtgagtttcaccagttttgatttaaacgtggccaatatggacaacttcttcgcccccgttttcaccatgggcaaatattatacgcaaggcgacaaggtgctgatgccgctggcgattcaggttcatcatgccgtttgtgatggcttccatgtcggcagaatgcttaatgaattacaacagtactgcgatgagtggcagggcggggctgattatcgtgttctggttggcgagctggatgatgagcagatggctgcattatccagattgggtaacgattatcgcccaacaagtgcttatgaacgtggtcagcgttatgcaagccgattgcagaatgaatttgctggaaatatttctgcgctggctgatgcggaaaatatttcacgtaagattattacccgctgtatcaacaccgccaaattgcctaaatcagttgttgctcttttttctcaccccggtgaactatctgcccggtcaggtgatgcacttcaaaaagcctttacagataaagaggaattacttaagcagcaggcatctaaccttcatgagcagaaaaaagctggggtatttattcgcgataagctcatggagcggcgtaaccgtcgcacaggaaggacagagaaagcgcggatctgggaagtgacggacagaacggtcaggacctggattggggaggcggttgccgccgctgctgctgacggtgtgacgttctctgttccggtcacaccacatacgttccgccattcctatgcgatgcacatgctgtatgccggtataccgctgaaagttctgcaaagcctgatgggacataagtccatcagttcaacggaagtctacacgaaggtttttgcgctggatgtggctgcccggcaccgggtgcagtttgcgatgccggagtctgatgccgttgcgatgctgaaacaattatcctga

SEQ ID NO: 124769 - DNA, 867 bp, Homo sapiens
  misc_feature (1)...(867): n = a,t,c or g
atgctgctcaaggccgtagaggaaaagcggttcctgcccatgggcagcgaccgcgaggtcagcagcgattttcagctgatcgcaggcaccaatcgtgacttgcggatcgacgtggcacaggggcgctttcgggaggacttattcgcgcgtatcaacctatngcgccctgaggacatcgagccgaatgtcgaccatttgcttgcgagggctgctacagagatagggcaggccgttcgcttcaatgccgaggccaaggcacgctacctccagtttgccaggtcaaaagaggcgccctggagtggcaacttccgcgatctctcagctagcgtgactcgcatggccacgttggccgatggagggcgaatctctacgggcttggtcgacgcggaaatccagcgcctccaatggctttggcagcccgccggggaagcccaggtacgcgatatcgaccttgatggcctgctacccactgatacggcctgcaagttggacttgtttgaccgcctgcagctcgaagccgtggttcgagtctgccgcgagtcgcagacgctgtctgatgcagaaccccatgatcttccgtcacaggtatttattcgcgataagctcatggagcggcgtaaccgtcgcacaggaaggacagagaaagcgcggatctgggaagtgacggacagaacggtcaggacctggattggggaggcggttgccgccgctgctgctgacgttctgcaaagcctgatgggacataagtccatcagttcaacggaagtctacacgaaggtttttgcgctggatgtggctgcccggcaccgggtgcagtttgcgatgccggagtctgatgcggttgcgatgctgaaacaattatcctga

SEQ ID NO: 124770 - DNA, 755 bp, Homo sapiens
  misc_feature (1)...(755): n = a,t,c or g
gccctcgctggcatcaaagggagacagagccgctgtcacagtcaggagttgcctctctggttctgcgggacccagcccccctggaggtgggaaactgcagaggaagaggaagtgggttgtctggaaaggcagggctgggccacaagcctacagttctgcaggctttgctactgtgcataaacgctggtcatgaaatgacgaaggctatcgccattgcacagtttaatgatgacagcccggaagcgaggaaaataacccggcgctggagaataggtgaagcagcggatttagttggggtttcttctcaggctatcagagatgccgagaaagcagggcgactaccgcacccggatatggaaattcgaggacgggttgagcaacgtgttggttatacaattgaacaaattaatcatatgcgtgatgtgtttggtacgcgattgcgacgtgctgaagacgtatttccaccggtgatcggggttgctgcccataaaggtggcgtttacaaaaccccattttctgttcatcttgctcaggatctggctctgaaggggctacgtgttttgcctcgtgggagnagaatacccctgtatgccggtataccgctgaaagttctgcaaagcctgatgggacataagtgcatcagttcaacggaagtctacacgaaggtttttgcgctggatgtggctgcccggcaccgggtgcagtttgcgatgccggagtctgatgcggttgcgatgctgaaacaattatcctga

SEQ ID NO: 124771 - DNA, 1452 bp, Homo sapiens
atggaagccatcacaaacggcatgatgaacctgaatcgccagcggcatcagcaccttgtcgccttgcgtataatatttgcccatggtgaaaacgggggcgaagaagttgtccatattggccacaaccggtttacgcagtttcggcttagtgaaacaaaagaaatcaccaatccgtatgccatgcgtttatacgaatccctgtgtcagtatcagcgttaccagctgcctcaaagttaccagcgtatgcctgacttccgccgccgcttcctgcaggtctgtgttaatgagatcaacagcagaactccaatgcgcctctcatacattgagaaaaagaaaggccgccagacgactcatatcgctatcagagatgccgagaaagcagggcgactaccgcacccggatatggaaattcgaggacgggttgagcaacgtgttggttatacaattgaacaaattaatcatatgcgtgatgtgtttggtacgcgattgcgacgtgctgaagacgtatttccaccggtgatcggggttgctgcccataaaggtggcgtttacaaaacctcagtttctgttcatcttgctcaggatctggctctgaaggggctacgtgttttgctcgtggaaggtaacgacccccagggaacagcctcaatgtatcacggatgggtaccagatcttcatattcatgcagaagacactctcctgcctttctatcttggggaaaaggacgatgtcacttatgcaataaagcccacttgctggccggggcttgacattattccttcctgtctggctctgcaccgtattgaaactgagttaatgggcaaatttgatgaaggtaaactgcccaccgatccacacctgatgctccgactggccattgaaactgttgctcatgactatgatgtcatagttattgacagcgcgcctaacctgggtatcggcacgattaatgtcgtatgtgctgctgatgtgctgattgttcccacgcctgctgagttgtttgactacacctccgcactgcagtttttcgatatgcttcgtgatctgctcaagaacgttgatcttaaagggttcgagcctgatgtatttattcgcgataagctcatggagcggcgtaaccgtcgcacaggaaggacagagaaagcgcggatctgggaagtgacggacagaacggtcaggacctggattggggaggcggttgccgccgctgctgctgacggtgtgacgttctctgttccggtcacaccacatacgttccgccattcctatgcgatgcacatgctgtatgccggtataccgctgaaagttctgcaaagcctgatgggacataagtccatcagttcaacggaagtctacacgaaggtttttgcgctggatgtggctgcccggcaccgggtgcagtttgcgatgccggagtctgatgcggttgcgatgctgaaacaattatcctga

SEQ ID NO: 124772 - DNA, 2600 bp, Homo sapiens
ctaaaggacgctacggcgataaaaaaccactttcttccccgcgaaactcttcaatgcctgccgtatatccttactggcttccgcagaggtcaatccgaatatttcagcatatttagcaacatggatctcgcagataccgtcatgttcctgtagggtgccatcagattttctgatctggtcaacgaacagatacagcatacgtttttgatcccgggagagactatatgccgcctcagtgaggtcgtttgactggacgattcgcgggctatttttacgtttcttgtgattgataaccgctgtttccgccatgacagatccatgtgaagtgtgacaagtttttagattgtcacactggctcagggggcggctgcctcgccaggcgccacgaagccccggcgtcccacaggtcccggaggccgctgcgtcgcggggagctgggctcgggccgccggcggttgcgccggggcagccccgcggggagagcaccatgaggactgactcgggggctcggctggaggagggccacctgatctgctgcagacattctactgctgaggcaaaacaagcatctttcgtggttggcaaaacattgtcacctgttggagtgtcattatctccttgcttcttaaccttgttttcatttcttcctttgccctttgacttatttccctttttccttaactcccttccctcttttattccttttattccatttttattgtcacctgttggagtgtcattatctccttgcttcttaaccttgttttcatttcttcctttgccctttgacttatttccctttttccttaactcccttccctcttttattccttttattccatttttctgagatggcactggcttttcaccatgctctgagtcctctcttactgaatgatctgacagtttccgtaggtattcattgactgcttgggtgtcagggtatgatggtatgtttctggcagaggaaatttcagttgttcccatgacattttgttgagaggacatggcatcgctgcttgtgatctgagcacttactgcattcagttcagtagcaacagactgatcatttgctacaagagtgttctcaaatacttcttcctgcctgtcaagggtttcagtggaggggctgagagcagtgctggcatggttttctgcctgagattctgtcagtgtcacacctaatgggcaacaatgactgtctgatataatcacatggtcttctttgtcagtcatagtaatcaagagctggctgcactggttgcatcgttctgggactggcttcagatcctttccactaagagtccagtcatctgaaaattctccttcatagatagtatcatcttcggaaagcaaaaccccatttcccatcattttattaaggtgaaagttgccctcgtagtataatccaaactgggtaaccaccacaccattcccttgacacacatcatcttgccacattcccatatacttttcccccccgcggtttgactctagaggatccccacgaagtttttgcgctggatgtggctgcccggcaccgggtgcagtttgcgatgccggagtctgatgcggttgcgatgctgaaacaattatcctgagaataaatgccttggcctttatatggaaatgtggaactgagtggatatgctgtttttgttgcccgctttccagtcgggaaacctgtcgtgccagctgcattaatgaatcggccaacgcgcggggagaggcggtttgcgtattgggcgccagggtggtttttcttttcaccagtgagacgggcaacagctgattgcccttcaccgcctggccctgagagagttgcagcaagcggtccacgctggtttgccccagcaggcgaaaatcctgtttgatggtggttccgaaatcggcaaaatccctaggcagaacatcgccgtgccccagctgcccttccttccctttcccccaggtccacacttctgttctcagagaaggcaggagcgcatctgcttctccactgtatgtgggggtcagaaccactgtcctcgttttcacccgtgcagcctttcttaagagcccgcggtttggctctagaggatccccgaaacagtttgctttgtatttggtttcctctgtcttatggggcagctggggatggaagtgtgtgagacccaggaaggggaaggaatgaggaccctcgcttgggccagaggctgctgcagcacccagcagcagcaccatttctaccacttcctccccttcacagagctgctgcaatactgcctgagatggcactggcttttcaccatgctctgagtcctctcttactgaatgatctgacagtttccgtaggtattcattgactgcttgggtgtcagggtatgatggtatgtttctggcagaggaaatttcagttgttcccatgacattttgttgagaggacatggcatcgctgcttgtgatctgagcacttactgcattcagttcagtagcaacagactgatcatttgctacaagagtgttctcaaatacttcttcctgcctgtcaagggtttcagtggaggggctgagagcagtgctggcatggttttctgcctgagattctgtcagtgtcacac

SEQ ID NO: 124773 - DNA, 729 bp, Homo sapiens
atggtggattcgttaattgcgcgcgtaggagtaatggctcgcggtaatgccattactttgcctgtatgtggtcgggatgtgaagtttactcttgaagtgctccggggtgatagtgttgagaagacctctcgggtatggtcaggtaatgaacgtgaccaggagctgcttactgaggacgcactggatgatctcatcccttcttttctactgactggtcaacagacaccggcgttcggtcgaagagtatctgctgctgcacttaccgaaagtgattatcgtgttctggttggcgagctggatgatgagcagatggctgcattatccagattgggtaacgattatcgcccaacaagtgcttatgaacgtggtcagcgttatgcaagccgattgcagaatgaatttgctggaaatatttctgcgctggctgatgcggaaaatatttcacgtaagattattacccgctgtatcaacaccgccaaattgcctaaatcagttgttgctcttttttctcaccccgacccccacactacgttccgccattcctatgcgatgcacatgctgtatgccggtataccgctgaaagttctgcaaagcctgatgggacataagtccatcagttcaacggaagtctacacgaaggtttttgcgctggatgtggctgcccggcaccgggtgcagtttgcgatgccggagtctgatgcggttgcgatgctgaaacaattatcctga

SEQ ID NO: 124774 - DNA, 1599 bp, Homo sapiens; identical to SEQ ID NO: 118119

SEQ ID NO: 124775 - DNA, 1575 bp, Homo sapiens
atggagcatctaaatccacaaagtaaagatccccgcggggaccctcactacgttgaagacaaaggccataaataccttgtattcgaagccaacacgggaacagaaaacggataccaaggcgaagaatctttatttaacaaagcgtactacggcggcggcacgaacttcttccgtaaagaaagccagaagcttcagcagagcgctaaaaaacgcgatgctgagttagcgaacggcgccctcggtatcatagagttaaataatgattacacattgaaaaaagtaatgaagccgctgatcacttcaaacacggtaactgatgaaatcgagcgcgcgaatgttttcaaaatgaacggcaaatggtacttgttcactgattcacgcggttcaaaaatgacgatcgatggtattaactcaaacgatatttacatgcttggttatgtatcaaactctttaaccggcccttacaagccgctgaacaaaacagggcttgtgctgcaaatgggtcttgatccaaacgatgtgacattcacttactctcacttcgcagtgccgcaagccaaaggcaacaatgtggacccggatgtcgtcatggtgggggaaattcgtgatacagaaaccgcgcagattgcggttcaggcctcgctcaccggccatctggtactctcaacactccacactaacagtgcatcaggcgcagtgacccggctccgcgacatgggcgtcgaatcattcctgctttcgtcttccctggcagggattatcgcgcaacgtctggttcgtcgcctgtgtccgcaatgccgacaattcacgcccgtatcaccccaacaagcgggtagatccccgttcgagcctgatgtacgtattttgcttaccaaatacagcaatagtaatggctctcagtccccgtggatggaggagcaaattcgggatgcctggggaagcatggttctaaaaaatgttgtacgtgaaacggatgaagttggtaaaggtcagatccggatgagaactgtttttgaacaggccattgatcaacgctcttcaactgatacttcgttatcgacaccagctgccccgatggtggattcgttaattgcgcgcgtaggagtaatggctcgcggtaatgccattactttgcctgtatgtggtcgggatgtgaagtttactcttgaagtgctccggggtgatagtgttgagaagacctctcgggtatttattcgcgataagctcatggagcggcgtaaccgtcgcacaggaaggacagagaaagcgcggatctgggaagtgacggacagaacggtcaggacctggattggggaggcggttgccgccgctgctgctgacggtgtgacgttctctgttccggtcacaccacatacgttccgccattcctatgcgatgcacatgctgtatgccggtataccgctgaaagttctgcaaagcctgatgggacataagtccatcagttcaacggaagtctacacgaaggtttttgcgctggatgtggctgcccggcaccgggtgcagtttgcgatgccggagtctgatgcggttgcgatgctgaaacacttatcctga

SEQ ID NO: 124776 - DNA, 1107 bp, Homo sapiens; identical to SEQ ID NO: 123297

SEQ ID NO: 124777 - DNA, 807 bp, Homo sapiens; identical to SEQ ID NO: 124397

SEQ ID NO: 124778 - DNA, 870 bp, Homo sapiens
atgaaactcatggaaacacttaaccagtgcataaacgctggtcatgaaatgacgaaggctatcgccattgcacagtttaatgatgacagcccggaagcgaggaaaataacccggcgctggagaataggtgaagcagcggatttagttggggtttcttctcaggctatcagagatgccgagaaagcagggcgactaccgcacccggatatggaaattcgaggacgggttgagcaacgtgttggttatacaattgaacaaattaatcatatgcgtgatgtgtttggtacgcgattgcgacgtgctgaagacgtatttccaccggtgatcggggttgctgcccataaaggtggcgtttacaaaacctcagtttctgttcatcttgctcaggatctggctcctgaagggctacgtgttttggctcgtggaagttggcccagggcttcccggtatcaacagggacaccaggatttatttattctgcgaagtgatcttccgtcacaggtatttattcgcgataagctcatggagcggcgtaaccgtcgcacaggaaggacagagaaagcgcggatctgggaagtgacggacagaacggtcaggacctggattggggaggcggttgccgccgctgctgctgacggtgtgacgttctctgttccggtcacaccacatacgttccgccattcctatgcgatgcacatgctgtatgccggtataccgctgaaagttctgcaaagcctgatgggacataagtccatcagttcaacggaagtctacacgaaggtttttgcgctggatgtggctgcccggcaccgggtgcagtttgcgatgccggagtctgatgcggttgcgatgctgaaacaattatcctga

SEQ ID NO: 124779 - DNA, 825 bp, Homo sapiens
atggtggattcgttaattgcgcgcgtaggagtaatggctcgcggtaatgccattactttgcctgtatgtggtcgggatgtgaagtttactcttgaagtgctccggggtgatagtgttgagaagacctctcgggtatggtcaggtaatgaacgtgaccaggagctgcttactgaggacgcactggatgatctcatcccttcttttctactgactggtcaacagacaccggcgttcggtcgaagagtatctggtgtcatagaaattgccgatgggagtcgccgtcgtaaagctgctgcacttaccgaaagtgattatcgtgttctggttggcgagctggatgatgagcagatggctgcattatccagattgggtaacgattatcgcccaacaagtgcttatgaacgtggtcagcgttatgcaagccgattgcagaatgaatttgctggagaacttagtgtatttattcgcgataagctcatggagcggcgtaaccgtcgcacaggaaggacagagaaagcgcggatctgggaagtgacggacagaacggtcaggacctggattggggaggcggttgccgccgctgctgctgacggtgtgacgttctctgttccggtcacaccacatacgttccgccattcctatgcgatgcacatgctgtatgccggtataccgctgaaagttctgcaaagcctgatgggacataagtccatcagttcaacggaagtctacacgaaggtttttgcgctggatgtggctgcccggcaccgggtgcagtttgcgatgccggagtctgatgcggttgcgatgctgaaacaattatcctga

SEQ ID NO: 124780 - DNA, 945 bp, Homo sapiens; identical to SEQ ID NO: 118389

SEQ ID NO: 124781 - DNA, 894 bp, Homo sapiens
ctacacgaaggtttttgcgctggatgtggctgcccggcaccgggtgcagtttgcgatgccggagtctgatgcggttgcgatgctgaaacaattatcctgagaataaatgccttggcctttatatggaaatgtggaactgagtggatatgctgtttttgtccggcctttgtcttcaacgtagtgagggtctctcagcgtatggttgtcgccgggtgtataattgccttcatcgataaactgctgaacgttctgatatgtttttccgtctccgtcaaaaatcgttttgtgatcttccactccgttgattttgagtgtgtcatcagattttgacacatttacctgcgctgttgtcaggctttgtttgccgtaatgtttaccggaatagtcagtgtagaataaacggatttttccgtcagatgtaaaggttgcagaaccggaccattcttgcgtctgatctttcaggatcggatcgttggcgtcgaacttatcgctgtctttaaagacacggcccgcgtttttccagctgtcgattgagttgtcgccgaccttttgataaaacatgtagattgatgtgtcatcagcgtctttcgggcttcccgcaagagcaaacacaacgtgatagccgttgtattcagctactgttccgtcagcgttttgcagcggccagctgtcccacacatcaagtccttttgcagactcaatatttttaatcgttgattgatcgaattgaggcacttggtatttttcgttttgctgctgtttagggatctgcagcatatcatggcgtgtaatatgagagacgccgtacgtttctttgtatgctttttggttattttctttcgcgaagcttgagtcgctcctcctgccagaagtgcagtcgaacttgagttgcat

SEQ ID NO: 124782 - DNA, 882 bp, Homo sapiens
  misc_feature (1)...(882): n = a,t,c or g
gcccaaggttggcatgcccggcaggggtccctttttaaaggattttgggaaaaggtgcgggccagacccgggccgagtccttggtatggggaaggggggttcccgcgcgctgctgctaaccgggtggcccttttcttgttccgggtccccccccctaggttcggccctttcttatgcaaggcccatggctgtagccgggtatcccgctaaaagttctgcaaagcctgatgggccataagtccatcagttcaccggaagtctaccggaaggtttttgcgctgaatgtggctgcccgccaccgggtgcagtttgcgatgccggagtttgatgcggttgcgatgctgaaacaattatcctgagaataaatgccttggcctttatatggaaatgtggaactgagtggatatgctgtttttgtctgttaaacagagaagctggctgttatccactgagaagcgaacgaaacagtcgggaaaatctcccattatcgtagagatccgcattattaatctcaggagcctgtgtagcgtttataggaagtagtgttctgtcatgatgcctgcaagcggtaacgaaaacgatttgaatatgccttcaggaacaatagaaatcttcgtgcggtgttacgttgaagtggagcggattatgtcagcaatggacagaacaacctaatgaacacagaaccatgatgtggtctgtccttttacagcnnnnnnnnnnnnnnnnnnnnnnnnnnnnnnnnnnnnnnnnnnnnnnnnnnnnnnnnnaccagggaacagcacttatatattctgcttacacacgatgcctgaaaaaacttcccttggggttatccacttatccacggggatatttttataattattttttttatagttttta

SEQ ID NO: 124783 - DNA, 724 bp, Homo sapiens
tgattatcgtgttctggttggcgagctggatgatgagcagatggctgcattatccagattgggtaacgattatcgcccaacaagtgcttatgaacgtggtcagcgttatgcaagccgattgcagaatgaatttgctggaaatatttctgcgctggctgatgcggaaaatatttcacgtaagattattacccgctgtatcaacaccgccaaattgcctaaatcagttgttgctcttttttctcaccccggtgaactatctgcccggtcaggtgatgcacttcaaaaagcctttacagataaagaggaattacttaagcagcaggcatctaaccttcatgagcagaaaaaagctggggtatttattcgcgataagctcatggagcggcgtaaccgtcgcacaggaaggacagagaaagcgcggatctgggaagtgacggacagaacggtcaggacctggattggggaggcggttgccgccgctgctgctgacggtgtgacgttctctgttccggtcacaccacatacgttccgccattcctatgcgatgcacatgctgtatgccggtataccgctgaaagttctgcaaagcctgatgggacataagtccatcagttcaacggaagtctacacgaaggtttttgcgctggatgtggctgcccggcaccgggtgcagtttgcgatgccggagtctgatgccgttgcgatgctgaaacaattatcctga

SEQ ID NO: 124784 - DNA, 1026 bp, Homo sapiens
atggtaaatattacacatgtggcagtaattcttgcagttcttattgggaaggaggatgttaagcgtgacaccatgaagaggtggtcgggaaaacctgtgcggcccactggcattaaggaattcgcccaccccgcggggaaaaggcggtttgccgttatggggccccaagtccgacaatctaaaaacttgtcacacttcacagtgtgtctgtcatggcggaaacagcggttatcaatcacaagaaacgtaaaaatagcccgcgaatcgtccagtcaaacgaccttactgaggcggtttatagtctctcccgggatcaaaaacgtgcgcggtgggtgttcgttgaccagatcagaaaatctgatggcaccctacaggaacatgacggtactctgcgagatccatgttgctaaatatgctgaaatattcggattgacctctgcggaagccagtaaggatatacggcaggcattgaagagtttcgcggggaaggaagtggttttttatcgccctgaagaggatgccggcgatgaaaaaggctatgaatcttttccttggtttatcaaacgtgcgcacagtccatccagaaggctttacagtggacatatcaacccatatctcattcccttctttatcgggttacagaaccggtttacgcaggtatttattcgcgataagctcatggagcggcgtaaccgtcgcacaggaaggacagagaaagcgcggatctgggaagtgacggacagaacggtcaggacctggattggggaggcggttgccgccgctgctgctgacggtgtgactttctctgttccggtcacaccacatacgttgcgccattcctatgcgatgcacatgctgtatgccggtataccgctgaaagttctgcaaagcctgatgggacataagtccatcagttcaacggaagtctacacgaaggtttttgcgctggatgtggctgcccggcaccgggtgcagtttgcgatgccggagtctgatgcggttgcgatgctgaaacaattatcctga

SEQ ID NO: 124785 - DNA, 1317 bp, Homo sapiens
atgaatgctcatccggagttccgtatggcaatgaaagacggtgagctggtgatatgggatagtgttcacccttgttacaccgttttccatgagcaaactgaaacgttttcatcgctctggagtgaataccacgacgatttccggcagtttctacacatatattcgcaagatgtggcgtgttacggtgaaaacctggcctatttccctaaagggtttattgagaatatgtttttcgtctcagccaatccctgggtgagtttcaccagttttgatttaaacgtggccaatatggacaacttcttcgcccccgttttcaccatgggcaaatattatacgcaaggcgacaaggtgctgatgccgctggcgattcagacaccggcgtttggtcgaagagtatatgctgtcatagaaattgccgatgggagtcgccgtcgtaaagctgctgcacttaccgaaagtgattatcgtgttctggttggcgagctggatgatgagcagatggctgcattatccagattgggtaacgattatcgcccatcttttgcttatgaacgtggtcagcgttatgcaagccgattgcagaatgaatttgctggaaatatttctgcgctggctgatgcggaaaatatttcacgtaagattattacccgctgtatcaacaccgccaaattgcctaaatcagttgttgctcttttttctcaccccggtgaactatctgcccggtcaggtgatgcacttcaaaaagcctttacagataaagaggaattacttaagcagcaggcatctaaccttcatgagcagaaaaaagctggggtgatatttgaagctgaagaagttatcactcttttaacttctgtgcttaaaacgtcatctgcatcaagaactagtttaagctcacgacatcagtttgctcctggagcgacagtattgtataagggcgataaaatggtatttattcgcgataagctcatggagcggcgtaaccgtcgcacaggaaggacatataaagcgcggatctgggaagtgacggacagaacggtcaggacctggattggggaggcggttgccgccgctgctgctgacggtgtgacgttctctgttccggtcacaccacatacgttccgccattcctatgcgatgcacatgctgtatgccggtataccgctgaaagttctgcaaagcctgatgggacataagtccatcagttcaacggaagtctacacgaaggtttttgcgctggatgtggctgcccggcaccgggtgcagtttgcgatgccggagtctgatgcggttgcgatgctgaaacaattatcctga

SEQ ID NO: 124786 - DNA, 1131 bp, Homo sapiens
gatcttgatgctggtgtaagtgaacattcaggtgattggttggatcaggattcagtttcagatcagtttagtgtagaatttgaagttgaatctctcgactcagaagattatagccctagtgaaggagggcaagaactctcagatgaagatgatgaggtatatcaagttactgtgtatcaggcaggggagagtgatacagattcatttgaagaagatcctgaaatttccttagctgactattggaaatgcacttcatgcaatgaaatgaatcccccccttccatcacattgcaacagatgttgggcccttcgtgagaattggcttcctgaagatacagggaaagataaaggggaaatctctgagaaagccaaactggaaaactcaacacaagctgaagagggctttgatgttcctgattgtaaaaaaactatagtgaatgattccagagagtcatgtgttgaggaaaatgatgataaaattacacaagcttcacaatcacaagaaagtgaagactattctcagccatcaacttctagtagcattatttatagcagccaagaagatgtgaaagagtttgaaagggaagaaacccaagacaaagaagagagtgtggaatctagtttgccccttaatgccattgaaccttgtgtgatttgtcaaggtcgacctaaaaatggttgcattgtccatggcaaaacaggacatcttatggcctgctttacatgtgcaaagaagctaaagaaaaggaataagccctgcccagtatttattcgcgataagctcatggagcggcgtaaccgtcgcacaggaaggacagagaaagcgcggatctgggaagtgacggacagaacggtcaggacctggattggggaggcggttgccgccgctgctgctgacggtgtgacgttctctgttccggtcacaccacatacgttccgccattcctatgcgatgcacatgctgtatgccggtataccgctgaaagttctgcaaagcctgatgggacataagtccatcagttcaacggaagtctacacgaaggtttttgcgctggatgtggctgcccggctccgggtgcagtttgcgatgccggagtctgatgcggttgcgatgctgaaacaattatcctga

SEQ ID NO: 124787 - DNA, 1614 bp, Homo sapiens
  misc_feature (1)...(1614): n = a,t,c or g
atgtggcgttggcgagagacttcacatgacaactatgataaggagcacctggggaagcccacgctaagggaagcgacccctagggacgcaaggcaaaagctcgcaaccgcacccctgggggaagctaagggaaagcaacgtaacccagggggacccacactccccggtgtgaaagggagagaacagcccctgcaaagggaacaccaagggccaccaagggctaggaagcgaacgggaaaacaactcacccccgaggtaactggaacggatcgtacagctaaaggaaagggtacggacgtgggtacgggagggaacgggggcccaaaggggaacaaaacaaaccccggaaggggacgccaaactttaaaacaccccaacgggaccacttgtggaacctgccacaaacccggaggccccccaagggaacccgaagaaaacaggaggcgggggaccaaggccaacttagggaagccggggggaacaaaacggaaagaaaaggaacaggaagggacggggaccccaccggaagggaacacgagggcgaccgcagggaccgcaaagacccggaggggaaaccaaaagacaccgcagggaaaaccaaaggagagggaaggcaccgggggaaaaaagaaaggggacaggaaaggcaccgcgaagcgaaacgccacacccacgggaacggcgaaacgcacccgcaagggaaggggcaacgaacaccacacgcgaaggggaacgcgtagcgcaacggggggcgaaagaaaaggcgagagagggcggaggggacaaccccagagtggggggggggcgcacaacaaagcggcaaaccgaatgcggaaacgcgagagcgtcggggcgacgcccaaagcccacgcgcacccgaaaccggtaagngggaaggcgaaggcgcgaaggcgaacacgaaagcgcaaaccgcaaacgacgcccaggggacgaccgaacgcccacagcacgaccgagcgaaggacgaaatcagggggaggggcaaacgacaacaccaaactcacgcggaaagacactaccagaccggcacgcacaacaccaacatcacgaaaccgcgggcgcgggcggacgaggcgaaagcggaacagcgcaaaagaacaacgcaaccgagcaacgaacgcaacgccgagcatacgcgaatacgaacaaagcgcaaggcgcacaaggcggaaacggcgaagcgaccaagcggccacagccacatcgaaacgccacatcacgggcgtatttattcgcgataagctcatggagcggtttaaccttcgcacaggaaggacagagaaagcgcggatctgggaagtgacggtcagaacggtcaggacctggattggggaggcggttgccgccgctgctgctgacggtgtgacgttctctgttccggtcacaccacatacgttccgccattcctatgcgatgcacatgctgtatgccggtataccgctgaaagttctgcaaagcctgatgggacataagtccatcagttcaacggaagtctacacgaaggtttttgcgctggatgtggctgcccggcaccgggtgcagtttgcgatgccggagtctgatgcggttgcgatgctgaaacaattatcctga

SEQ ID NO: 124788 - DNA, 1099 bp, Homo sapiens
  misc_feature (1)...(1099): n = a,t,c or g
atccccaagctggaaaaacgcgggccgtgtctttaaagacagcgataagttcgacgccaacgatccgatcctgaaagatcagacgcaagaatggtccggttctgcaacctttacatctgacggaaaaatccgtttattctacactgactattccggtaaacattacggcaaacaaagcctgacaacagcgcaggtaaatgtgtcaaaatctgatgacacactcaaaatcaacggagtggaagatcacaaaacgatttttgacggagacggaaaaacatatcagaacgttcagcagtttatcgatgaaggcaattatacatccggcgacaaccatacgctgagagaccctcactacgttgaagacaaaggccataaataccttgtattcgaagccaacacgggaacagaaaacggataccaaggcgaagaatctttatttaacaaagcgtactacggcggcggcacgaacttcttccgtaaagaaagccagaagcttcagcagagcgctaaaaaacgcgatgctgagttagcgaacggcgccctcggtatcatagagttaaataatgattacacattgaaaaaagtaatgaagccgctgatcacttcaaacacggtaactgatgaaatcgagcgcgcgaatgttttcaaaatgaacggcaaatggtacttgttcactgattcacgcggttcaaaaatgacgatcgatggtattaactcaaacgatatttacatgcttggnatcccccagctcatggagcggcgtaaccgtcgcacaggaaggacagagaaagcgcggatctgggaagtgacggacagaacggtcaggacctggattggggaggcggttgccgccgctgctgctgacggtgtgacgttctctgttccggtcacaccacatacgttccgccattcctatgcgatgcacatgctgtatgccggtataccgctgaaagttctgcaaagcctgatgggacataagtccatcagttcaacggaagtctacacgaaggtttttgcgctggatgtggctgcccggcaccgggtgcagtttgcgatgccggagtctgatgcggttgcgatgctgaaacaattatcctga

SEQ ID NO: 124789 - DNA, 939 bp, Homo sapiens
atgttgcctttttatcctcgaagagcctctgtttgtcatgtagcttgtgataaccacattgttgcctttggcttgcggcactgcgaagtgagagtaagtgaatgtcacatccgtttggatcaagacccatttgcagcacaagccctgttttgttcaacggcttgctttgattctctgctggataagaagatcacctctgtggcaccagctgccggcaaagctgcttgtcgatgtccccacagaagctgcacagaggaaacgacttggcaagtggctgcaagaccagcagaatccctggttgcccagtgtctcctgccatgcgtgttttactctaagcaggctgccttccgcaacaaccacgtggagtggcccctgaatgacacctggagtgaaaacttcatggaaagcaacgtccaccctcccttcttctctcattgcttctttctatttgacgtggccttaaggaagctcacgttatcccataacacaaggcagtgttggcccagggcttcccggtatcaacagggacaccaggatttatttattctgcgaagtgatcttccgtcacaggtatttattcgcgataagctcatggagcggcgtaaccgtcgcacaggaaggacagagaaagcgcggatctgggaagtgacggacagaacggtcaggacctggattggggaggcggttgccgccgctgctgctgacggtgtgacgttctctgttccggtcacaccacatacgttccgccattcctatgcgatgcacatgctgtatgccggtataccgctgaaagttctgcaaagcctgatgggacataagtccatcagttcaacggaagtctacacgaaggtttttgcgctggatgtggctgcccggcaccgggtgcagtttgcgatgccggagtctgatgcggttgcgatgctgaaacaattatcctga

SEQ ID NO: 124790 - DNA, 1059 bp, Homo sapiens
  misc_feature (1)...(1059): n = a,t,c or g
atgcagctgcagagtattcagggtattagggccctcgactatagggtcaccgtcgacagcgacacacttgcatcggatgcaacccggttaacgtgccggcacgggctgagtaccacgtattttgtccacataaccgcgcgcaaaatgttgtggataagcatgacacagcagcaattcacagcatgcatacaaccgccacccgaggttactggcgtctacagctggccgctgcaaaacgctgacggaacagtagctgaatacaacggctatcacgttgtgtttgctcttgcgggaagcccgaaagacgctgatgacacatcaatctacatgttttatcaaaaggtcggcgacaactcaatcgacagctggaaaaacgcgggccgtgtctttaaagacagcgataagttcgacgccaacgatccgatcctgaaagatcagacgcaagaatggtccggttctgcaacctttacatctgacggaaaaatccgtttattctacactgactattccggtaaacattacggcaaacaaagcctgacaacagcgcaggtaaatgtgtcaaaatctgatgacacactcaaaatcaacggagtggaagatcacaaaacgatttttgacggagacggaaaaacatatcagaacgttcagcagtttatcgatgaaggcaattatacatccggcgacaaccatacgctgagagaccctcactacgttgaagacaaggccataaataccttgtattcgaagccaacacgggaacaganaaacgataccaaggcgaagaatctttatttaacaaaacgtactacggcggcggcacgaacttcttccaatccccctgttccggtcacaccacatacgttccgccattcctatgcgatgcacatgctgtatgccggtataccgctgaaagttctgcaaagcctgatgggacataagtccatcagttcaacggaagtctacacgaaggtttttgcgctggatgtggctgcccggcaccgggtgcagtttgcgatgccggagtctgatgcggttgcgatgctgaaacaattatcctga

SEQ ID NO: 124791 - DNA, 1425 bp, Homo sapiens; identical to SEQ ID NO: 119112

SEQ ID NO: 124792 - DNA, 1723 bp, Homo sapiens
atggtggattcgttaattgcgcgcgtaggagtaatggctcgcggtaatgccattactttgcctgtatgtggtcgggatgtgaagtttactcttgaagtgctccggggtgatagtgttgagaagacctctcgggtatggtcaggtaatgaacgtgaccaggagctgcttactgaggacgcactggatgatctcatcccttcttttctactgactggtcaacagacaccggcgttcggtcgaagagtatctggtgtcatagaaattgccgatgggagtcgccgtcgtaaagctgctgcacttaccgaaagtgattatcgtgttctggttggcgagctggatgatgagcagatggctgcattatccagattgggtaacgattatcgcccaacaagtgcttatgaacgtggtcagcgttatgcaagccgattgcagaatgaatttgctggaaatatttctgcgctggctgatgcggaaaatatttcacgtaagattattacccgctgtatcaacaccgccaaattgcctaaatcagttgttgctcttttttctcaccccggtgaactatctgcccggtcaggaaagtgcatggtacccactgagtcagctccccatgtcacagtgcttggctgccagtgtggccccctgggcctggagaatggtctcaaggagggatatttggggaggtctaccttagatatggaggcttggcagcccctccaggagttttatttacataatttgatcacaggacagatgtttgaaattgctgttactcagaacaattccaagatcaacagctcctcgccaacaacagaacaaagctggatggagaatgactttgacgagttaacagaagtaggcttcagaaggtcagtaataacaaacttctctgagctaaaggagcatgttctaacccatcgcaaggaagctaaaaaccttgaaaaaagcgatggggagaatggaaccaagttggaaaacacttttcaggatattatccaggagaacttccccaacctagcaaggcaggtcaacattcaaattcaggagatacagaaaacaccacaaagatattcctcgagaagagcaaccccaggacacataattgtcaggttcaccaaggttgaaatgaaggaaaaagtgttaagggcagccagagagaaagcttccttagctcctgaaaatctcgataactcaaaaatacgcccggtagtgatcttatttcattatggtgaaagttggaacctcttacgtgccgatcaacgtctcattttcgccaaaagttggccgcagggcttcccggtatcaacagggacaccaggatttatttattctgcgaagtgatcttccgtcacaggtatttattcgcgataagctcatggagcggcgtaaccgtcgcacaggaaggacagagaaagcgcggatctgggaagtgacggacagaacggtcaggacctggattggggaggcggttgccgccgctgctgctgacggtgtgacgttctctgttccggtcacaccacatacgttccgccattcctatgcgatgcacatgctgtatgccggtataccgctgaaagttctgcaaagcctgatgggacataagtccatcagttcaacggaagtctacacgaaggtttttgcgctggatgtggctgcccggcaccgggtgcagtttgcgatgccggagtctgatgcggttgcgatgctgaaacaattatcctga

SEQ ID NO: 124793 - DNA, 4313 bp, Homo sapiens
atggacaacttcttcgcccccgttttcaccatgggcaaatattatacgcaaggcgacaaggtgctgatgccgctggcgattcaggttcatcatgccgtttgtgatggcttccatgtcggcagaatgcttaatgaattacaacagtactgcgatgagtggcagggcggggcggtcaccgtcgacagcgacacacttgcatcggatgcagcccggttaacgtgccggcacggcctgtgtaaccagtgtgacaatctaaaaacttgtcacacttcacatggatctgtcatggcggaaacagcggttatcaatcacaagaaacgtaaaaatagcccgcgaatcgtccagtcaaacgacctcactgaggcggcatatagtctctcccgggatcaaaaacgtatgctgtatctgttcgttgaccagatcagaaaatctgatggcaccctacaggaacatgacggtatctgcgagatccatgttgctaaatatgctgaaatattcggattgacctctgcggaagccagtaaggatatacggcaggcattgaagagtttcgcggggaaggaagtggttttttatcgccctgaagaggatgccggcgatgaaaaaggctatgaatcttttccttggtttatcaaacgtgcgcacagtccatccagagggctttacagtgtacatatcaacccatatctcattcccttctttatcgggttacagaaccgggttacgcagtttcgggttagtgaaacaaaagaaatcaccaatccgtatgccatgcgtttatacgaatccctgtgtcagtatcgtaagccggatggctcaggcatcgtctctctgaaaatcgactggatcatagagcgttaccagctgcctcaaagttaccagcgtatgcctgacttccgccgccgcttcctgcaggtctgtgttaatgagatcaacagcagaactccaatgcgcctctcatacattgagaaaaagaaaggccgccagacgactcatatcgatgttcagattgaaactgatggaaaactcaaccagtgcataaacgctggtcatgaaatgacgaaggctatcgccattgcacagtttaatgatgacagcccggaagcgaggaaaataacccggcgctggagaataggtgaagcagcggatttagttggggtttcttctcaggctatcagagatgccgagaaagcagggcgactaccgcacccggatatggaaattcgaggacgggttgagcaacgtgttggttatacaattgaacaaattaatcatatgcgtgatgtgtttggtacgcgattgcgacgtgctgaagacgtatttccaccggtgatcggggttgctgcccataaaggtggcgtttacaaaacctcagtttctgttcatcttgctcaggatctggctctgaaggggctacgtgttttgctcgtggaaggtaacgacccccagggaacagcctcaatgtatcacggatgggtaccagatcttcatattcatgcagaagacactctcctgcctttctatcttggggaaaaggacgatgtcacttatgcaataaagcccacttgctggccggggcttgacattattccttcctgtctggctctgcaccgtattgaaactgagttaatgggcaaatttgatgaaggtaaactgcccaccgatccacacctgatgctccgactggccattgaaactgttgctcatgactatgatgtcatagttattgacagcgcgcctaacctgggtatcggcacgattaatgtcgtatgtgctgctgatgtgctgattgttcccacgcctgctgagttgtttgactacacctccgcactgcagtttttcgatatgcttcgtgatctgctcaagaacgttgatcttaaagggttcgagcctgatacctcagacctagaccctatgctgagtatgacatttggtgtagtcatggccctggacctgacaattggcatagttggcaggatgagtttggcagctgtatcatctgtcacggacttgccagaccacttgacaacggaactgggacagtctaccgagagccaggaacagcttgccttcgtggaagggtggcgatggactttcacagtattggctgcagagctgtattcagtttctcggtccaagttttactggtgcggcccagccctaccgagagtacccgaatacacgtctgcagaggacgcgggcattgggccggggaaacaggactgccgaggccaccttctccatattctggttcctgatgctgggcgtcagggcgcccctgcacgtcgggcagcagctcaacttctggcggcattggttacacaccaggtgcccggcctggcactgcagaataggaggcaggacatagtcaaagcagaccggacactcgaagagcgaggtcagctcgtggtgctgcggggacaccgggccggccccgccgccgccgccggggcccgagatcaccgccgccgcggcgggcaccgcggacgagccggggcccgcagccgagatggtggcggcggccgggggcgcagccggggacggagtgtgctggggctgcggcggcggctgcttgctgcagggtttattagcgctggggccggtggaggacgggcggctcatcgcgctccgaaccaaccatggaactgcgggcgcctgcctggccgcggggccgcccgggtcaaggcggtgcgcgccccgcgggcagcgagctccgaggcaacgccacggcgcccagcccagcctgtctatgcaggaacatcttgtgccgtatggaagaaagtcccaacacagatggaaaaagaccagagactggcagcaataagagaggaaaagctggggataaatggtggaagattaagaccggtatttattcgcgataagctcatggagcggcgtaaccgtcgcacaggaaggacagagaaagcgcggatctgggaagtgacggacagaacggtcaggacctggattggggaggcggttgccgccgctgctgctgacggtgtgacgttctctgttccggtcacaccacatacgttccgccattcctatgcgatgcacatgctgtatgccggtataccgctgaaagttctgcaaagcctgatgggacataaggtcatcagttcaacggatttctacacgaaggtttttgcgctggatgtggctgcccggcaccgggtgcagtttgcgatgccggagtctgatgcggttgcgatgctgaaacaattatcctgagaataaatgccttggcctttatatggaaatgtggaactgagtggatatgctgtttttgtcccagtggtgcctggaaccccagcaagacagaaccatttactctcctggaaaggaggctgaagccagggagccaagtgttcttgctcagcaggtcccactcccatggagcccagcaagctaagaaccactggcttgaaattctcactgccagcacagcagtctggagtcgacctgggatgatggagcttggtcgggggaggggcatctgccattactgagactttaggaggcgattttcctctgacagtgctaaggagactgggaggtttggattgggcagaattcaccacagtgcagtgaagcagctggagccagactgcttctccagatttctcctcactgggagagcatctttttttcaatgtgtaatcattatttaactctatgataccgagggcgccgttcgctaactcagcatcgcgttttttagcgctctgctgaagcttctggctttctttacggaagaagttcgtgccgccgccgtagtacgctttgttaaataaagattcttcgccttggtatccgttttctgttcccgtgttggcttcgaatacaaggtatttatggcctttgtcttcaacgtagtgagggtctctcagcgtatggttgtcgccggatgtataattgccttcatcgataaactgctgaacgttctgcgctgttgtcaggctttgtttgccgtaatgtttaccggaatagtcagtgtagaataaacggatttttccgtcagatgtaaaggttgcagaaccggaccattcttgcgtctgatctttcaggatcggatcgttggcgtcgaacttatcgctgtctttaaagacacggcccgcgtttttccagctgtcgattgagttgtcgccgaccttttgataaaacatgtagattgatgtgtcatcagcgtctttcgggcttcccgcaagagcaaacacaacgtgatagccgttgtattcagctactgttccgtcagcgttttgcagcggccagcagcatctgttgtttttgacttttttaataatagccat

SEQ ID NO: 124794 - DNA, 7132 bp, Homo sapiens
  misc_feature (1)...(7132): n = a,t,c or g
atgaacatgaacatcaaaaaaattgtaaaacaagccacagttctgacttttacgactgcacttctggcaggaggagcgactcaagccttcgcgaaagagaatgaccaaaaagcatacaaagaaacgtacggcgtctctcatattacacgccatgatatgctgcagatccctaaacagcagcaaaacgagaaataccaaaggtccccaggccgccggcaggagcagctgggccaattccctggccgggagcggaaggggatggcgtcgggcctgggctccccgtccccctgctcggcgggcagtgaggaggaggatatggatgcacttttgaacaacagcctgcccccaccccacccagaaaatgaagaggacccagaagaggatttgtcagaaacagagactccaaagctcaagaagaagaaaaagcctaagaaacctcgggaccctaaaatccctaagagcaagcgccaaaaaaaggagcgtatgctcttatgccggcagctgggggacagctctggggaggggccagagtttgtggaggaggaggaagaggtggctctgcgctcagacagtgagggcagcgactatactcctggcaagaagaagaagaagaagcttggacctaagaaagagaagaagagcaaatccaagcggaaggaggaggaggaggaggatgatgatgatgatgattcaaaggagcctaaatcatctgctcagctcctggaagactggggcatggaagacattgaccacgtgttctcagaggaggattatcgaaccctcaccaactacaaggccttcagccagtttgtcagacccctcattgctgccaaaaatcccaagattgctgtctccaagatgatgatggttttgggtgcaaaatggcgggagttcagtaccaataaccccttcaaaggcagttctggggcatcagtggcagctgcggcagcagcagcggtagctgtggtggagagcatggtgacagccactgaggttgcaccaccacctccccctgtggaggtgcctatccgcaaggccaagaccaaggagggcaaaggtcccaatgctcggaggaagcccaagggcagccctcgtgtacctgatgccaagaagcctaaacccaagaaagtagctcccctgaaaatcaagctgggaggttttggttccaagcgtaagagatcctcgagtgaggatgatgacttagatgtggaatctgacttcgatgatgccagtatcaatagctattctgtttctgatggttccaccagccgtagtagccgcagccgcaagaaactccgaaccactaaaaagaaaaagaaaggcgaggaggaggtgactgctgtggatggttatgagacagaccaccaggactattgcgaggtgtgccagcaaggcggtgagatcatcctgtgtgatacctgtccccgtgcttaccacatggtctgcctggatcccgacatggagaaggctcccgagggcaagtggagctgcccacactgcgtgagtgtctggccattgtggccccttggaacccatgagaagaagggtgggacagtaaagctcttcggggcctggatggaaatggaaatgctggtgctgcgggttgagaaggaaggcatccagtgggaagctaaagaggacaattcggagggtgaggagatcctggaagaggtatttattcgcgataagctcatggagcggcgtaaccgtcgcacaggaaggacagagaaagcgcggatctgggaagtgacggacagaacggtcaggacctggattggggaggcggttgccgccgctgctgctgacggtgtgacgttctctgttccggtaccccccccaatcggttccgccattcctatgcgatgcacatgctgtagcccggtataccgttgaaagtttttgcaaagcttgatgggacataagtccatcagttcaacggaagtctacacgaaggtttttgcgctggatgtggctgcccggcaccgggtgcagtttgcgatgccggagtctgatgcggccaggcgaagacacagaagcctttccaccctcagcccaaccctgatacacagcctctatgtgcaaccccaagtaggggacacaaatagatcgctcaaagcaggaagagtggggatcgtcagaagacttgggccaagagctgttcagatcccagagccaactgtgggaaatgtcgtcagtgatattatagcccaggacttgagccttggctgggaaacaggcgtacaccccaactgggtacaagacagtgcacaagaacagcccgaccaccgcgtgactcgacgcgtcggcgccaccccgaagacaccggggtcaacaagcgcaagccacccgcacactgtccggaaggaacgccccccacttcaaagcgcgcggcgggacaaacggggggcccggcccttaaaggacggcaataagttccccggccgaccacccgatccggaaagaaccgagggcaagaatggacccggttccgcaacccttgacatcggcggaaaaagtccgtcctatctgacaccanctattccggtaaaacattgcggcaaacgaagcctgacaacagcgcaggtaaatgtgtcaaaatctgatgacacacgcaaaatcaacggagtggaagatcacaaaacgatttttgacggagacggaaaaacatatcagaacgttcagcagtttatcgatgaaggcaattatacatccggcgacaaccatacgctgagagacccccactacgttgaagacaaaggccataaataccttctagggtggcagcaggtgggctggcagcacacagactggcagcactggggcttgcagcagctggacacacagcagctggggcggcagcagctggagatgcagcagctagggtggcagcaggtgggctggcagcacacagactggcagcactggggcttgcagcagctggacacacagcagctggggcgacagcagctggagatgcagcatctggggcggcagcagggctcagcctcaatgtatcacggatgggtaccagatcttcatattcatgcagaagacactctcctgcctttctatcttggggaaaaggacgatgtcacttatgcaataaagcccacttgctggccggggcttgacattattccttcctgtctggctctgcaccgtattgaaactgagttaatgggcaaatttgatgaaggtaaactgcccaccgatccacacctgatgctccgactggccattgaaactgttgctcatgactatgatgtcatagttattgacagcgcgcctaacctgggtatcggcacgattaatgtcgtatgtgctgctgatgtgctgattgttcccacgcctgctgagttgtttgactacacctccgcactgcagtttttcgatatgcttcgtgatctgctcaagaacgttgatcttaaagggttcgagcctgatgtacgtattttgcttaccaaatacagcaatagtaatggctctcagtccccgtggatggaggagcaaattcgggatgcctggggaagcatggttctaaaaaatgttgtacgtgaaacggatgaagttggtaaaggattttcgcctgctggggcaaaccagcgtggaccgcttgctgcaactctctcagggccaggcggtgaagggcaatcagctgttgcccgtctcactggtgaaaagaaaaaccaccctggcgcccaatacgcaaaccgcctctccccgcgcgttggccgattcattaatgcagctggcacgacaggtttcccgactggaaagcgggcaatggagttaaaagttatttgccagtcctcagtaactgcagacacaggagacaatgttggaaacaatgttggtgaaatggaagtatcttcccttttgatagctgaagctgggctgtcatatcagaacacaatagtcaacatcagcatgtttctcacaaaggttgaattattcagtctttacacgtgggtcaagacaaaaacagcatatccactcagttccacatttccatataaaggccaaggcatttattctcaggataatggggggtctttagagtcccccacagggcttcaagcacgagttgcacggcccgtaccgcgcataagccggcgggattttgccgatttcggaaccaccatcaaacaggattttcgcctgctggggcaaaccagcgtggaccgcttgctgcaactctctcagggccaggcgtgggccatcgccctgatagacggtttttcgcctttgacgttggagtccacgttctttaatagtggatcttggtccaaactggaacaccactcaaccctatctcgggctattcttttgatttataagggattttgccgatttcggaaccaccatcaaacaggattttcgcctgctggggcaaaccagcgtggaccgcttgctgcaactctctcagggccaggcggtgaagggcaatcagctgttgcccgtctcactggtgaaaagaaaaaccaccctggcgcccaatacgcaaaccgcctctccccgcgcgttggccgattcattaatgcagctggcacgacaggtttcccgactggaaagcgggcagtgagcgcaacgcaattaatcgtctgcattgttccaccgtcgctggtcagccagcacctgctggtgtctgccggtgtgtccctctgctcttctcgatgtccagccacttgcgtctgtgcccgcttaaggtctcaggtttatatggtcaccagatggggggcgtggcaggccaaaagacaactttttgggcatgaaacagaaatgcctatcctcattcggttcatggggacaaaaacagcatatccactcagttccacatttccatataaaggccaaggcatttattctcaggataattgtttcagcatcgcaaccgcatcagactccggcatcgcaaactgcacccggtgccggggcagccacatccagcgcaaaaaccttcgtgtagacttccgttgaactgatggacttatgtcccatcaggctttgcagaactttcagcggtataccggcatacagcatgtgcatcgcataggaatggcggaacgtatgtggtgtgaccggaacagagaacgtcacaccgtcagcagcagcggcggcaaccgcctccccaatccaggtcctgaccgttctgtccgtcacttcccagatccgcgctttctctgtccttcctgtgcgacgcgctacgccgctccatgagcttatcgcgaataaatacctggttacccaggccgtgccggcacgttaaccgggctgcatccgatgcaagtgtgtcgctgtcgacggtgacccgtgtatgaaatctaacaatgcgctcatcgtcatcctcggcaccgtcaccctggatgctgtaggcataggcttggttatgccggtactgccgggcctcttgcgggatatcgtccattccgacagcatcgccagtcgctatggcgtgctgctggttacccaggccgtgccggcacgttaaccgggctgcatccgatgcaagtgtgtcgctgtcgacggtgacccgtgtatgaaatctaacaatgcgctcatcgtcatcctcggcaccgtcaccctggatgctgtaggcataggcttggttatgccggtactgccgggctcttgcgggatatcgtccatccagacagcatcgccagtcatatggggtttctgttggaagctcatgacctcttggtggtaaattgctcactattgcctgcagcatgctaggtcttgtcaaaccctctgcaccttgggctgcgcagttatctggacatgtgccaggttcaagctccatcctttgtcttcctgctcttgctgctggttcatcgtttgcgtataatattagtcgaccacggtccccttgattgtcgttcgatatagttggaaccccgtcccctcgatggtggtttataacaaactgcaccggttcccttagaatgtggtttatatttatctgggacatggtcctcttgtatcgcggtctgatattagtcggcgccacggttccactggtatgacggtttgatattagtctgaacccgggtcccactcgtatcgtggtctgattattagtctgggacaccggtcccactcgtattgtcggtctgattattagtctgggaccacgatcacactcgtgttgtcggtctgatatcggttctgggaccccgggtcccacctgtagaacggagtaacctcggtgtgcggtagtatgcttgctgtggattgccgctgtgtcctgcttatccacaacattttgcgcacggttatgtggacaaaatacctggttacccaggccgtgccggcacgttaaccgggctgcatccgatgcaagtgtgtcgctgtcgacggtgacccgtgtatgaaatctaacaatgcgctcatcgtcatcctcggcaccgtcaccctggatgctgtaggcataggcttggttatgccggtactgccgggcctcttgcgggatatcgtccattccgacagcatcgccagtcactatggcgtgctgctagcgctatatgcgttgatgcaatttctatgcgcacccgttctcggagcactgtccgaccgctttggccgccgcccagtcctgctcgcttcgctacttggagccactatcgactacgcgatcatggcgaccacacccgtcctgtggatctacccactagtcaattcaccattttgttggcccagggcttcccggtatcaacagggacaccaggatttatttattctgcgaagtgatcttccgtcacaggtgtttattcgcgataagctcatggagcggcgtaaccgtcgcacaggaaggacagagaaagcgcggatctgggaagtgacggacagaacggtcaggacctggattggggaggcggttgccgccgctgctgctgacggtgtgacgttctctgttccggtcacaccacatacgttccgccattcctatgcgatgcacatgctgtatgccggtataccgctgaaagttctgcaaagcctgatgggacataagtccatcagttcaacggaagtctacacgaaggtttttgcgctggatgtggctgcccggcaccgggtgcagtttgcgatgccggagtctgatgcggttgcgatgctgaaacaattatcctga

SEQ ID NO: 124795 - DNA, 596 bp, Homo sapiens
agactgtggcagagttactttcattcctgtctcctgagagattcaaaatttgcgcgcgataataccatacttcattcttccaccagccacttctgccagcttgcccgcaccagttcacgctctgcggtgaagcaatcctccgacacatggcccggcaattcctgtaatgccagatgatgaagttcatcgcgaagcgtagtgtaagcacgggtcagcgccatcgcttcctgctcttccataatgtcgttttgcgccagtagttccagaatacgcacgttgtctgaccagcgcgttaacttcggtttttcatgagcgtagcgcaacaccagatattgggtaataaattcgatatcggtaattcccccttcatcagctttgatatcaaaacgatcgccaaggttaatggccaaaaaaacggcgcattttctgggcatttcccggacttccgttgcagagtttaccttcacgcgcagcggcatatctcgcgaccactgcgtcaaaggcgcgggagctgcggatcgccgacctaacgcgccgcccagggctgagttccagtcaggctggtttttgataatggaatgctttgcgaggcacac

SEQ ID NO: 124796 - DNA, 640 bp, Homo sapiens
aaacaccctttaccagccgacggcgaccgatgcctaccgcgatgagttgcgccagtatttgctgcgcgtgccggaagatgacgaagagcaacagcttgaggcgctgcgtcagttcaaacaggcgcagctgttacgcatcgccgcagcggatatcgccggtacgctaccggtgatgaaagtgagcgatcacttaacctggctggcggaagccatgatagatgccgtcgttcagcaggcgtgggttcaaatggttgcccgctacggtaagccgaatcacctgaacgaacgcgaagggcgtggttttgcggtggtcggctacggcaagctgggcggctgggagttaggctacagttccgatcttgaccttatcttcctccatgattgcccaatggatgcgatgactgacggtgagcgggaaatcgacgggcggcagttttatctgcgtctggcgcaacgcattatgcatctgttcagtacgcgtacctcttccggcattttgtatgaagtggatgctcgactgcgtccgtccggggcggcgggaatgctggtgacatccgcagaagcatttgccgattatcagaaaaacgaggcctggacgtgggaacatcaggcgctggtgcgtgcgcgtgtagtgtacggc

SEQ ID NO: 124797 - DNA, 2358 bp, Homo sapiens
atgtctgataccaaacgtaatacaatcggcaaattcggcttgctctcgctgacttttgccgccgtttacagctttaacaacgttatcaataataatattgagcttggactggcctcggcaccgatgtttttcctcgcgacgattttttattttattcccttctgtctgatcatcgcagaatttgtttcgttaaataaaaactcagaagccggtgtctacgcgtgggtaaaaagttcgctgggcggacgttgggcatttattactgcctatacctactggttcgtaaacctgttctttttcacctcactgttgccgcgcgttattgcttatgcttcgtatgccttcctcggatacgaatatattatgacgccggttgccaccaccattatcagtatggtgctgttcgccttctccacctgggtttccaccaacggggcgaaaatgttggggccaattacctccgtcacttcaacgctgatgctgctgttaacgctctcctacattttactggcaggtacggcgctggttggcggcgtacagactgatgacgccatcaccgttgacgcgatgatcccgaacttcaactgggcgttcctcggcgttaccacctggatctttatggccgcaggtggcgcggagtccgtcgctgtgtacgttaacgacgtcaaaggcggttcgaaatcgttcgttaaagtgatcattctcgacggggatataatcggcctactgtatcacgtctctcgagcgctggccatcagcctggggctgctgtgtcagcccacctttgatttggttattcagggtgactactgcttctggaacaccatctccttcgggtccgttcaagaccctcccggtgacggagaatcccatgacgtggaacacgggctagaaaacaaagaacaagaagaaggtgctcgaaggtgctcctgtgccacagccacaaagcctccttctgctgcgccggccaccacctaccatgtctgctactgccgcccacctaccaacactcagtgcccccgtcctattaattatctgttcatcggcattctggcactgctgctcgcggtcgctctctggccatccattccctggtttggtaaagccgacaaccgtatcgccgccattcaagcgcggggagagttgcgtgtgagcaccattcatactcccctgacttataacgaaatcaacgggaaaccttttggcctggattacgaactggcgaaacagtttgccgattacctcggcgtaaaactgaaagtgaccgtgcggcagaatatcagccagctgtttgacgaccttgataatggtaacgccgacctgctggcggcaggacttgtctataacagtgagcgggtaaaaaattatcagcctggccctacctattattccgtgtcacaacaactggtttataaagtgggtcagtatcgcccacgtacgctgggcaacctgacggcggagcaactcaccgttgcaccggggtctgtggtgggttacgatcttcaaaccttgacccaaacgcaccaccagccggtgcgttttctggcgaagcgttttgctgtgaaagaagccgcagcaaaagcgtttggcaccgggatccgcaatggtctggcgtttaatcaatttgaagtattcaatgatgagcttggcaaaccacggctacggctatggggcgaggcattaaaactggcggaaaagctgggcgttgcaaatatgcatgtaacgctggcagatgagcggcactatgcttgtgccacgtacattaaaattggcttcgttattgaagattttgctgtgctttacaccatgccacagaattcccccattgaaacgagtggtgtcgtcaaagctctggtgtggagtgcagcatgcaccctcaataactcgcacgttcagtcgaccttcgcctatggccgtctgattcacgaacactgcgaacgtcgcccgcacttcgatgctggtcgttttgccaaagagttcggtgatgaaggccaccgcgaaggctggtgcctgtaccacctcggctgtaaagggccagaaacttacggcaactgctcaacgctgcaattctgcgatgttggcggtgtgtggccggtggcgattggtcacccttgctatggctgtaacgaagaaggtatcggcttccataaaggcatccatcagcttgccaacgtcgaaaatcaaactccgcgttcacagaaaccggatgttaacgctaaagagggcggcaacgtctctgcaggcgctattggtttgctcggcggtgtggttgggttggttgccggtgtcagcgtgatggcggtgcgtgaactgggtcgtcagcaaaagaaagataacgctgactcacggggagaataa

SEQ ID NO: 124798 - DNA, 2391 bp, Homo sapiens
ttaaatctctacgtcgcggttacaatctttcgagtaaatatagctgaacgcttcaccacgccctacaccataaccagcctgtgaagaataagcgcccataaagatgtaatcgccttttttcaccgggatccagttattgtcgaggttataaaccccctgaccggaaagaatataggcaccgtgttcctgaacgtgtgttgcgatataaccgtggctggcacctggtgcaaaagagaggatatgcatgttcatatcaaaacctaactctttgggcagaaaatccagcagaataacatcgtgcatgccttcataatgaatgcgttccagttcgctggcattgccagaaaccagccacggtgcatagccttctaccggaacatagcggcgcttatataaaaagatttggctgtcttcggcctgtgcgttaacaaacgtcattaaggagcctggcgggcaataaagatagccaccttcgcttaaggcaaatgttgtgccttcggctttggcagagatatttccagagatcacatacaggaacgtttcaatgccttcgccaccgaagcccgcgatgcccatcattgccatcgcccagaacagactctgccacgggaatttaagcataatcagatgtccgagcactggcgctaacaccggaatgatgcaggtaataccgttgagtaatgacagcactttagcccgacgtcgatcatccagcgtgtcgcgcaaaatagcgaacgccactacgtaacaacagcctgcgcccaacccctgtagaaatcggcctgcaagaaataacgtgctggtttcagccagtgaacagaacaccgaggcaataataaatagcgccgcgccgggtatggcgaccggctttctccctgaacgatcggccactttaccggcaaataacatcgcagctgccatccccgccagatatacggagaacgcaatatgcaactgcgcttcgctggcattgagatcggcggcgatgcgcggtaaaccaacgaggtacatatcaatcccggcgggataaagtaaaaccagggcaaaaccgtctttcgctgccgtttcgcacaaccagtcgccaaagatttttgaatagctcggcaaaccgccgctacttttcggcaaacaaccgctggagggatcaaatttaggcacggcgtggaaagtgatcgggtctttttctgccggttcataaccacgaccttttttggtcatgatatgcaggaactgcgggcctttcaggtcgcgcatgttctttagcgtggtgataagccccagcacatcgtgaccgtccaccgggccgatgtagttaaagcccagctcttcaaacaacgtgccaggcactaccatgcctttaatatgttcttcggtgcgtttgagcagctctttaattggcggcacgccagagaaaacttttttcccgccggaaagcagctgtgccagatggttgttgagcgcgccgacattttcggaaatcgacatttcattgtcgttgagaatcaccagcatatcaggacggatatcgcccgcgtgattcatcgcttcaaacgccatgcctgcggtaatcgcgccatcgccaatgacacagacggtgcggcgatttttgccttcacggcgatcctgtatggaatccagttctcctgtgcttccttttacctgttcgtagtttatgaacatggctctctcaaaactgttggctgcccacttcaggaggtttgcggactgctctggagtcatgtaaaccagcacacattcagctatcaggagtgttggcaatccatccatagtgatgcagtcggttaatgcaatgccaagttggtcgggatactcttccagccaggcagcaagtgcagctcgctggctgttggctagatccgggctgatttgctgatgtgcctggaaccattcgtgtgcctgtgttcccatcggcgtgagggaaagccgacgcgccagatcgtagttgctggtgcccacaaaccaggattcctgttgcagacgcttaacgatggtttcttgtacttcgcgagaaaaacggcgacgggtgccaaaatccatcagatggaagcgcgacatatcaagaccggcggttaacgccgagaagtcgactaatttgctttccagcgtgtcgagggcttgcgcaacgtcggcctgcggtgagcgatagcgatgtaccatttcactgataaccgccagcaaaggaacttcccagaggatgacttcacgccacgggccgcttaaacgaatatccagcttgccattatcgttggacacggtgacttgttccgggttaaagcggaactcgcgtaaccagttaagatagtcggcggccccgacttgcaccataaagttgccgctggcgctttgcgagacggcttgcggtgtcaccat

SEQ ID NO: 124799 - DNA, 3114 bp, Homo sapiens
atgttgccagaggttcagaaccttggtttttttgagatacgcatttgcgggtaccgagctcaaagtcgtatcaaagtaaaggcaccacctataaactggtgcgtaaagtcttccagaataccgaacacgttcatgtcgtcggcctgcgaggatttgcgccgcaactccctgaaacgcttccaggaactgacgaagcgccttctcaggcgagttaaaattaaggcggcagcaatgccgccttttctttgtccgaatacgatcgcagtcagttcgttcattccggtgaaagcaatcccggcaatccatgaacagaagaaatggaaaacgggtcagttcattaatgggtcatgcgcggtgatcgcccgatccggtgatcgcctggcacgccgcgtattaagcgataacgaatgggctatgtcaataaagcaccaccagccggtgcgttttctggcgaagcgttttgctgtgaaagaagccgcagcaaaagcgtttggcaccgggatccgcaatggtctggcgtttaatcaatttgaagtattcaatgatgagcttggcaaaccacggctacggctatggggcgaggcattaaaactggcggaaaagctgggcgttgcaaatatgcatgtaacgctggcagatgagcggcactatgcttgtgccacggtaattattgaaagtgtcatcgaattggtggccatgaacctggtgttcggttatggagcttctttcataagacaacataatagaatttggctacccagcatacatttgggctgctgcagtagactgcacatccgcaattcccgggagaaaaagagtaaaaccctatcaattgggtcttccttaattcataattacgggtacgagctgagtgttaaagccgaatcacttgaccgaacgcaaagggtgtgttttgcgtgtggtcggtacggcaagctgggcgcttgggagttagattacagtcccgatcttgacattatcttcctcaatgattgcccaatgaatgcgatgactgccggtgagcggaaaatcgacgggcggcagttttatctgcgtctggcgcaacgcattatgcatctgttcagtacgcgtacctcttccggcattttgtatgaagtggatgctcgactgcgtccgtccggggcggcgggaatgctggtgacatccgcagaagcatttgcggattatcagaaaaacgaggcctggacgtgggaacatcaggcgttggtgcgtgcgcgtgtagtgtacggcgatccgcagctcaccgcgcactttgacgcagtgcgtcgcgagattatgacgctgccgcgtgaaggtaaaactctgcaaacggaagtgcgggaaatgcgcgagaaaatgcgcgctcatctcggcaataaacatcgcgatcgctttgatatcaaagctgatgaagggggaattaccaatatcgaatttattacccaatatctggtgttgcgctacgctcatgaaaaaccaaagttaacgggctggtcagacaacgtgcgtattctggaactactggcgcaaaacgacattatggaagagcaggaagcgatggcgctgacccgtgcttacactacgcttcgcgaacccaggttttcccgtttttcccttttttggggttgttcaccgctggggttgttcgattatctggcggacctgtttaagattgataactcccacggcgggcgtttcaaaaccgtgctgttaaccttcctgccacctgcgttgttgtatctgatcttcccgaacggctttatttacgggatcggcggtgccgggctgtgcgccaccatctgggcggtcattattcccgcagtgcttgcaatcaaagctcgcaagaagtttcccaatcagatgttcacggtctggggcggcaatcttattccggcgattgtcattctctttgttttgccctggttttactttatcccgccgggattgatatgtacctcgttggtttaccgcgcatcgccgccgatctcaatgccagcgaaggcagttgcatattgcgttctccgtatatctggcggggatggcagctgcgatgttatttgccggggtaaagtggccgatcggtcaaagttttggaacccaaattggagcaagactcacacagaacctacacagcagtcccagacagcgacgagcaacaggaccagcgcaaccacagcagagcaaagaagcgacgagaaggaaggcaacaacaggacacgtcacgaagaacaacgatcacagaacgccacacagcacaagagacgagagagagcaacaacaacacaaaaaacctgttctgagaccgtcacgccaacaacgatgaacatgtgcaacgagccagagctgagaagacacgcacgtgttttgccgcccgtactctacattgtgcaacgtagatatgatgagtctcatctcagaatatctatctccgcgtgtaatgtgtgtaggacagagcgacacgcagtacatacagatgagactatacactcgacggttgttgctgactgcaaggagcgagtcgctgtgatgcgtctgagactaccactatgtgctgcttgtagacacatcggtgacgtgatcgtatatagtgcgtacgtctgtgagcatcggtgtatgcgactgctagctacgcgacgccactatgtggtcactctaacgactcatcttcgccgtcgactattcttgaccgaggtgaacgcaagatatgtctgcatctacgatgatgagcattcgcgctcatctaccgtcactcatgctcatccgatcgatcaccagagtgcccactatgacacatatgtgtatgatatcggcactgtatcgtacatgcgtctgaacacgtctgtacgactcatacgacgtcgcgcccacacttgcacttcccgagcactgatggactcgcactctaaagatggccgtccaatggactatgctagtgcggtcgtggtcactcacccgctcaagcagcacgtcaactaccttagcgctagcagtacggaacgacatttccacatcggcgatacgagtggacccgtagtcacaccctattggtcagaccggcggtacgtattggaacgacgttcctgtcaggtcggcgcgaccgcgatcacggtgtga

SEQ ID NO: 124800 - DNA, 1668 bp, Homo sapiens
atgcaaaaccagatggacccggtgtacacgccggcgcgaaaaatccacctgtaccactgcgaccatcgcggcctgccgctgccccttatcagcaaggaagggacaacagaatggtgcgcagaatacgatgaatggggcaacctgctgaatgaagagaacccgcatcagctgcagcagcttatccgcctgccggggcagcagtatgatgaggagtccggcctgtattacaaccgccaccgctattatgacccgctgcaggggcggtatatcactcaggatccgattgggctgaaggggggatggaatttttatcagtatccgttgaatccagttacgaatacagatcctctggggttagaagtttttcctagaccattccccttgccaattccatggcccaaaagccctgcacagcagcaagcagatgataatgctgcaaaagcattgacaaaatggtggaacgatacagcatcacaaagaatatttgactctctaatattgaataatccgggactagcattagatataacaatgatagcttctcgtggaaatgttgcagacacagggataactgatcgtgtcaatgacataataaatgacagattctggagtgatgggaaaaaacccgacagatgtgacgttgaaaagctggaagaagtcaccgccgaactgcaccagatgtgcctgaaagtggtggaaaaagtgatcgccagcgatgagctgatgaccaaattccgcattccaaaacacacctggagttttgtgcgccagtcatggctgacgcaccagccatcgctttattcgcgtcttgatctggcgtgggatggcactggtgaacctaaacttctggaaaataacgccgatacgccaacgtcactatacgaggcggcgttctttcagtggatctggctggaagatcagcttaacgccggtaacttgccggagggcagcgaccagtttaacagtctgcaagaaaaactgatcgatcgcttcgttgagctgcgtgaacagtatggcttccagttgctgcatctcacctgctgtcgcgacacggtggaagatcgcggaaccattcagtatttgcaggactgcgcaacggaagctgaaattgctactgagttcctctacatcgatgatatcgggttaggtgaaaaaggtcagttcacggatttacaggatcaggtaatttccaacctgttcaaactgtatccgtgggaatttatgttgcgtgagatgttctcaaccaagctggaggatgcaggcgtacgctggctggaaccggcgtggaagagcattatctccaacaaggcacttctaccgctactgtgggagatgttcccgaatcacccgaacctgctgcccgcttattttgcggaagatgatcatccgcaaatggaaaaatatgtggttaaaccgatcttctcccgtgaaggcgcaaacgtgtcgatcattgagaacggcaaaaccattgaagcagcggaaggtccgtatggcgaagaagggatgattgttcagcaattccacccgttaccgaaattcggcgacagctatatgctgattggtagctggctggtgaacgatcaacccgccggaattggcattcgtgaagaccgtgcattgatcacccaggatatgtctcggttttatccacatatttttgttgaataa

SEQ ID NO: 124801 - DNA, 681 bp, Homo sapiens
tctattgccaacaaatggctaaagttctggcagagcaggtcgatgaatctgttacggcaggcatgaatacttttttcgctgagttcgcttcatgtttgacggaattacagacgcgtttacgcgaaagtctggctctgcgtcaacaaaatgaatcggtggtcaggctgatgcaacagcaattgcagcagactgtgatgactcacggctggatttacaccgacgcccagctgttacgcgatgatattcaaacacttttcacggcagaacgatattgaccaagacgttacttgacggccccggtcgcgtgctggagtcggtttatccccgctttttagtggatctggcgcagggtgatgatgcccgccttccacaagcccatcagcagcagtttcgtgaacgactgatgcaggaacttttttcgcgtgtgcagcttcagacatggacgaacggcgggatgttaaatgcgccgcttaacctgcgtctgacattggtggaaaaactggcgtcgatgctggatcccggtcatctggcactgacgcagatcgcgcacgatctggcgctgctgcaaaaaatggatcaccgccagcactctgctttcccggagctcccccagcaaattgccgccttgtatgagtggttttcagcccgttgtcgctggaaggaaaaggcgttaacgcaacg

SEQ ID NO: 124802 - DNA, 1208 bp, Homo sapiens
ctcttacatggctcttctcgttcaatgggtggctgataccgatggaaagagtcagtattaccgagcgcccggactggcgtgagaaagcccacgaatacggtttcaattttcacaccatgtacggcgagccgtactggtgtgaagatgcttactacaagttgaccctcgcccaggttgaaaagctggaagaagtcaccgccgaactgcaccagatgtgcctgaaagtggtggaaaaagtgatcgccagcgatgagctgatgaccaaattccgcattccaaaacacacctgaagctttctttagaagtagaggaaaaccagcagtaagaaatctgaagaccactgcttcaataaggtggtatgtcggtaccccgttgcgtgcacggaagaagtggttaaagcacacatcataaatggttgcggaagactggaaggacgccatatggccgcccagttcgaggtcttttttcgacgcacgcagcaccgtcatgatggcgttccagcggatagctgaacgaatacggcgttccagttccagattacccggatactccggttgttcttcaacggggatggtgttgatgtagttgctgatacctgtgcctgcggctacgtttacaccgcctttgcgggcttcagcaagcagttggtcgatcagatactgagcacgctcaacaccttcttcacggatgaccgattcgatcgcctggagccagtcgcgagtttcgatcggatccacgtcatttgggaaacgttcagtttccagattacgaaaacgaattccgtactggcgtcgggaaagaaaatcttctgccagcgccataatggtgttatcgggcgtaatcgccattccgcccatcgaataaaactcactatgagctgcgcgcttattggcatcgagcaatgtttcccactcatcccactcttcactgaatgccgattgacgctggtagatagcatattcacagcctggttcataaatatgccgatagcggtagccatttttgatgtagggcgcagaaacttctcgttgcggaatgcggtcgatgatttcctttaagatgcgatcctgcaaggcttgttgtgaggccatcacccgatgaccgtaactattttcttgttgcaggtagtccaggacttctggctgagaacgcgtatcgtcccgcagccagtagtaattatcgatgcgcgtatcgccatgaagcgtcat

SEQ ID NO: 124803 - DNA, 676 bp, Homo sapiens
aaatctctgcggagttgaatcgtccgttcgctatccgtggcgatctgggcgtgtgtgggagcggcaaaaacaagaaactggctggcgcagctgggtgccgtgccccatgtacacgcggaagacatcattcttggcaatccaccggatattccgaagtcacgatggtgcatttgccacgcgtagaggcaacgctggccccctggcgctgctgaccaaaacggtctggctgccgtggatcaagctcgaaagcccacgaatacggtttcaattttcacaccatgtacggcgagccgtactgtgtgaagatgcttactacaagttgaccctcgcccaggttgaaaagctgaagaatggtggaaaagtgatcgccagcgatgagctgatgaccaaattccgcattccaaacacactggagttttgtgcgccagtcatggctgacgcaccagccatcgctttattacgtctgagtctggcgtgcctggatctggcgcaggctatgatgcccgccttccacaagcccatcagcagcagtttcgtgaacgactatgcaggaacttctttcgcgtgtgcagcttcagacatggacgaacggcgcatgttaaatgcgccgcttagcctgcgtctgacattggtggaaaaactgcgtcgatgctggatcccggtcatccggcactga

SEQ ID NO: 124804 - DNA, 1758 bp, Homo sapiens
atgtgtaagaatctaatcggcaccttcatgtgcatctgccctcctggaatggcccgaaggcccgatggagaaggctgtgtagcctgcaatgctggttttgaaccggagaccacatcttcttcggattgtcatcttagggcgagttattctgccttggggtccagagcattgcacattgatccttcagaccctctgcactacatatctgccagccagccaagtcccaaggtatgccagggttacatgtgcccttctcagatcctggaaatggatactgatgagtgttcaatcggcaatccgtgtggaaatgatatcaacgaatgtgcccagaacccactgctgtgtgctttccgctgcatgaacacttttgggtcctatgaatgcacgtgcccgattggctatgccctcagggaagatcaaaagatgtgcaaagaagaccgagaacgaagaaagaaagcggacagaaaaagacaaaagggcccggaggcaccgaaaaagaagaaagcggaggaggacgggcgagacaaagaggacaagcgagcacgagagcagaaacaaaacatgaacagcgaaaaaagtgaaggcacgccgcatgtaatgtgtgcttacctgtacgatctggccggtctgttctctggcttctacgagcactgcccgatcctcagcgcagaaaacgaagaagtgcgtaacagccgtctaaaactggcacaacctcggaccctgcgtgatgaaaatgaatgcaggaccaagccaggaatctgtgaaaatggacgttgtgttaacattattggaagctatagatgtgagtgtaatgaaggattccagtcaagttcttcaggcactgaatgccttggtgtgttttggaatgcggaatttggtcatcagctcatcgctggcgatcactttttccaccactttcaggcacatctggtgcagttcggcggtgacttcttccagcttttcaacctgggcgagggtcaacttgtagtaagcatcttcacaccagtacggctcgccgtacatggctccaagaggactgggaaaattcatgatcctaataaaacaagttcttccctagaaacaactttcagccactttccagtagaagagagagagacacagcagtgttgctccctggcagacattgatgaatgtaaagagattccaggcatttgtgcaaatggtgtgtgcattaaccagattggcagtttccgctgtgaatgcgctacaggattcagttacaatgacctgctgtgggtttgtgaaggtaatctgaataaagaagctttgctagcgtccacgacggaacatagactggtacgttcaactgctttacactctctggaggcaaacagactggtacacagcttctacggactatcgctcaactacgacaagtacgtacttcacgctttcatcctagcttcacgactaagtaaactacgcacactgcttggctggcgttacaccacaccttggacagtatatttcaattcggtcactagctccgacatcaccttaacggactcttacagctctcactctgtccctgctattgcgaactcctggctgcgcaactggctgcatgcgaacctgattgttacactactactgacctgggccactcttaacccatgcgttctgcttaacattgactacgcacttacagaaaccgtcgagaccgcaatattctttttccgcatcgctatacaatactacgctattctaactctttgctgccttgagaacaagcgctaa

SEQ ID NO: 124805 - DNA, 1665 bp, Homo sapiens
atgtcaaagccaaaatacccttttgaaaagcgccttgaagtcgtgaatcactacttcacaactgatgatggttacaggatcatctcggcacgttttggtgtcccccgaacccaggtcaggacatgggttgccctctatgaaaaacatggagaaaaaggtttaattcccaaacctaaaggcgttagtgctgatccagagttgcgtattaaggtcgtgaaagctgtgatcgagcagcacatgtcccttaatcaggctgctgctcactttatgcttgctggtagtggttctgtagccaggtggctgaaggtctatgaagagcgcggagaagctggtttacgcgcgctcaagattggcaccaaaagaaacattgcaatatcagttgatccagaaaaagcggcatcagcattggagctgtcaaaagaccgacgcattgaggatcttgaaaggcaagctctcagcaagcctgacaagtatgcggacgttaaaaagcgtattagtgagatttatcacgagaatagaggccgatacggataccgtagggtaacgctgtctcttcatcgagaagggaaacagattaaccataaagctgttcagcgcctgatgggaaccctctcacttaaagcagcgattaaggtcaagcgataccgctcttacagaggagagatctcttcaacaacgaagttatttcttacagcctttcggatgattgtcgtggcgatcattttgattgcaacttttgactggaatcgactcaaaccgactatcaaccagaaagtctctgcggagttgaatcgtccgttcgctatccgtggcgatctgggcgtggtgtgggagcggcaaaaacaagaaactggctggcgcagctgggtgccgtggccccatgtacacgcggaagacatcattcttggcaatccaccggatattcccgaagtcacgatggtgcatttgccacgcgtagaggcaacgctggccccgctggcgctgctgaccaaaacggtctggctgccgtggatcaagctcgaaaagcccgacgcgcgcctgattcgcctctctgaaaagaacaataactggacgtttaatcttgccaacgatgatacaaagacgcgaatgcaaagccgtcggcatggtcgtttcggctggataatattcttttcgatcaagggcggatcgccattgatgacaaacgatatccacggttctctggtctacaccaccggaaagccacgaccaaaactggaaggtgatgtcgagtcgcggcaattgcggctggcggacctgggaccgttgattggcgttgattccgggaaaggggcagaaaagtcgaaacggtctgaacagaagaagggcgaaaaaagcgttcagcctgcgggcaaagtgctgccttatgaccgcttcgaaaccgataaatgggacgttatggatgccgatgttcgcttcaaagggcggcgcattgagcatggcagtagcctgccgattagcgatctttctactcatatcatcctcaaaaatgctgacctgcgcctgcaaccgctgaaatttggcatggcgggcggcagcattgcggcgaatattcatctggaaggcgataaaaagccgatgcaggggcgggcagatattcaggctcgtcgactgaaactgaaagaactgatgcccgatgtgaactga

SEQ ID NO: 124806 - DNA, 771 bp, Homo sapiens
tcagagctgggccatgcgggtctgaacggcgatattctggtgtggaacccggtactggaagatgcgtttgagctttcctccatggggatccgtgtatgatagccgacacgctgaagcatcaactggcgcggtgacgaagatcgcctggagctggagtggcatcaggcgctgctgcgcggtgaaatgccgcagaccatcggcggcggtatcggccagtctcgtttgactatgctgctgctgcaactggcgcatatcggccaggttcagtgtggagtatgggccgctgctgttcgcgagagcgtcccttctctgccgctgcagctctttcactttactcgtcacgtcgtcaggcaaccgctgagcgataaaatcagaaatcaccaacgcatcggcatcaaaccattccctgctttgcaagcgttccataatggcgcgaaaacaactggcaagatcggtgccgacacgaaactgctggcttaaaaaacggattgcttgttcgatgccttgtgggcctgaaagctcataacggacgatctcgggtggaaatagcataatatagcagcgccggtattctgcgagagccctggtcataaagcggccattgagccggagtatcccgcgacataacggccggcgggggtcacggaatctatgtacaccggagatgaacatttcagcaagatcacggaagggctcggtagaggtttcacagcaggtaaccaacagtcgcacccagtccgagacattctttttggagagtaagaggagcat

SEQ ID NO: 124807 - DNA, 1523 bp, Homo sapiens
cgccatatcgccctaccaccgagttcaaaaccgcccgcgcacacatcccgttctagttgcagccctaacccatccaacgcacaacgaaccactccgactaccctcacctcaccacatgccacatcctcgcgaacgcgaccctctcagcccagcagacgcatcaccacccactcgtgcatccaatcacgctccgcccgcgccacacaaacccatcaagccggtgcagcgcagacagcagcaaccaaagtccgcataccaacaataaacacgcgtcgtaccaaccgggactcaaataggggcacacgccggtcctatccagctcacagcccatctatacgaccgggccaacagccaagctatgcccgccccacgttcgatcttacgaggtcccccattcccctgcaaatgggtagagaccttcaccgttacccaccggtctgggagatactggcctggggtttttgccccgcttcattgaaatggaaaaacttccctttcgatgttgctgaagcagaacaggaattacaggaaggcccgctgcccgaatattccggtcccgggctggcgttagcgaaatgggggcctgggtgctgaaacaggtcgtgatggcatcactgtttgtggccctgtttctgccctttgggcgcggcgcaagaactttctctcgcctgcctgctgacttcacttgtcgttacgctgctcaagaatataaactctatgacagcagggattttggtctgcttggtcactgttgtatctccagggcttataaaagtcctgatctacgatcagtgatggcattagattctcgtaggagcacaaaccctattgtgaactgcacatgcaatggatctaggttgcatgctccttatgagaatctaatgcctgatgatctcaggtggaataattttgttcctaaaccagcacctcccccaacccactgtccatggaaaaattgtcttccacgaaagtggcccctggtgtcaaaaagggggcctactacagatatagcatcacctaactatacactacacacagtttacacttaccatatctgcaaccacgtcgcgctacagacacatgcttcacaaacgacagcatgcaacaggatatacaggacaacagcatatcgcctgagcactatcctcagtacagtatacgaacatcaagggctaccaacagtactcggtagagcacacggaaaaaaatataatattggatcggctgtgtgtcaagcatctgaggttctaaccatagctccattactaccagtccgtgtgacttggggaatgctgcttaccttctttgagacccagtttcttcattacaagataaagagcttgctagggagaagcttgctggggaagagagcagcaatttgcccaccagaggcccagatctcctgggagaaatcagctgccatggaacaggagtttttcttcatgctagaaagggaaaagaacatgaataagtggcaatccagggacagccagaaggaacctggacaatggctcaccggctga

SEQ ID NO: 124808 - DNA, 227 bp, Homo sapiens
ctcctctgcagcgcgttatgatagcggtggcggttgtaatacatgccggactcctcattatacaatctgttgccccgtccgtgctgacaagcgccacgccaggccgcgatggtcgctgtggtacaggtggatttttcgacgatcggcgtgtacaccgggtccatctggttttgcatttcgtccgccgttagtccgcacgatgccagcggggatcctctagagtcgac

SEQ ID NO: 124809 - DNA, 261 bp, Homo sapiens
caatctgttgccccgtccgtgctgacaagcgccacgccaggccgcgatggtcgctgtggtacaggtggatttttcgacgatcggcgtgtacaccgggtccatctggttttgcatttcgtccgccgttagtccgcacgatgccagcggggatcctctagagtcgacctgtaacgaggaaggggaatactccggccagatcttttgcaggtcaatccggtcttggtcgctaaatttttctaatcgaatgatggtcagcttcat

SEQ ID NO: 124810 - DNA, 921 bp, Homo sapiens
tcaacggatacttgataaaaattccatccccgccttcagcccaatcggatcctgagtgatataccgcccctgcagcgggtcataatagcggtggcggttgtaatacaggccggactcctcatcatactgctgccccggcaggcggataagctgctgcagctgatgcgggttctcttcattcagcaggttgccccattcatcgtattctgcgcaccattctgttgtcccttccttgctgataagggccagcggcaggccgcgatggtcgcagtggtacaggtggatttttcgcgccggcgtgtttacaccgtggttcccattccttctcacgaccccagttgttaaacccccaaaggcgtaaaacgaccgcaaactgggaactttaaagaaaggcgctctcttcaaggagaaatgctcccccacggaaaacagggtggataagatttgttccaccaagatgccggcctcgtttctgctacgtacacagtcaggaaaatatcgatattcgtacagttttacaccttgaaacgtgaatacctcttcaggatcgagcgtaataccaaattcctgtctgatcgctgcattcggcagtattatgatgggactgtttgctaacctgccagttgcctggcacccgctatgggcctgaatgcgttcttcgcttttgtcgttgtacaggcgatgggcttgccgtggcaggtcgggatgggccgcaatctcctgtctcggtaacaccatgtcaacggaaacaatatcgataatttcgtacagttttacacctttgaaacgtttgaatacctcttcaggatcgagcgtaataccaaattcctgaaacatcgttacatatgcgcgagagcaaatgacttcactgtcgaccagcgtaccgtcgcagtcgaaaaataccgcttctatccgggacat

SEQ ID NO: 124811 - DNA, 1735 bp, Homo sapiens
  misc_feature (1)...(1735): n = a,t,c or g
atgagtaaaaaccttctgaaagcaggttactcgctggtggttgctgaccgtaacccagaagctattgctgacgtgattgctgcaggtgcagaaacagcgtctacggctaaagcgatcgctgaacagtgcgacgtcatcataaccatgctgccaaactcccctcatgtgaaagaggtggcgctgggtgagaatggcattattgaaggcgcggagccagcgaaaggcattgatatgctggatgctccggtgagcggcggtgaaccgaaagccatcgacggtacgctgtcagtgatggtgggcggcgacaaggctattttcgacaaatactatgatttgatgaaagcgatggcgggttccgtggtgcataccggggaaatcggtgcaggtaacgtcaccaaactggcaaatcaggtcattgtggcgctgaatattgccgcgatgtcagaagcgttaacgctggcaactaaagcgggcgttaacccggacctggtttatcaggcaattcgcggtggactggcgggcagtaccgttttggatgccaaagcgccgatggtgatggaccgcaacttcaagccgggcttccgtattgatctgcatattaaggatctggcgaatgcgctggatacttctcacggcgtcggcgcacaactgccgctcacagctgcggttattgagatgatgcaggcacttcgagcagatgcgcgcgcatttgttaccgttagtattgaacaacttccggcactgaaagcctttgataccgtcttttcgatgggcgtgctttaccatcgccgttcaccgctggagcatctatggcagttgaaagatcaactggtcaatgaaggtgaactggtgctggaaacgctggttattgatggtgatgagaacacggtgctggtaccaggcgatcgttacgcgcaaatgcgtaatgtctatttcatcccttccgcgctggcgctgaaaaactggctgaagaagtgtggttttgtagatatccgcattgcggatgtgagcgttaccaccacagaagagcagcgacgcaccgaatggatggttaccgaatcgctggccgatttcctcgacccacatgatccggacgcgtcagccgcatccgacacccgaaccacgaggcgaaaaatgattaacgtacaaaacgtcagtaaaaccttcatcctgcaccagcaaaacggcgtgcgcctgcccgtcctcaatcgcgcctcgctcaccgtcaacgcgggcgaatgcgtggtgctccacggccattccggcagcggcaaatcaactctgctacgctcgctgtacgccaactatctgcccgacgaaggtcaaatccagatcaaacacggtgacgagtgggtagacctggtcaccgcgccagcgcgcaaagtggtggaaatccgcaaaaccaccgtcggctgggtgagccagtttctgcgcgtcatcccgcgtatctcagcactggaagtggtgatgcagccgctgctcgataccggcgttccgcgtgaagcctgcgccgctaaagccgcgcgtcttctcacccgcctgaacgtgccggaacgcctgtggcacctggcaccatcgacattttccggtggcgaacagcagcgcgtcaacatcgcccgcggctttatcgtcgactaccccattctgctgcttgacgaacctaccgcctcgctggacgccanaaacagcgccgcggtggtggaactgattcgcgacgcaaaacccgtggcgcaca

SEQ ID NO: 124812 - DNA, 4182 bp, Homo sapiens
tcagttcaccttccagcagttgcgccgcccgcctgtgagcacgtcagcgccctcttttttaccgatatcaatgtagttgaggatggtttccagttgcccgtgagaaacctgcgcgcccatttgcgtcacgctgtcgagcgggttaccgctacgaatgctttcgacacggcggatggcgcgttccataaagcgttcgtagatagattcctgcactaaagcacgactcggacaggtgcaaacttcgccctggttaaaggcaaacagtgcaaagccttccagcgctttatcgaaaaaggcatcttcttcatccatcacatcagcaaagaagatatttggcgacttaccgcccaactccagcgtcaccggaataatgttttgcgttgcgtattgcataatttgttggcccacttccgttgagccggtaaacgccactttggcgatgcgtttcgaggtcgccagatattcgccaattaccccacctgcgccattgaccacgttcaccacgcccggcggcagtaaatcaccgacaatttccattagcagcagtacagaaagcggggtaagacgtgcgggtttcagcaccacacagttgcccgccgccagcgcgggagccattttccagctcgccatcagcagcgggaagttccacgggataatctgccccaccacgcctaacggttcatggaaatgataggccacggtttcgctatcaacttcactgatcccaccttcctgcgcccgaatacacgaggcgaaatagcggaaatggtcaatcgccagcggtacatccgcagcactggtttcgcgaatgggtttgccgttatcccaggtttccagtgtcgctaacagctcgaggttttgttccattcgatcggcaatcttaaacagaatcgccgggggatcctctagagacgaatgtgaaatggcgcacgaatgcgtggtacgaagcgcaaatgaaacgaagatgctgcacgctttggtattgcgaatggcgatctggtgcgtgtctggaacaaacgtggtcagattttgacaggcgcggtggtgactgacgggatcaaaaaaggcgtggtatgcgtgcatgaaggtgcatggccagatctggaaaatggccggatcatgtgggtcgaggaaatcggccagcgattcggtaaccatccattcggtgcgtcgctgctcttctgtggtggtaacgctcacatccgcaatgcggatatctacaaaaccacacttcttcagccagtttttcagcgccagcgcggaagggatgaaatagacattacgcatttgcgcgtaacgatcgcctggtaccagcaccgtgttctcatcaccatcaataaccagcgtttccagcaccagttcaccttcattgaccagttgatctttcaactgccatagatgctccagcggtgaacggcgatggtaaagcacgcccatcgaaaagacggtatcaaaggctttcagtgccggaagttgttcaataggtaacaaatgcgcgcgctgatcattacccagtagtttacgcaccgcttcaaactggcacagaaacagttgcgtagggtcgatccccaccgcgaggtgcgcgcctgcgccaatcatgcgccacatgtgataaccgctgccgcagccgacatccagaatggtgcgtccggttaaatcagaaagatggggcagaacacgatcccatttccagtcggaacgccattcggtatcgatgttgacgccatacagtgagaacggccctttgcgccacggcatcaggttgcgcatcagcgtttcaatgcgtttaatttgccctgcgctcagtggctcttcgctttctgccgtaacgctatgcaataaatcaagacgatacggtttaatttcaggtagaaactccaccgcatttgaccactgcttaaacaacccgtgctgctgctcgcgctgccagttagcaatctgcgcgggcagcgtttcgagccagtgtgaaagatgatttttggcaatcagagaataaaagttagtgatgactttacgatcgccgtaatgacccaaatgaaatgcataccctgatcgatgatatccgttttgcagacgttcgcagcaaaatgcatgacgccttattggattacatggacaaaattcgcgatccgttccgcagttaccaatggagtctgcgtccgtggcgtaaagatgcacggccgcgctggatgggggcgtttcgtccacgtccacaagatggctattcgccagttgtacgcgactatgacaccggccgacacaaggggtgaaggtggaggagaaaaaacagaagttctgacgataatgcccgctgatgatcacccggcgggcattattcaggctgcttaaaccagtgaaccgccggtcaggaaggaaaagataaggaatatcagcaaaatggatgccgataccaaaaagcaaggtatggaaagccagcgtcccgccgccaaaaaccagcgcgccgcgaatgccccagcgattttccttacgcataccgccaataaatgcgcaaaggagcgcagcaatggccagtgcgataccgctttgattgaggattttatcgacatctacgtcctcttttttctccacggtggtaattttttcgccttttattccggcgagaagacctcttttaatttcagccgttttgtccgccacgatgctttcaaacgttggcggtggtgcggagaaagggccgaatgaaaagtggataatccccatcatccaagcgatggcaccgaacagcatgcccaatgaactgattttattttgagctatgatacccatctgacctctttcgtggatgatgaatgaagtcaatttatccgggctacatgatgcttcatggtttgcgattgttacgccgatgtcgtttggtatgccgattttcgatcccgtttccattctgaccatgactgccgtgttaatcatcgtgtttatcgagtcaatggggatgttcggatagagcgccagtaaaaccaccagtgaaccgatgtaaaacagcaggatgcgatacaccacctgatttaccgcttttggaatgctgttttccggatcgcgcgcttcagcggcagtaatcccaatcagctccagaccgccgaaggagaacataattaccgccagcgacaaaatcagcccattccagccggtggcgaagaaaccaccgtagcgccagaggttgtcgatactggctttctcgccgccgtgaccagaaaacagcagccacaggccaaagccgatcataccgatgattgccagcactttaatcaacgcaaaccagaactcggtttcgccatataagcgcacgttcaccaggttaacggcgttgatgataataaagaaggcggcagcccaaatccacgttggaacatccgggaaccagtactgcatatagatgcccgcagcggtcagctctgccattcccaccagcacgaacattacccagtagttccagccagagaggaagcccgcaaacggtccccagtatttataggcaaagtgggcaaatgaaccggataccggctcctcaaccaccatttcgccaagctggcgcataatcaggaaagcgatgatcccggcgacgccgtagcccagcaatacagccggacccgccatctgaatcgccgggccaatgccaagaaacagaccagtaccaattgcgccacccaacgcaatcagttgaatatgacggttatgtaatccgcgatgaagcgtcggctcttgattcgacgcagtatcttccgatacggttgacgcgtttttcacgcctttcccctgtgtgtcttttttgttgaggggcacccgatgtcggtgcagccacatcagcttatacgccgccgggataataaacagcgacagcaaaggtgcggtgatcatgccgccaatcatcggcgcggcaatccggctcatcacctctgaaccagcccccgttccccacagaatcggcagcagaccggcgataatcaccgccaccgtcatcgctttcgggcgcacgcgcaggaccgcgccgtgatataacgcctcatccagcttctgctcgctgaatgtttgtggattattcaacgacggcacggcctctatggcgtgacgtaaatacatcagcatcaccacgccaaattcggcggcgaccccggcgagggcgataaagccagtgcccgtcgccacggaaagatgaaagcccat

SEQ ID NO: 124813 - DNA, 2240 bp, Homo sapiens
atgcgctcggacccggatacttcagttaatgaaattgagacgaaactttctgccctactgggtagtgagaccactggtgaaatcctttttgacctcttgtgcgctaacggtccagagtggaaccgcttcgttacgctggaaatgaaatatggccggatcatgctggatacggccaaaattattgatgagcaggacgttccgacacatatcctgagcaaactgacttttactttacgtaatcatcctgaaggagtggtgatgaaaaattttgaagttctgcagccactacagaactccctttccggtctaccgctatgggtatctgaacgtatattgcagcagataaatcagttaacccactacgagccagtgatcggcatcatgggtaaaactggggcgggaaagagtagcctttgcaatgccctgtttgccggtgaagtatcgccggtcagcgatgtagcggcctgtacacgtgatcctttacgctttcgcctgcagattggagaacactttatgaccatcgtggatctgcccggcgtgggcgaaagtggcgttcgcgataccgagtatgctgcgctgtaccgcgaacaacttccccggctcgacctgattctgtggctgattaaggctgatgatcgggcactggcgactgatgagcatttttaccgtcaggtgattggcgaagcataccggcataagatgctgtttgttatcagccagtcagacaaagctgaacccaccagcggtggaaatatcctttccacagagcagaaacaaaatatcagccgcaaaatctgcctgctgcatgagctattccagcccgtgcatccggtgtgtgccgtgtcggttcgcctgcacccggtagtagcgctactgcaacaattccgcacggatgatgagcggactcaccggtaccattacgacagtcagcaccggctggtcgactacacgcggacacaatatgaagagccgctggtcgaaagtcgctatctttacgacccgctgggccgcagggtggcaaaacgggtgtggcggcgtgaacgggacctgacgggctggatgtcgctgtcacggaaaccgcaagtgacctggtacggctgggacggcgaccggctgaccacgatacagaacgacaggagccgcatccagacgatttatcagccggggagcttcacgccactcatcagggtcgaaactgccaccggtgagctggcgaaaacgcagcgccgcagcctggcggatgcccttcagcagtccggcggcgaagacggtggcagtgtggtgttcccgccggtgctggtgcagatgctcgaccggctggaaagtgaaatcctggctgaccgggtgagtgaggaaagccgccgctggctggcatcgtgcggcctgaccgtggagcagatgcaaaaccagatggacccgcacggaagggacaacagcgtggtaccagaatacgatgaatggggtaacctgctgaatgaagagaacccgcatcagctgcagcagcttatccgcctgccggggcagcagtatgatgaggagtccggcctgtattacaaccgccaccgctattatgacccgctgcaggggcgatatatcactcaggatccgattgggctgaaagggggatggaatttttatcagtatccgttgaatccgatctcagacatcgaccccctgggtttatctatgtgggaggttgccagacagatgaacgctatcgcgagtaaattgccggaaggttttcatattggaattaattttagcgcttcgcatattatttcgccgacgtttgtcgacgagtgtttaaatttccgtgacagttttacccgccgcgatttaaaccttgttctggaagtcaccgagcgtgacctattgaatgttgatgaaagtctggttcagcggttgaacatactgcatgaaaatggttttgtcatcgcactggatgatttcggtactggctactcagggctttcttatcttcatgacctgcatattgattatatcaaaattgatcacagtttcgttggccgcgtaaacgcagacccagaatcaacccgaattctggattgtgtattggatctggcgcgtaaactttcgatcagtatcgtcgctgaaggtgtcgaaacgaaagaacaacttgactatctgaaccaaaattatatcacatttcagcagggttattatttctataaacctgttacatacatcgacctggtcaaaattatcctttctaaaccgaa

SEQ ID NO: 124814 - DNA, 2919 bp, Homo sapiens
atggagcacgaacgctatgtcggtatctccaacctgatgctgaaacctgaactgtacctggcggtggggatctccgggcagatccagcacatggttggcgctaacgcgtcgcaaaccattttcgccatcaataaagataaaaatgcgccgatcttccagtacgcggattacggcattgttggcgacgccggagctcttatgtccgaagatatctttgacgccatcatcgtcggtgcagggcttgccggttcggttgccgcactggtgctcgcccgcgaaggtgcgcaagtgttagttatcgagcgtggcaattccgcaggtgccaagaacgtcaccggcgggcgtctctatgcccacagtctggaacacattattcctggtttcgccgactccgcccccgtagaacgcctgatcacccatgaaaaactcgcgtttatgacggaaaagtcagcgatgactatggactactgcaatggtgacgaaacctcgccatcccagcgttcttactccgttttgcgcagtaaatttgatgcctggctgatggagcaggccgaagaagcgggcgcgcagttaattaccgggatccgcgtcgataacctcgtacagcgcgatggcaaagtcgtcggtgtagaagccgatggtaaccgcgttatgaaaaagatcctgacaaccccgatcaaagctgaagatctgcaagatattcgcgtcggcgatgtgatctacctgaccggtacgctggtgacctgccgcgacgtttgtcaccgccgtttgatcgaactgaaacgtccgatcccttacgatctcaacggcaaagcgattttccacgctggccccatcaccgcatatcgccttgatgcggctcggaaaaaaataacctctgcccggagtctggttctgaccgatagaacccggaacgcggtgagacaaggagttaccgtgagtagcgtcctgggtacggaagttccagcgcttaacggtacctgcgaaacctttacctttagaggcaccgatctctatcagtgggataacgtgccgaaagcggtggttgaaggtctggaaggatcgttaaacgtaccggttagcgaaacggtgatgtggaccaataacatcacttatatgctgaagagtgaaaacaaaaccacgggcgaccgtttgtcgatcatcccggagtatacgttgaactcaacgctgagctggcaggcacgggaagatttgtcgatgcaaacgaccttcacctggtacggcaagcagcagccgaagaagtacaactataaaggtcagccagcggttggaccggaaaccaaagaaattagtccttacagcattgttggcctgagcgcgacctgggatgtgacgaagaatgtcagtctgaccggcggcgtggacaatctgttcgacaaacgtttgtggcgtgcgggtaatgcccagaccacgggcgatttggcaggggccaactatatcgccggtgccggggcgtatacctataacgagccgggacgtacgtggtatatgagccccaatcggatcctgagtgatatatcgcccctgcagcgggtcataatagcggtggcggttgtaatacaggccggactcctcatcatactgctgccccggcaggcggataagctgctgcagctgatgcgggttctcttcattcagcaggttaccccattcatcgtattctgcgtaccacgctgttgtcccttccgtgctgataagggccagcggcaggccgcgatggtcgcagtggtacagtgttacaacaaaatcccatgggatgtgatgaagctcaacaaagccggattcaacgtgccggaaagttatagtttgttgaaaatgcccccagtgggatgcctgataagcgcacttaagaaagctgaagaccgacaagaagtgattttacggctgtttaatccggctgaatcagcaacctgtgatgcgactgttgctttcagtcgcgaggtgatttcttgctcagaaacgatgatggatgaacacattaccaccgaggaaaatcaagcgcgtatggacttacaacactggcaggcacagttcgaaaactggttgaaaaaccatcatcagcaccaggacgcggcccatgacgtgtgtcattttcgccgcgtctgggctacggcacagaagctggcggcagatgacgatgtcgatatgctggtgattttaaccgcctgttattttcacgatattgtgagcctggcgaaaaatcatccgcaaaggcagcgttcttcaatcctggcggcagaagagacgcgtcgcctgctccgtgaagagttcgagcaatttccggcggagaaaatcgaggccgtttgtcatgccattgccgctcacagtttcagcgcgcaaatcgcccccttaacaacggaagctaaaattgtccaggatgcggatcggctggaagccctgggggcgattggcctggcgcgcgtgtttgccgtttcaggggcattgggcgtggcgctgtttgatggtctggaaaccgtaatcgtagaacgttacaacacccttggcggtgtttgcctgaacgtcggctgtatcccttctaaagcactgctgcacgtagcaaaagttatcgaagaagccagagcgctggctgaacacggtatcgtcttcggcgaaccgaaaaccgatatcgacagattcaccccggacgaaatcatcgtcggtttgccgctgaatatggacggcaccgagcaaccattgactgccagagcgcgtaaatttgccaaccgtattcatggccgtttcggtgttgaagtaaagctccatgacgagcgtcttagcactgtggaagcccgttccggtctgtttgaacagggcggctatcgggcgctcaacaaaggcaaagttgactctgcctctgcggttattattctcgaaagctatttcgagcagggatattaa

SEQ ID NO: 124815 - DNA, 1191 bp, Homo sapiens
atggccaggcttgcggccctgaaagcctgtgagaccgtctattcgatgggcgtgcgtagccatcgccgttcaccgctggagcatctatggcagttgaaagatcaactggtcaatgaaggtgaactggtgctggaaacgctggttattgatggtgatgagaacacggtgctggtaccaggcgatcgttacgcgcaaatgcgtaatgtctatttcatcccttccgcgctggcgctgaaaaactggctgaagaagtgtggttttgtagatatccgcattgcggatgtgagcagaataccaccacagaagagcagcgacgcaccgaatggatggttaccgaatcgctggccgatttcctcgacccacatgatccgggtaaaacggtggaaggttatccggcacctaaacgcgcgcgcaatagaaaccgcgccgaagatcaccgacagcgccttcggcaccgtacgcggaaaaaacagacgcatggtcagcgacgccgacatcgcccagaacccgcccagcgccagccccagacaggcacgaccgattaaaagcaaactgaatgagttagcaaaggaaaccagcaagcaggagagcgtcaccaaaacggcaaacaaaataacaactcgcctagatccagcaggtaggcggcctggaaggttttatcgccaaacggacgatgctcgaaaaaatgaagggcgaaattcttcgggttaccggaagaagagaaacgcgctctggcagcacttcatgacactgcaagggaacggcagaagcagaagtttctggaggattattctattgatgttgcctctattcccggcagttggccctgcgcgtaaagcggcgttacggtcttatggtattgaaacagccgcagatgttacccgtcgtggcgttaagcaagtgaaagggtttggcgaccatctgacccaggcggttatcgactggaaagcgagctgtgaacgccgttttgtgttcaggccgaatgaagcgataacgccagcagacagacaagcggtaatggcgaaaatgaccgccaaacgacatcggctggaatcggcgttgacagtcggcgcgacagagttgcagcgattccgccttcatgctccagcacggaccatgccgttgatggaaccgttacgtcaggcagcagaaaaactggctcaggcgcaggcagatttaagccgctgctga

SEQ ID NO: 124816 - DNA, 1515 bp, Homo sapiens
  misc_feature (1)...(1515): n = a,t,c or g
atgttcgctcggatttggtcatcgcatccacaatggctgacattgtatttagcgcaacatcgcgcagtgattatccccgatgatgcaaaactgcacagaaatttactccgctggtatagcgcaggtcgcctggatatccccgaacttctggattacgcccagtcatggcgggaaactgaacctgataatgaagatgcgccttattatgaatacgcgcaacgcgtctattgtggagaaggcgaaagcctgttggcagaactttgtgactactggcgcgagtatccctccacccaggcggatgctttaatgttgcaatggtgccgtcagcatcgggtcgattattacccattatctggtggcaaacgggtgtggcggcgtgaacgggacctgacgggctggatgtcgctgtcacggaaaccgcaagtgacctggtacggctgggacggcgaccggctgaccacgatacagaacgacaggagccgcatccagacgatttatcacgacggggacgccttacacgacccnaacgacacagacacgacacctgcgctggactgccacttcagacagatcccggctggcgaagacggtggcagtgtggtgttcccgccggtgctggtgcagatgctcgaccggctggaaagtgaaatcctggctgaccgggtgagtgaggaaagccgccgctggctggcatcgtgcggcctgacggtggcgcagatgcaaagccagatggacccggtatacacgccggcgcgaaaaattcacctgtaccactgcgaccatcgcggcctgccgctggcccttatcagcacggaagggacaacagcgtggtacgcagaatacgatgaatggggtaacctgctgaatgaagagaacccgcatcagctgcagcagcttatccgcctgccggggcagcagtatgatgaggagtccggcctgtattacaaccgccaccgctattatgacccgctgcaggggcgatatatcactcaggatccgattgggctgaaagggggatggaatttttatcagtatccgttgaatccgatctcaaatatagatccattaggattagaaacactaaaatgcattaagccactgcattcaatgggcggaactggtgaaagaagcggtccagatatatgggggaatccgttctatcatcaatatctttgtgtcccagactggtacaaggggacttatatcttgttgcgtttgcggccaaaaggaaaccaaacgggggggaagaaattcaaaaagggagatactactgaccatcgaccagaagaccctagtgctgtggtcctatgtgtcagggagcggatactgctgttgggaagacgtctccacatccccctggcacagcagctggtcggcgtcaaaagcggctttttgcagattatccaggtcacggcgacggcgatccggcatgtggcactcaatgcggattttcacaggcatagccaggccgatatccagcattgcgtttttaatgattcgggcgacgttatcgcg

SEQ ID NO: 124817 - DNA, 4770 bp, Homo sapiens
ttaaagagagggatatgtcaggcagccaaggtggcttgtgtgtagaataggcgcgacggtgggcaacagcagccagttcaggcattgccagcggctgtagcccagcgaatccagcacaatgacctgctgcaacagccatttttcgctcaatactgctgctaagatccacagcagaaatgcgctttctttcactgcaagggtgaggcccagaccgatgccaaatcggtccattggcggagtgaaatacgggaaatagtcataaagcagccctccgtcagcaaagagcagaagggcgctggtggcaaaagccacatggggaatggcgagcagccacggcagacgggcgcacatacgctgccatttcggcccaggccacagcgccacaatcaccagcagggcaatcaacaatgccccgaccgccgcgatggttgtcgacaccagcgttgccagtaatgcctgcggtaactgtggatcggcaaataacgcctgccagtgtgtcaacgacaaagcaggcgatatcagcgtgagagctgccgggatcagcggtgcataaatcaccgccaccatcgcccacagcaaaaagattaatgcgtaccgtaacggtgtagccattcttgttccagcgcatttacccaaccgccagttgccgcccatcgggtgaagaagccaggaacattggggcaaactacacaacatgccgggagcgcgattagggatataattgatctcttccataattttggcgatgcgctcgcctgtttccttggccacctttttcggcgagcggatataacgactcacggtcatttttgttacgccagccagcgtagcgatatccgtccaggtacgcaacgtttcaccaaccgtcagattaaaataccctttaaatagccagaagccagcgtcgtttacgtgtgacgcgatcacgctgcccgcaccggttgccagtaccattaaagcgggatcggcatgggtaacgttgataatcggcaacaccacacccgcggtggtaatggccgcgacggtggcagagcccagagcgatacgcaacagcgccgcaacagtccagcacatcaataacggcgaaagtgtagttccggtcattaagtgtgaaatatagtgcccgacaccgctatctactaatacctgcttaaacgcgccgccgccagcgataataaacacaatcatcgcgatagcgcctatagaatccccaatgatatccatgatttgctcgatggtgcgtccattacgtcggcccagtgtgaaaatcgcaataacaatggcaataaacagcgcaacggcagggttaccgacaaattcaaagaagaggcgcacggtgttagttttcggtaacgtaatttcacaaacggcggcgatagccatcaagatgaccgggatcacggcaggaaaatctggtcccaaagaggggattccctttggtaaacgcttcgggttaaataagctccggggtgcttccaaacgattacagtttagaaaagggtctgcacatactgcggatggtatgaaccatagataacccagggggtcgatgtctgatatcggattcaattgatatccatacaggttccatccccccttcagtccaatcggatcctgagtgatatatcgcccctgcagcgggtcataatagcggtggcggttgtaatacaggccggactcctcatcatactgctgccccggcagccggataagctgctgcagctgatgcgggttctcttcattcagcaggttgccccattcatcatattctgcgcaccacgctgttgccccttccgtgctgatgagcgccagcggcaggccgcgatggtcgcagtggtacaggtggatttttcgcgccggcgtgtacaccgggtccatctggttttgcatctgctccacggtcaggccgcacgatgccagccagcggcggctttcctcactcacccggtcagccaggatttcactttccagccggtcgagcatctgcaccagcaccggcgggaacaccacactgccaccgtcttcgccgccggactgctgaagggcatccgccaggctgcggcgctgcgttttcgccagctcaccggtggcagtttcgaccctgatgagtggcgtgaagctccccggctgataaatcgtctggatgcggtcctgtacgtcgcacccgtgcgtttctttgttttctgtttcgtgtttcgtgtttttctttttttcgttgttttctgtcttcttttcttgtttgtttgtgttttttttgtgtttttgtctttcgttgttttgcctgtttgtgttttcttttgcttcgcggtttgttttctttcttgtgtcgtttcttttctttttcttttttcttcctttgtgtcttggttttttgtgttctgcgtttggccctatgccttccagctcatattccacgggatcttctaccgtcagaatatttcgtccgggagtattcagcgccgaaaggatggcgtagagcgtggtgcttttaccggagcctgtcggccctgtcaccaggataataccgtgcggaagctgaatgagattttctaaatcctgcttatccgctgccgtcatccccaggttgttcaatgaaagctggaggctgtttttatccagcaggcggagtacggcgcgttcaccatagatggacggcagtgtggatacgcggacatctatgttacgtcgcccgatacgcaaactaattcttccatcctgtggaatacgtttttcggcgatatcaagacgagccatgaccttaattcgggagataagcagtgccgccagttttttgtttggctgtaaaattgtccgcaaaacgccgtcgatgcgaaaacggatcgacattgttttttcataggtttcaatgtggatatcagaggcggtttctttgatggcctcactcaaaatcgcattgatcaagcggataaccggtgccgctgaatcttcattcaggagatcttcatttgcgggcatctcttccgaaagcgagagaagatcgacggattgatcgatatcctgcgcaatctgttgcgactcaccggtattctgatggaataccgcttccagccgagcttcaaaatcagcctgtgacaagctggtcatggtctggcactggccaacctgacgttgaatatcgagtaaccgctcgaatggcgtatcggcgagataaataatctcgccctctgaatagagataaccaattcgttgtgccagcgcccaacgtgacgatggcgcaggggcgtgactgttgaacgtgttttcatccagcaacggcaaatcttccgagccaaccagcgcttttgatttcccgtcgatccgctgtagttgctcctgaaggtaacgggtgtatttctcttttgacagtgagcgataaacatcatcgtaagggaatatcggcggacggataaaaccatcaggttgcgttagcgcgcccggggaggatatacggagagtgtcccttaggggtattcccgcaagagacttgccgtgcttcaaaaaactcgaagaggacagttccgctgtcgtcaggctgcgcgtcactgtatgtttgggggcgttaaacagcgtttctacatcgccctgttcgacaatcttaccgtcagacatcaccgccacgtcatccgccagacgcgccacaacgcccatatcatgggtcaccagcagcattcccggcgcttgtttttgcataatgctttccagcagatcgaggatgcgcgcctgtgctaccacgtcaaggtcggtggtcggttcatcggcgatgataaacggtgattcacacagcaccgccatcgcaatcatcatgcgctgcaacatgccgccgctcatctcgaacgggtacagcttcagcacgcgcgcggcgttttccagccccaccgcttctatggcagcggtaagcgtagcgtcatcggcgggtttccctaacgccaggcaggtttcccgcgcgtgggtgtgcatggtgtgcagtggattaaaggcgctgcgcgggttctgcatgatggtggcaattttgatgccgcgcagggcgcaaggcgaaaccggtttgccatcggctaaaatttcccccgccgtctggcgaacgccagcgggcaaaatgcccagcgttgcggcgcaggttaatgatttcccgctgccgctaccgccgactaacgccagcttgcctttatacgcgcgtttgtttataaactgcccaaatgaaactaaatgggaaatttccagtgaagttcgtaaagtattttttgatccttgcagtctgttgcattctgctgggagcaggctcgatttatggcctataccgctacatcgagccacaatacgtaaaccgctaacaatggcgatacgatcgccctggcgggtaaccagcggtaaaacctgacccataacactccccttataaacctgctcaacaaagtcgctcagtttgtcgatgaaagacttgatgtacatcaggcgctcaaggttcagcacgcccaaaccgtcgaggttgatcgggttcgcgacaccacctaccgccaggttctgaatgtgcggcgttttaccgcccagcagcgccacgacgcggttagcgtcacgctggcactccaacgcttgcaggtagtgcgctaccgcaatcaggttcacttccggcggcagtttcatcgccggatgaccccagtagccattagcgaaaatacccaactgaccgctggcaaccagatctttgatcttgttctgaactttggtgaactcttccggactgttcaggtgccaggtcgaaacgcctttcagcat

SEQ ID NO: 124818 - DNA, 3024 bp, Homo sapiens
atgacccaaagtaacgggcagacgttggttgttgataccgatgaacagccacgcactgacgccagcgcagaaggcttagcccgtttaaatccttcatttgatagtctcggttctgtgacagcgggtaatgcatcatccataaacgatggcgcagctgcggtaatgatgatgagcgaagccaaagcacgagcgttgaatttacccgtgctggcccgcattcgcgcatttgccagcgttggtgtagatccggcattgatgggaattgcgccggtgtatgcgacccgccgttgcctggagcgtgtaggctggcagttggctgaagtcactccgccagaagaagcgaaagagatcccacaggttgcaggctctctggaagaagcactgaacgaactggatctggaccgcgagttcctgaaagccggtggcgtgttcactgacgaagcaattgatgcgtacatcgctctgcgtcgcgaagaagatgaccgcgtgcgcctgggatcggtggcaagcacatcacgccgggatgcgacgcaaatgcgtcttatccggcctacacgggttgatgatgtggtaggccggagcagtgtggcactggaaaaccagggcaaatgggcgcaggcggcagcacttcagcggcaacgactggcgctggaccccggcagcgtatggattacttaccgactttcgcaggatctctggcaggccggacaacgcagccaggccgatacgttaatgcgcaatctggcgcagcagaagtcgaacgacccggagcaggtttacgcttacgggctgtacctctctggtcatgaccaggacagagcggcgctggcgcatatcaatagcctgccgcgtgcgcagtggaacagcaatattcaggagctggttaatcgactgcaaagcgatcaggtgctggaaaccgctaaccgcctgcgagaaagcggcaaagaggcagaagcggaagcgatgctgcgccagcaaccaccttccacgcgtattgacctcacgctggctgactgggcgcaacaacggggatcctctagagtcaccagcagcagcaagctgcatggttgcggcattggcggattaccatgtgccggaaagaccgtgcagctctattcaagaaggtggtccccacaaagacagcgggaagaaatgcggggcccaggaagagcactccagagcgagactcaccgaagagttatcggtcaccggtcaccggagtacagtacagcacacggcaggctgacggcgttcacaccacgcagcgaatctggatatccgcatccgtatgccacagacccggcaggtaccgcctgcccgacccggagctgcacccggacagcaccctcagcatgtggccggataaccgtatcgcccgtgacgcgcactatctttaccggtatgaccgtcacggcaggctgacggagaaaaccgacctcatcccggaaggggttatccgcacggatgatgagcgcacccaccggtaccattacgacagtcagcaccggctggtgcactacacgcggacacaatatgcagagccgctggtcgaaagccgctatctttacgacccgctgggccgcagggtggcaaaacgggtgtggcgacgtgaacgggacctgacgggctggatgtcgctgtcacggaaaccgcaagtgacctggtacggctgggacggcgaccgcctgaccacgatacagaacgacagaacccgcatccagacgatttatcagccggggagcttcacgccactcatcagggttgaaaccgccaccggtgagctggcgaaaacgcagcgccgcagcctggcggatacccttcagcagtccggcggcgaagacggtggcagtgtggtgttcccgccggtgctggtgcagatgctcgaccggctggaaagtgaaatcctggctgaccgggtgagtgaggaaagccgccgctggctggcatcgtgcggcctgacggtggagcagatgcaaaaccagatggacccggtgtacacgccggcgcgaaaaatccacctgtaccactgcgaccatcgcggcctgtcgctggcgcttgtcagcacgggaagggccacagaatggtgcgcagaatacgatgaatggggcaacctgctgaatgaagagaacccgcatcagctgcagcagcttatccgcctgccggggcagcagtatgatgaggagtccggcttgtattacaaccgccaccgctattatgacccgctgcaggggaggtatatcactcaggatccgattgggctgaaggggggatggaatttttatcagtatccgctgaatccggttcagtatatagattcaatgggactggcatcaaaatatggacacttaaataatggcggatatggagcgagacccaacaaaccgcctacgcccgatccaagtaaattgccggacatagcgaaacaattaagactgccatatcctattgaccaggccagtagtgcgcataatgttttcaaaacattcttcagagcattaagcccttacgactacacactgtattgcaggaagtgggtaaaaccaaatctgacttgtacgccacaggatgattcccagtatccagggatggatacaaagacagcaagtgattacctgccacagacaaattgccggtaccgagctcgattgtatcatgtactactggggttgttccatgagttgtttgccagtgggtatttgcgtggccacctgacattagccatcgcagaactggaaagtggtgatgaccactccgctcaggcggtgcatacgaccgttagccagagtctggaaaaagccattggtgctggtgaattgtcgccgcgtgaccaggcgctggtgaccgatatgtgggaaaacctgtttcagcaggcgtcacagcagtcggataaggcgttcacgccgcatccggcaaacactgcgagagcagattaccccgccttaaccgctttacccttcaacaatttccgcacccataaccgattcgggtttaacgccgccagcgtactggcatccatcggaatcg

SEQ ID NO: 124819 - DNA, 815 bp, Homo sapiens
atgatcgcggagtttgaatcacgcattctggcattaatcgacggtatggttgaccatgccagtgatgatgagttgtttgccagtgggtatttgcgtggccacctgacagtagccatcgcagaactggaaagtggtgatgaccactccgctcaggcggtgcatacgaccgttagccagagtctggaaaaagccattggtgctggcgctggtgaccgatatgtgggaaaacctgtttcagcaggcgtcacagcagtaagttgcggcgtctggagcagcatgcctgatgcgacgcttatcgcgtcttatcaggcctacacgtcacacgcctacattggtgccggatcggtagaccggataaggcgtttcagcgccgcatccggcaagtggttaaacccgctcaaacaccgtcgcaatagcctgacccagaccgatacacatcgtcgccagaccaatactgaacgtctttgcgttccatcagattcagcagcgtggtgcatggaccgcaatgctgtgccggtactcagcgttggtgtatatcgaaaaatatacgggcaatgcaccgaagttaacggcgtttgatcagccagcagcaccgtgttctcatcaccatcaataaccagcgtttccagcaccagttcaccttcattgacagttgatctttcactgccatagatgctccagcggtgaacggcgatggtaagcacgcccatcgaaaagacggtatcaaaggctttcagtgccggaagtttggttcccaaattaacctttaaaaaccgggggttaaacccaaaaattgacgatagccggtccagcat

SEQ ID NO: 124820 - DNA, 5976 bp, Homo sapiens; identical to SEQ ID NO: 119514
  misc_feature (1)...(5976): n = a,t,c or g

SEQ ID NO: 124821 - DNA, 1758 bp, Homo sapiens
atgattcctccgctgctgatacccaggcaaacagggtctggagaggacctccagcaaactccaacagaccttcacctgagggtcctgactgtcagaaggaaaactaacaaacagaaaggacatccacaccaaaaccccatctgtacgtcaccatcatcaaagaccaaagtgttggaagttctggccagggcattcaggcaggagaaggaaataaagggtattcaagtaggaaaagaggaagtcaaattgtccctgtttgcagatgacatgattgtatatctagaaaaccccatcgtctcagcccaaaatctccttaagctgataagcaatttcagcaaagtctcaggatacaaaatcaatgtgcaaaaatcacaagcattcttatataccaataacagacaaacagagagccaaatcatgactgaactcccatttacaactgcttcaaagagaataaaatacctaggaatccaacttacaagggatgtgaaggacctcttcaaggagaactacaaaccactgctcaacgaaataaaagaggatacaaacaaatggaagaacattccatgctcatgggtaggaagaatcaatattgtgaaaatggccatactgcccaaggtaatttatagattcaatgccatccccatcaagctaccaatgactttcttcatagaattggaaaaaactactttaaagttcatatggaaccaaaaaagagcccgcatcgccaagtcaatcctaagccaaaagaacaaagctggaggcatcacgctacctgacttcaaactatactacaaggctacagtaaccaaaacagcatggtactggtaccaaaacagagatatagaccaatggaacagaacagagccctcagaaataatgctccatatctacaactatctgatctttgacaaacctgagaaaaacaagcaatggggaaaggattccctatttaatatatggtgctgggaaaactggctagccatatgtagaaagctgaaactggatcccttccttacaccttatacaaaaattaattcaagatggattaaagacttaaatgttagatctaaaaccataaaaaccctagaagaaaacctaggcaataccattcaggacataggcatgggcaaggacttcatgtctaaaacaccaaaagcaatggcaacaaaagccaaaattgacaaatgggatctaattaaactaaagagcttctgcacagcaaaagagactaccatcagcgtgaacaggcaacctacagaatgggagaaaatttttgcaatctactcatctgacaaagggctaatatccagaatctacaatgaactcaaacaaatttacaagaaaaaaacaaacaaccccatcaaaaagtgggtgaaggatacgaacagacacttctcaaaagaagacatttatgcagccaaaagacacatgacaaaatgctcatcatcactggctgttagagaaatgcaaatcaaaaccacaatgagataccatctcacaccagttgaagaggtgagggcgggtgagatggccaagacaagaagatgccaaaatgtcaaaggtgccagtgaggaaggcatcagagctcttgctttgtttctcattaacctcactgtccatatggagggcaaccacattgatggagacattgaaattcaaaccaatagaagtcccttgcaagcccctggagaaatctgtgagtcttttactgctttgatggcaatgcaactgctcagtaaattgttttggagttga

SEQ ID NO: 124822 - DNA, 1692 bp, Homo sapiens
ttagtagattgtggatattagccctttgtcagatgggtagattgcaaaaattttctcccattctgtaggttgcatgttcactctgatggtagtttctttcgctgtgcagaagctctttagattatttagatcccatttgtcaattttggcttttgttgccattgcttttggtgttttagacatgaagtccttgcccatgcctatgtcctgaatggtattgcctaggtttccctctagggtttttatggttttaggtctgacatttaagtctttaatccatcttgaattaatttttgtataagatgtaaggaagggatccagtttcagctttctacatatggctagccagttttccaagcaccatttattaaatagggagtactttccccatttcttgtttttgtcaggtttgtcaaagatcagattgttgtagatgcgtggtattatttttgagggctctgttctgttccattggtctatatctatgttttggtaccagtaccatgctgttttggttactgtagccttgtagtatagtttgaagtcaggtagtgtgatgcctccagctttgttcttttggcttaggattgtcttggcaatacaggctcttttatggttccaaatgaaccataaaagtagttttttccaattcttgggcagtatggccattttcacgatattgattcttcctatccatgagcatggaatgttcttccatttgtttgcatcctcttttatttcgttgagcagtgatttgtagttctccttgaagaggtccttcacatcccttgtaagttggattcctaggtattttattctctttgaagcaattgtgaatgggagttcactcatgatttggctctctgtttgtctgttattggtgtataggaatgcttgtgatttttgcacattgattttgtatcctgagactttgctgaagttgcttatcagcagctcctccttgtacctctggtagaattcggctgtgaatccgtctggtgctggactttttttggttggtaggcttttaattattgcctcaatttcagagcctgttattggtctattcacggattcaacttcttcctggttaagtcttgggagggtgtatgtgtccaggaatttatccatttcttctagattttctagtttatttgcatagagttgtttatagtattctctgatggtagtttgtatctctttggtgtttgatgatggtgatgtacagatgaggttttggtgtggatgtcctttctgtttgttagttttccttctaacagtcaggaccctcagctgcaggtctgttggagtttgctggaggtccactccagaccctgtttgcctgggtatcaccaggagaggctgtagaactgcagatactgcagaacagcaaatgttgctgcctgatcgtttctctgaaagcttcatctcagaggggcacccagctgtatgagttgtcagttggcccctactgggcggtgcctcccagttaggcttctcgggggtcagggacccacttgaggaggcagtctgtccattctcagatctcagactccatgctggcagaaccactactctcttcaaagctgtcagacagggatgtttaagtctgcagaagtttctgctgccttttgttgagctatgcccttgtcctctcaggtgccaccagacttccctgtatttcctcaccat

SEQ ID NO: 124823 - DNA, 2523 bp, Homo sapiens
ttagccctttgtcagatgagtaggttgcgaaattttctcccatgttgtaggttgcctgttcactctgatggtagtttcttttgctgtgcagaagctctttagtttaattagatcccatttgtcaattttgtcttttgttgccattgcttttggtgttttggacatgaagtccttgcccacgcctatgtcctgaatggtaatgcctaggttttcttctagggtttttatggttttaggtttaacgtttaaatctttaatccatcttgaattgatttttgtataaggtgtaaggaagggatccagtttcagctttctacatatggctagccagttttcccagcaccatttattaaatagggaatcctttccccattgcttgtttttctcaggtttgtcaaatatcagatagttgtagatatgcggcattatttctgagggctctgttctgttccattgatctatatctctgttttggtaccagtaccatgctgttttggttactgtagccttgtagtatagtttgaagtcaggtagtgtgatgcctccagctttgttcttttgtcttaggattgacttggcaatgcgggctcttttttggttccacatgaactttaaagtagttttttccaattctgtgaagaaagtcattggtagcttgatggggatggcattgaatctgtaaattaccttgggcagtatggccattttcacgatattgattcttcctacccatgagcatggaatgttcttccatttgtttgtgtcctcttttatttccttgagcagtggtttgtagttctccttgaagaggtccttcacatcccttgtaagttggattcctaggtattttattctctttgaagcaattgtgaatgggagttcacccatgatttggctctctgtttgtctgttgttggtgtataagaatgcttgtgatttttgtacattgattttgtatcctgagactttgctgaagttgcttatcagcttaaggagattttgggctgagacgatggggttttctagataaacaatcatgtcgtcttgccaaacagggacaatttgacttcctcttttcctaatgaatacccttatttccttctcctgcctgatgcccctggccagaacttccaacactatgttaataggagcggggagagagggcatccttgtcttgtgccagttctcaaagggaatgcttccagtttttgcccattcagtatgatattggcagccttgcatcccagggatgaagcccacttgatcatggtggataagctttttgatgtgctgctggattcggtttgccagtattttattgaggatttttgcatcaatgttcatcaaggatattggtctaaaattctcttttttggttgtgtctctgcccggctttggtatcagaatgatgctggcctcataaaatgagttagggaggattccctctttttctattgattggaatagtttcagaaggaatggtaccagttcctccttgtacctctggtagaattcggctgtgaatccatctggtcctggactctttttggttggtaaactattgattattgccacaatttcagagcctgttattggtctattcagagattcaacttcttcctggtttagtcttgggagagtgtatgtgtcgaggaatgtatccatttcttctagattttctagtttatttgcgtagaggtgtttgtagtattctctgatggtagtttgtatttctgtgggatcggtggtgatatcccctttatcattttttattgtgtctatttgattcttctctctttttttctttattagtcttgctagcggtctatcaattttgttgatcctttcaaaaaaccagctcctggattcattgattttttgaagggttttttgtgtctctatttccttcagttctgctctgattttagttatttcttgccttctgctagcttttgaatgtgtttgctcttgcttttctagttcttttaattgtgatgttagggtgtcaattttggatctttcctgctttctcttgtaggcatttagtgctataaatttccctctacacactgctttgaatgcatcccagagattctggtatgtggtgtctttgttctcgttggtttcaaagaacatctttatttctgccttcatttcgttatgtacccagtagtcattcaggagcaggttgttcagtttccatgtagttgagcggctttgagtgagattcttaatcctgagttctagtttgattgcactgtggtctgagagatagtttgttataatttctgttcttttacatttgctgaggagagctttacttccaactatgtggtcaattttggaataggtgtggtgtggtgctgaaaaaaatgtatattctgttgatttggggtggagagttctgtagatgtctattaggtctgcttggtgcagagctgagttcaattcctgggtatccttgttgactttctgtctcgttgatctgtctaatgttgacagtggggtgttaaagtctcccat

SEQ ID NO: 124824 - DNA, 2880 bp, Homo sapiens; identical to SEQ ID NO: 124330

SEQ ID NO: 124825 - DNA, 1842 bp, Homo sapiens; identical to SEQ ID NO: 114618

SEQ ID NO: 124826 - DNA, 3543 bp, Homo sapiens; identical to SEQ ID NO: 118071

SEQ ID NO: 124827 - DNA, 2871 bp, Homo sapiens
tcattggtctgtatctctgttttggtaccagtaccatgctgttttggttactgtagccttggagtatagtttgaagtcaggtagcgtgatgcctccagctttgttcttttggcttaggattgacttggcaatgtgggctcttttttggttccatacgaactttaaagtagttttttccaattctgtgaagaaagtcattggtagcttgatggggatggcactgaatctataaattatcttgggcagtatggccattttcacgatattgattcttcctatccatgagcatggaatgttcttccatttgtttgtgtcctcttttatttcattgagcagtggtttgtagttctccttgaagaggtccttcacgtcccttgtaagttggattcctaggtattttattctctttgaatcaattgtgaatgggagttcactcatgatttggctctccgtttgtctgttattggtgtataagaatgcttgtgatttttgcacattgattttgtatcctgagactttgctgaagttgcttatcagcttaaggagatttggggctgagacgatggggttttctagatatacaatcatgtcatctgcaaacacggacaatttgacttcctcttttcctaattgaataccctttatttctttctcctgcttgactgccctggccagaacttccaacactatgtggaataggagtggtgagagagggcatccctgtcttgtgccagttttcaaagggaatgcttccagtttttgcccattcactatgatattggctgtgggtttttcataaatagctcttattattttgagatacatcccatcaatacctaatctattgagagtttttagcatgaagggctgttgaattttgtcaaaggccttttctgcatctattgagataatcatgtggtttttgtctttggttctgtttatatgctggattacatttattgatttgcgtatgttgaaccagccttgcatcccagggatgaagccttcttgtccatggtggataagctttttgatgtgctgctggattcggtttgccagtattttattgaggatttttgcatcgatgttcatcaaggatattggtctaaaattctcttttttggttgtgtctctgccaggctttggtatcaggatgctgctggactcataaaatgagttagggaggattccctctttttctattgattggaatagtttcagaaggaatggtaccagctcctccttgtacctctggtagaattcggctgtgaatccgtctggtcctggactttttttggttggtaagctattaattattgcctcaatttcagagcctgttattgatctattcagagattcaacttcttcctggtttagtcttgggagggtgtatgtgtcgaggaatttgtccatttcttctagattttctagtttatttgcgtagaggtgtttatagtattctctgatggtagttttgtattttagcagtctatcgattttgttgatcttttcaaaaaaccagctcctggattcattgattttttgaagggttttttgtgtctctatttccttcagttctgctctgatcttagttatttcttgccttctgctagcttttgaatgtgtttgctcttgctgctctagttcttttaattgtgatgttagggtgtcaattttagatccttcctgctttctcttgtgggcatttagtgctgcaaatttccctctacacactgcttttaatgtgtcccagagattctggtatgttgtgtctttgttctcgttggtttcaaagaacatctttatttctgccttcatttcgttatgcacccagtagtcattcaggagaaggttgttcagtttccatgtagttgagtggttttgagtgagtttcttaatcctgagttctagtttgattgcactgtggtctgagagaatcatcttcatatttaagtgaatatctgtgatttttacttgtacattttttattacttgagttgccaatttttccacaaatgtatcctttttggcttcttttggcttatctttttctgctgctttttgaagggcttcttcaattcgggatagctctttctgtttaacatcctgcaaggatttttcttcttttacagcatcatacttaatacttgctccagggacaacaagcaggtataatccttccagggtcgcaacaactgcttctccataaaggttcttccaaggaatcttcaaagttaatttatttgtgggaactaaaattaaaacaactgaactcatggagacagagagtagaacaatggttaccagaagcttaattggactgccttcattattcattatctctgcttcaacaacgtgcaattcatcctttgcaccagctcctgaactggtggttcttaaagataactggcgctcatttgtatcattatccatctgaaagtgacaacctttgtcaccctttagctcgcaactgagaagatagttctgggccttaggaggcttaagtacatgtccatcaaatcttccatagggtggcggcacacacctcagtacataaaaataagctgctttggccacacatgagtacatcactttattaataaccaaataacattctagttctatgaatttcaacacatgtattgcagtggtctggatctgtgtccccgccgaaatctcataccaaattgtaatccccagtgttggaggtggggcttggtgggaggtgactgggtgataggggtggtttctcatgaacattttagcactatccctcttggtgctctcatgatagtgagttcccataagctccggttgtctaaagtgtgtagcacctccctgctctctctttcttcttcctgctccagccat

SEQ ID NO: 124828 - DNA, 2652 bp, Homo sapiens
ctaccatgctgttttggttactgtagccttgtagtatagtttgaagtcaggtagtgtgatgcctccagctttgttcttttggctcaggattgacttggcaatgcgggctcttttttggttccatatgaactttaaagtagttttttccaattctgtgaagaaagtcattggtagcttgatggggatggcattgaatctgtaaattaccttgggcagtatggccattttcacgatattgattcttcctacccatgagcatggaatgttcttccatttgtttgtgtcctcttttatttccttgagcagtagtttgtagttctccttgaagaggtccttcacatcccttgtaagttggattcctaggtattttattctctttgaagcaattgtgaatgggagttcactcacgatttggctctctgtttgtctgttgttggtgtataagaatgcttgtgatttttgtacattgattttgtatcctgagactttgctgaagttgcttatcagcttaaggagattttgagctgagacaatggggttttgtagatatacggtcatgtcgtctgcaaacagggacaatttgacttcctcttttcctaattgaatactctttatttccttctcctgcctaattgtcctggccagaatttccaacaatttattgatttgcgtatattgaaccagcccttgcatcccagggatgaagcccacttgatcatggtggataagctttttgatgtgctgctggattcggtttgccagtattttattgaggatttttgcatcaatgttcatcaaggatattggtctaaaattctcttttttggttgtgtttctgcccggctttggtatcaggatgatgctggcctcataaaatgagttaggaaggattccctctttttctattgattggaatagtttcagaaggaatggtaccagttcctccttgtacctctggtagaatttggctgtgaatccatctggtcctggactctttttcgttggtaagctattgattattgccacaatttcagctcctgttattggtctattcagagattcaacttcttcctggtttagtcttgggagagtgtatgtgtcgaggaatttatccatttcttctagattttctggtttatttgcgtagacgtgtttgtagtattctctgatggtagtttgtatttctgtgggattggtggtgatatcccttttatcattttttattgcatctatttgattcttctctctttttttctttattagtcttgctagcggtctatcaattttgttgatcctttcaaaaaaccagctcctggattcgttaattttttgaagggttttttgtgtctctatttccttcagttctgctctgattttagttatttcttgccttctgctagcttttgaatgtgtttgcttttgcttttctagttcttttaattgtgatgttagggtgtcaattttggatctttcctgctttctcttgtgggcatttagtgctataaatttccctctacacactgctttgaatgtgtcccagagattctggtatgttgtgtctttgttctcgttggtttcaaagaacatctttatttctgccttcatttcgttatgtacccagtagtcattcaggagcaggttgttcagtttccatgtagttgagcggttttgagtgagattcttaatcctgagttctagtttgattgcactgtggtctgagagatagtttgttataatttctgttcttttacatttgctgaggagagctttacttccaactatgtggccaattttggaataggtgtggtgtggtgctgaaaaaaacgtatattctgttgatttggggtggagagttctgtagatgtctattaggtccgcttggtggagagctgagttcaattcctgggtattcttgttgactttctgtctcgttgatctgtctttctctctggctgcccttaacattttttccttcatttcaactttggtgaatctgacaattatgtgtcttggtgttgctcttctcgaggagtatctttgtggcattctctgtatttcctgaatctgaatgttggcctgccttgctagattggggaagttctcctggataatatcctgtagagtgttttccaacttggttccattctccccatcactttcaggtacaccagtcagacgtagatttggtcttttcacatagtcccatatttcttggaggctttgctcatttctttttattcttttttctctaaacttcccttctcgcttcatttcattcatttcatcttccatcgctgataccctttcttccagttgattgcatcggctcctgaggcttctgcattcttcacgtagttcttgagccttggctttcagctccatcagctcctttaagcacttctctgtattggttattgtagttatacattcttctaaatttttttcaaagttttcaacttctttgcctttggtttgaatgtcctcccgtagctcagagtaatttgatcgtctgaagccttcttctctcagctcgtcaaagtcattctccgtccagctttgttccgttgctggtgaggaactgtgttcctttggaggaggagaggtgctctgctttttagagtttgcagtttttctgctctgttttttccccat

SEQ ID NO: 124829 - DNA, 2358 bp, Homo sapiens
atgtgggaaagtttggaacttcacggagacttgttgaatgattttgaccaaaatgctaatagtgatatgggtagtgaagtccaggctgagttgagctcagatagaaatgagaaagttattgggaactacagtaaaggtcactcttgctattctttagctaaaagactgatagcattgtgcccttgctgtagagatctatggaactttgaacttgagagagatgatttaaggtatctggcagaagaaatttctaagcagcaaagcactcaagatgtggtctggctgctcctcacagcgtacagtcgtatgtgttcacaaagagatggtctgaaattggaacttatgtttaaaagggaaacagagcataaaagtttggaaaatttgcagcctgaccatgtggttgaaaaaaaaaaagagccattttctggggacaaattcaagctggctgcagaaatttgcataagtaaagacaaaccaaatgttaacagccaagacaatggggaaaatgtctccagggcatgcctggaggcctacgagggaaaaaaggttttgtgggccatgcccagggccctgctgctctgtgccactttgggacatgatgccctgcaacccagcccctccagctccagccatggcaaaaaggagccaagatacagcttgggctgttgcttcggagggtgcaaggcccaggctttggcagcttccacctccttcaatcctatcaccaacaggcacctaaggttgtttgagctggccaaggactatatgaatggaacaggaagatatagagttgtcaaacacatgatctttcctgttggtgatgcttataagaagaaaggactcattcctgcccatcaccaggtcatcatagccgaacttgccaccaagaattccaaactaaaccaggaagacattgaatccctgaacagaccaataacaggttctgaaattgaggcaataattaatagcctaccaaccaaaaaaagtccaggaccagatggattcacagccgatttctaccagaggtacaaacaggagctagtaccattccttctgaaactattccaatcaatagaaaaagagggaatcctccctaattcatttgatgaggccagcatcatcctgataccaaagcctggcagagacacaacaaaaaaagagaattttagaccaatatccctgatgaacattgatgcaaaaattctggcaaaccaaatccagcagcagatcaaaaagtttatccaccacgatcaagttggcttcatccctgggatgcaaggctggttcaacatacacaaatcaataaatgtaatccagcatataaacagaaccaaagacaaaaaccacacgattatctcaacagatgcagaaaaggccttcgacaaaattcaacagcccttcatgctaaaaactctgaataaactaggtattgatgggacgtatctcaaaataataagagctatttatgatgaacccacagccaatatcatactgaatgggcaaaaactggaagcattccctttgaaaactggcacaagacagggatgtcctctctcaccactcctattcaacatagtattggaagttctggccagggcaatcaagcaggataaagaaatacaggatattcagttaggaaaagaagtcaaattgtccctatttgcagatgtcatgattgtatatttagaaaactccatcgtctcagtccaaaatctccttaagctgataagtaacttcagcgaagtctcaggatacaaaatcaatgtgcaaaaatcacaagcattcctctacaccaataaaagacaaagagagagccaaatcatgagtgaactcccattcacaattgcttcaaagagaataaaatacctaggaatccaacttacaagggatgtgaaggacctcttcaaggagaactacaaaccactgctcaatgaaataaaagaggacacaaacaaatggaagaacattccatgctcatggattggaagaatcaatatcgtgaaaatggccatactgcccaagataatttatgcagccaaaaaacacatgaaaaaatgctcatcatcactggccatcagagaaatgcaaatcaaaaccacaatgagataccatctcacaccagttagaatggcgatcattaaaaagtcaggaaacaacagaagtacccgtggcctgctcagctgtgactctgctgacctcaggacctcactggtcaaggaagaagtatcagaccatgatacgattgtgatccctgggaaggaaggaaagaaggaaggaaggaaggaaggaaaagggaaggatggagaaggggagagagggaggaaggaaggaaggcccttgactgtaatgcatttctga

SEQ ID NO: 124830 - DNA, 1686 bp, Homo sapiens
atgtcccagggctattccatccaccttgctccagcagcagggtctggggacgagtcagcttctttggaaggccttcatgaaatacaaactgccatcagagaatactacaaacacctctacgcaaataaactagaaaatctagaagaaatggatacattcctcgacacatacactctcccaagactaaaccaggaagaagttgaatctctgaatagaccaataacaggctctgaaattgtggcaataatcaatagtttaccaaccaaaaagagtccaggaccagatggattcacagccgaattctaccagaggtacaaggaggaactgcatataaacagagccaaagacaaaaaccacatgattatctcaatagatgcagaaaaagcctttgacaaaattcaacaacccttcatgctaaaaactctcaataaattaggtattgatgggacgtatttcaaaataataagagctatctatgacaaacccacagccaatattatactgaatgggcaaaaactggaagcattccctttgaaaactggcacaagacagggatgccctctctcaccactcctattcaacatagggttggaagttctggccagggcaatcaggcaggagaaggaaataaagggtattcaattaggaaaagagaaagtcaaattgtccctgtttgcagacgacatgattgtttatctagaaaaccccatcgtctcagcccaaaatctccttaagctgataagcaacttcagcaaagtctcaggatacaaaatcaatgtacaaaaatcacaagcattcttatacaccaacaacagacaaacagagagccaaatcatgagtgaactcccattcacaattgcttcaaagagaataaaatacctaggaatccaacttacaagggatgtgaaggacctcttcaaggagaactacaaaccactgctcaaggaaataaaagaggacacaaacaaatggaagaacattccatgctcatgggtaggaagaatcagtatcgtgaaaatggccatactgcccaaggtaatttacagattcaatgccatccccatcaagctaccaatgactttcttcacagaattggaaaaaactactttaaagttcatatggaaccaaaagagagcccgcatcgccaagtcaatcctaagccaaaagaacaaagctggaggcatcacactacctgacttcaaactatactacaaggctacagtaaccaaaacagcatggtgctggtaccaaaacagagatatagatcaatggaacggaacagagccctcagaaataatgccgcatatctacaactatctgatctttgacaaacctgagaaaaacaagcaatggggaaaggattccctatttaataaatggtgctgggaaaactggctagcgatatgtagaaagctgaaactggatcccttccttacaccttatacaaaaatcaattcaagatggattaaagatttaaacgttagacctaaaaccataaaaaccctagaagaaaacctaggcattaccattcaggacataggcgtgggcaaggacttcatgtccaaaacaccaaaagcaatggcaacaaaagccaaaattgacaaatgggatctaattaaactaaagagcttctgcacagcaaaagaaactaccgtcagagtgaacaggcaacctacaacatggtag

SEQ ID NO: 124831 - DNA, 3154 bp, Homo sapiens
atgggagactttaacaccccactgtcaacattaggcagatcaacgagacagaaagtcaacaaggatacccaggaattgaactcggctctgcaccaggcggacctaatagacatctacggaactctccaccccaaatcaacagaatatacatttttttcagcaccacaccacacctattccaaaattgaccacatagttggaagtaaagctctcctcagcaaatgtaaaagaacagaaattataacaaactgtctctcagaccacagggcaatcaaactagaactcaggattaagaaactcactcaaaaccgctcaactacatggaaactgaacaacctgctcctgaatgactactgggtacataacgaaatgaaggcagaaataaagatgttctttgaaaccaacgagaacaaagacacaacataccagaatctctgggacacattcaaagcagtgtgtagagggaaatttatagcactaaatgcccacaagagaaagcaggaaagatccaaaattgacaccctaacatcacaattaaaagaactagaaaagcaagagcaaacacattcaaaagctagcagaaggcaagaaataactaaaatcagagcagaactgaaggaaatagagacacaaaaaacccttcaaaaaattaatgaatccaggagctggttttttgaaaggatcaacaaaattgatagaccgctagcaagactaataaaggaaaaaagagagaagaatcaaatagacgcaacaaaaaatgataaaggggatatcaccactgatcccacagaaatacaaactaccatcagagaatactacaaaaccctctacgcaaataaactagaaaatctagaagaaatggataaattgctggacacatacactctcccaagactaaaccaggaagaagttgaatctctgaacagaccaataacaggatctgaagttgtggcaataattaatagcttaccaaccaaaaacagtccaggaccagatggattcacagccaaatactaccagaggtacaaggaagaactggtaccattccttctgaaactattccaatcaacagaaaaagagggaatcctccctaactcattttatgaggccagcatcatcctgataccaaagcctggcagagacacaaccaaaaaagagaattttagaccaatatccttgatgaacgttgatgcaaaaatcctcaataaaatactggcaaaccgaatccagcagcacatcaaaaagcttatccaccatgatcaagtgggcttcatccctgggatgcaaggctggttcaatatatgcaaatcaatcaatgtaatccagcatataaacagaaccaaagacaaaaaccacatgattatctcaatagatgcagaaaaggcctttgacaaaattcaacaacccttcatgctaaaaactctcaataaattagtgttggaagttctggccagggcaattaggcaggagaaggaaataaagggcattcaattaggaaaagaggaagtcaaattgtccctgtttgcagatgacatgattgtatatttagaaaaccccatcatctcagcccaaaatctccttaagctgataagcaacttcagcaaagtctcaggatacaaaatcaatgtgcaaaaatcacaagcattcttatacaccaataacagacaaacagagagccaaatcatgagtgaactcccattcacaattgcttcaaagagaataaaatacctaggaatccaacttacaagggatgtgaaggacctcttcaaggagaactacaaaccactgctcaatgaaataaaagaggatacaaacaaatggaagaacattccatgctcatggataggaagaatcaatatcgtgaaaatggccatactgcccaaggtaatttatagattcaatgccatccccatcaagctaccaatgactttcttcacagaattggaaaaaactactttaaagttcatatggaaccaaaaaagagcccgcatcaccaagtcaatcctaagccaaaagaacaaagctggaggcatcacgctacctgacctcaaactatactacaaggctatagtaactcaaaacagcatggtactgctaccaaaacagagatatagaccaatggaacagaacagagccctcagaaataatgctgcatatctacaactatctgatctttgacaaacctgagaaaaacaagcaatggggaaaggattccctatttaataaatggtgctgggaaaactggctagccatatgtagaaagctgaaactggatcccttccttacaccttatacaaaaatcaattcaagatggattaaagatttaaacgttagacctaaaaccataaaaaccctagaagaaaacctaggcattaccattgaggacataggcgtgggcaaggacttcatgtccaaaacaccaaaagcaatggcaacaaaagccaaaattgacaaatgggatctaattaaactaaagagcttctgcacagcaaaagaaactaccatcagagtgaacaggcaacctacaaaatgggagaaaattttcgcaacctactcatctgacaaagggctaatatccagaatctacaatgaactcaaacaaatttacaagaaaaaaacaaacaaccccatcaaaaagtgggcgaaggacatgaacagacacttctcaaaagaagacatttatgcagccaaaaaacacatgaagaaatgctcatcatcactggccatcagagaaatgcaaatcaaaaccactatgagatatcatctcacaccagttagaatggcaatcattaaaaagtcaggaaacaacagcttgcaggtggcctattgtgggatctcaccttatgatcatagctttgtcttggatgcgaccagtaagaaactcctgtgggagatttggatggcagagaagtgtgtattggggcagtggcctgctgacatgcagagtttggaacctaaagggtttttagtagcctttagcagttcaccaatagataccggaggctgctgtgacctgtggggaagtttccttgagtttctgacctgcctggaggcaatgtctaatccctcggtagccattagagaagctgaggccagcagtgactggccttcctcaacctcaggactcctttccgtcactttcataagcacatag

SEQ ID NO: 124832 - DNA, 5712 bp, Homo sapiens
atggtaaagggatcaattcaacaagaggagctaactatcctaaatatttatgcacccaatacaggagcacccagattcataaagcaagtcctgagtgacctacaaagagacttagactcccacacattaataatggaagactttaacaccccactgtcaacattagacagatcaacgagacagaaagtcaacaagaatacccaggaattgaactcagctctgcaccaagcagacctaatagacatctacagaactctccaccccaaatcaacagaatatacatttttttcagcaccacaccacacctattccaaaattgaccacatagttggaagtaaagctctcctcagcaaatgtaaaagaacagaaattataacaaactatctctcagaccacagtgcaatcaaactagaactcaggattaagaatctcactcaaagccgctcaactacatggaaactgaacaacctgctcctgaatgactactgggtacataacgaaatgaaggcagaaataaagatgttctttgaaaccaacgagaacaaagacaccacataccagaatctctgggacgcattcaaagcagtgtgtagagggaaatttatagcactaaatgcctacaagagaaagcaggaaagatccaaaattgacaccctaacatcacaattaaaagaactagaaaagcaagagcaaacacattcaaaagctagcagaaggcaagaaataactaaaatcagagcagaactgaaggaaatagagacacaaaaaacccttcaaaaaatcaatgaatccaggagctggttttttgaaaggatcaacaaaattgatagaccgctagcaagactaataaagaaaaaaagagagaagaatcaaatagacacaataaaaaatgataaaggggatatcaccaccgatcccacagaaatacaaactaccatcagagaatcctacaaacacctctacgcaaataaactagaaaatctagaagaaatggatacattcctggacacatacactctcccaagactaaaccaggaagaagttgaatctctgaatagaccaataacaggctctgaaattgtggcaataatcaatagtttaccaaccaaaaagagtccaggaccagatggattcacagccgaattctaccagagagctatctatgacaaacccacagacaatatcatactgaatgggcaaaaactgcaagcattccctttgaaaactggcacaagacagggatgccctctctcaccactcctattcaacatagtgttggaagttctggccagggcaatcagccaggagaaggaaataaagggtattcaattaggaaaagaggaagtcaaattgtccctgtttgcagacgacatgattgtttatctagaaaaccccatcgtctcagcccaaaatctccttaagctgataagcaacttcagcaaagtctcaggatacaaaatcaatgtacaaaaatcacaagcattcttatacaccaacaacagacaaacagagagccaaatcatgagtgaactcccattcacaattgcttcaaagagaataaaatacctaggaatccaacttacaagggatgtgaaggacctcttcaaggagaactacaaaccactgctcaaggaaataaaagaggacacaaacaaatggaagaacattccatgctcatgggtaggaagaatcaatatcgtgaaaatggccatactgcccaaggtaatttacagattcaatgccatccccatcaagctaccaatgactttcttcacagaattggaaaaaactactttaaagttcatatggaaccaaaaaagagcccgcatcgccaagtcaatcctaagccaaaagaacaaagctggaggcatcacactacctgacttcaaactatactacaaggctacagtaaccaaaacagcatggtactggtaccaaaacagagatatagatcaatggaacagaacagagccctcagaaataatgccgcatatctacaactatctgatctttgacaaacctgagaaaaacaagcaatggggaaaggattccctatttaataaatggtgctgggaaaactggctagccatatgtagaaagctgaaactggatcccttccttacaccttatacaaaaatcaattcaagatggattaaagatttaaacgttagacctaaaaccataaaaaccctagaagaaaacctaggcattaccattgaggacataggcgtgggcaaggacttcatgtccaaaacaccaaaagcaatggcaacaaaagccaaaattgacaaatgggatctaattaaactaaagagcttctgcacagcaaaagaaactaccatcagagtgaacaggcaacctacaacatgggagaaaattttcgcaacctactcatctgacaaagggctaatatccagaatctacaatgaactcaaacaaatttacaagaaaaaaacaaacaaccccatcaaaaagtgggcgaaggacatgaacagacacttctcaaaagaagacatttatgcagccaaaaaacacatgaagaaatgctcatcatcactggccatcagagaaatgcaaatcaaaaccactatgagatatcatctcacaccagttagaatggcaatcattaaaaagtcaggaaacaacaggagagacagaacagctgaggaaacagcagaacggtggaaaatttttgaaagtgttttgagcccacccaacctgaggagagcattcaaagaaaaacaggaagaagaagtcggcttcagaaggtgggttataacaaactcctccaagctaaaacagcatgttttaacccaatgcaaggaagctaagaaccttgaaaaaaggttagaggaatttctaactagaataaccagtttagagaagaacataaatgacctaatggacctgaaaaacacagcacgagaacttcttgacgcctacacaagtatcaatagccaaattaatcaagcggaagaaaggttatcagagactgaagatcaacttaatcaaataaagcatgaggacaagattagagggaaaaaaatgaaaaggaacaaacaaagcctccaagaaatatgggactatgtgaaaaggccaaatctacgtctgattggtgtagctgaaagtgacagggagaatggagccaagttagaaaacactcttcagtatattatccaggagaacttccccaacctagcaagacaggccaacactcaaattcaggaaacacagagaccaccacaaagatactccttgagaaaagcaaccccaagacacataattgtcagattcaccaaagttgaaatgaaggaaaaaatgttaagggcagccagagagaaagaaatacaaactaccatcagagaatactacaaacacctctacgcaaataaactagaaaatctagaagaaatggatacattcctcgacacatacactctcccaagactaaaccaggaagaagttgaatctctgaatagaccaataacaggctctgaaattgtggcaataatcaatagtttaccaaccaaaaagagtccaggaccagatggattcacagccgaattctaccagaggtacaaggaggaactggtaccattccttctgaaactattccaatcaatagaaaaagagggaatcctccctaactcattttatgaggccagcatcattctgataccaaagccgggcagagacacaaccaaaaaagagaattttagaccaatatccttgatgaacattgatgcaaaaatcctcaataaaatactggcaaaccgaatccagcagcacatcaaaaagcttatccaccatgatcaagtgggcttcatccctgggatgcaaggctggttcaatatacgcaaatcaataaatgtaatccagcatataaacagagccaaagacaaaaaccacatgattatctcaatagatgcagaaaaagcctttgacaaaattcaacaacccttcatgctaaaaactctcaataaattaggtattgatggtacatatttcaaaataataagagctatctatgacaaacccacagccaatatcatactgaatgggcaaaaactggaagcattccctttgaaaactggcacaagacagggatgccctctctcaccgctcctattcaacatagtgttggaagttctggccagggcaatcaggcaggagaaggaaataaagggtattcaattaggaaaagaggaagtcaaattgtccctgtttgcagacgacatgattgtttatctagaaaaccccattgtctcagcccaaaatctccttaagctgataagcaacttcagcaaagtctcaggatacaaaatcaatgtacaaaaatcacaagcattcttatacacgaacaacagacaaacagagagccaaatcatgggtgaactcccattcacaattgcttcaaagagaataaaatacctaggaatccaacttacaagggatgtgaaggacctcttcaaggagaactacaaaccactgctcaaggaaataaaagaggacacaaacaaatggaagaacattccatgctcatgggtaggaagaatcaatatcgtgaaaatggccatactgcccaaggtaatttacagattcaatgccatccccatcaagctaccaatgactttcttcacagaattggaaaaaactactttaaagttcatatggaaccaaaaaagagcccgcattgccaagtcaatcctaagccaaaagaacaaagctggaggcatcacactacctgacttcaaactatactacaaggctacagtaaccaaaacagcatggtactggtaccaaaacagagatatagatcaatggaacagaacagagccctcagaaataatgccgcatatctacaactatctgatctttgacaaacctgagaaaaacaagcaatggggaaaggattccctatttaataaatggtgctgggaaaactggctagccatatgtagaaagctgaaactggatcccttccttacaccttatacaaaaatcaattcaagatggattaaagatttaaacgttaaacctaaaaccataaaaaccctagaagaaaacctaggcattaccattcaggacataggcgtgggcaaggacttcatgtccaaaacaccaaaagcaatggcaacaaaagacaaaattgacaaatgggatctaattaaactaaagagcttctgcacagcaaaagaaactaccatcagagtgaacaggcaacctacaacatgggagaaaatttttgcaacctactcatctgacaaagggctaatatccagaatctacaatgaactcaaacaaatttacaagaaaaaaacaaacaaccccatcaaaaagtgggcgaaggacatgaacagacacttctcaaaagaagacatttatgcagccaaaaaacacatgaagaaatgctcatcatcactggccatcagagaaatgcaaatcaaaaccactatgagatatcatctcacaccagttagaatggcagtcattaaaaagtcaggaaacaacaggtcacatttcaacatgagatttggagaggacagacacccgaatcacagcaatgggtctcagcaagcagctccatcagctgcctcagacttgtctggaaggtggcagacgtgggcaattcctgccttgctgaagagggatacactgctgagtgaatgctctgaagcagaggagcatttggtgcaactgaagttgtctgaa

SEQ ID NO: 124833 - DNA, 3351 bp, Homo sapiens
atggtaaaggaatcaattcaacaagaggagctaactatcctaaatatttatgcacccaatacaggagcacccagattcataaagcaagtcctgagtgacctacaaagagacttagactcccacacattaataatgggagactttaacaccccactgtcaacattagacagagcaacgagacagaaagtcaacaaggatacccaggaattgaactcagctctgcaccaagcggacctaatagacctaatagacctaatctacagaactctccaccccaaatcaacagcaatatacatttttttcagcaccacaccacacctattccaaaattgaccacatagttggaagtaaagctctcctcagcaaatgtaaaagaacagaaattataacaaactatctctcagaccacagtgcaatcaaactagaactcaggattaagaatctcactcaaagccgctcaactacatggaaactgaacaacctgctcctgaatgactactgggtacataacgaaatgaaggcagaaataaagatgttctttgaaaccaacgagaacaaagacaccacataccagaatctctgggacgcattcaaagcagtgtgtagagagaagtttatagcactaaatgcctacaagagaaagcaggaaagatccaaaattgacaccctaacatcacaattaaaagaactagaaaagcaagagcaaacacattcaaaagctagcagaaggcaagaaataactaaaatcagagcagaactgaaggaaatagagacacaaaaaacccttcaaaaaatcaatgaatccaggagctggttttttgaaaggatcaacaaaattgatagaccgctagcaagactaataaagaaaaaaagagagaagaatcaaatagacacaataaaaaatgataaaggggatatcaccaccgatcccacagaaatacaaactaccatcagacaatactacaaacacctctatgcaaataaactagaaaatctagaagaaatggatacattcctcgacacatacactctcccaagactaaaccaggaagaagttgaatctctgaatagaccaataacaggctctgaaattgtggcaataatcaatagtttaccaaccaaaaagagtccaggaccagatggattcacagccgaattctaccagaggtacaaggaggaactgccgggcagagacacaaccaaaaaagagaattttagaccaatatccttgatgaacattgatgcaaaaatcctcaataaaatactggcaaaccgaatccagcagcacatcaaaaagcttatccaccatgatcaagtgggcttcatccctgggatgcaaggctggttcaatatacacaaatcaataaatgtaatccagcatataaacagagccaaagacaaaaaccacatgattatctcaatagatgcagaaaaaaagcctttgacaaaattcaacaacccttcatgctacaaactctcaataaattaggtattgatgggacgtatttcaaaataataagagctatctatgacaaacccacagccaatatcatactgaatgggcaaaaactggaagcattccctttgaaaactggcacaagacagggatgtcctctctcactgctcctattcaacatagtgttggaagttctggccagggcaatcaggcaggagaaggaaataaagggtattcaattaggaaaagaggaagtcaaattgtccctgtttgcagacgacatgattgtttatctagaaaaccccatcatctcagcccaaaatctccttaagctgataagcaacttcagcaaagtctcaggatacaaaatcaatgtacaaaaatcacaaacattcttatacaacaacaacagacaaacagagagccaaatcatgagtgaactcccattcacaattgctttaaagagaataaaatacctaggaatccaacttacaagggatgtgaaggacctcttcaaggagaactacaaaccactgctcaaggaaataaaagaggacacaaacaaatggaagaacattccatgctcatgggtaggaagaatcaatatcgtgaaaatggccatactgcccaaggtaatttacagattcaatgccatccccatcaagctaccaatgactttcttcacagaattggaaaaaactactttaaagttcatatggaaccaaaaaagagcccgcatcgccaagtcaatcctaagccaaaagaacaaagctggaggcatcacactacctgacttcaaactatactacaaggctacagtaaccaaaacagcatggtactggtaccaaaacagagatatagatcaatggaacagaacagagccctcagaaataatgccgcatatctacaactatctgatctttgacaaacctgagaaaaacaagcaatggggaaaggattccctatttaataaatggtgctgggaaaactggctagccatatgtagaaagctgaaactggatcccttccttacacgttatacaaaaatcaattcaagatggattaaagatttaaatgttagacctaaaaccataaaaaccctagaagaaaacctaggcattaccattcaggacataggcgtgggcaaggacttcatgtccaaaacaccaaaagcaatggcagcaaaagccaaaattgacaaatgggatctaattaaactaaagagcttctgcacagcaaaagaaactaccatcagagtgaacaggcaacctacaacatgggagaaaattttcgcaacctactcatctgacaaagggctaatatccagaatctacaatgaactccaacaaatttacaagaaaaaaacaaacaaccccatcaaaaagtgggcgaaggacatgaacagacacttctcaaaagaagacatttatgcagccaaaaaacacatgaaaaaatgctcatcatcactggccatcagagaaatgcaaatcaaaaccactatgagatatcatctcacaccagttagaatggcaatcattaaaaagtcaggaaacaacagaatcagaaggcatttccagccaagatcagccatgttcttctgctgctgccctgggggcgagggctcagggctgcagtgggagctgctgctggcagcatggactgtgctcccctacccctgccctgcagccacagttgggagattcctcaagcaggcacagactgctgaccattccttcctgggccatgtttggagggtgcccagcagcaggagctggactgataaagaaatcctgagcttggtcgtcaacagacagaaccaggaagttgtgcagctcatagggggcctctgtgggacacacaccatctcgcccacacagcacccagccacgggttga

SEQ ID NO: 124834 - DNA, 6042 bp, Homo sapiens
atgacaggatcaaattcacacataacaatattaactttaaatataaatggactaaattctgcaattaaaagacacagactggcaagttggataaagagtcaagacccatcagtgtgctgtattcaggaaacccatctcatgtgcagagacacacataggctcaaaataaaaggatggaggaagatctaccaagcaaatggaaaacaaaaaaaggcaggggttgcaatcctagtctctgataaaacagactttaaaccaacaaagatcaaaagagacaaagaaggccattacataatggtaaagggatcaattcaacaagaggagctaactatcctaaatatttatgcacccaatacaggagcacccagattcataaagcaagtcctgagtgacctacaaagagacttagactcccacacattaataatgggagactttaacaccccactgtcaatattagacagatcaacgagacagaaagtcaacaaggatacccaggaattgaactcagctctgcaccaagcagacctaatagacatctacagaactctccaccccaaatcaacagaatatacatttttttcagcaccacaccacacctattccaaaatcgaccacatagttggaagtaaagctctcctcagcaaatgtaaaagaacagaaattataacaaactatctctcagaccacagtgcaatcaaactagaactcaggattaagaatctcactcaaagccgctcaactacatggaaactgaacaacctgctcctgaatgactactgggtacataacgaaatgaaggcagaaataaagatgttctttgaaaccaacgagaacaaagacaccacataccagaatctctgggacgcattcaaagcagtgtgtagagggaaatttatagcactaaatgcctacaagagaaagcaggaaagatccaaaattgacaccctaacatcacaattaaaagaactagaaaagcaagagcaaacacattcaaaagctagcagaaggcaagaaataactaaaatcagagcagaactgaaggaaatagagacacaaaaaacccttcaaaaaaatcaatgaatccaggagctggttttttgaaaagatcaacaaaattgatagactgctagcaagactaataaagaagaaaatagagaagaatcaaatagatgcaataaaaaatgataaagggaatatcaccaccaatcccacagaaatacaaactaccatcagagaatactataaacacctctatgcaaataaactagaacacctagaagaaatggataaattcctggacatatacaccctcccaagactaaaccaggaagaagttgaatctgtgaatagaccaataacaggttctgaaattgaggcaataattaatagtctaccaaccaaaaaaagtccaggaccagacagattcacagctgaactctaccagaggtacaaagaggagctggtaccattccttctgaaactattccaatcaatagaaaaagagggaatcctccctaattcattttatgaggccagcatcatcctgatatcaaagcctggcagagacacaacaaaaaaagagaattttagaccaatatccctgatgaacatcgatgcaaaaatcctcaataaaatactggcaaaccaaatccagcagcacatcaaaaagcttatccaccaccatcaagttggcttcatccctgggatgcaaggctggttcaacatactcaaatcaataaacgtaatccatcatataaacagaaccaaagacaaaaaccacatgattatctcaatagaagcagaaaaggcctttgacaaaattcaacagccctttatgctaaaaactctcaataaactaggtattgatgggacatatctgacatatctcaaaataataagagctatttatgacaaacccacagccaatatcatactgaatgggcaaaaactggaagcattcccttttaagactggcacaagacagggatgtcctctctcaccactcctattcaacatagtgttggaagctctggccagggcaatcaggcaagagaaagaaataaagggtattcaattaggaaaagaggatgtcaaattgtccctgtttgcagatgacatgattgtatatttagaaaaccccatcgtctcagcccaaaatctccttaagctgataagcaacttcagcgaagtctcaggatacaaaatcaatgtgcaaaaatcacaagcattcctatacaccaataacagacagacagagagccaaatcatgagtgaactcccattcacaattgcttcaaagagaataaaatacctaggaatacaacttacaagggatgtgaaggacctcttcaaggagaactacaaaccactgctcaatgaaataaaagaggacacaaacaaatggaagaacattccatgctcatgggtaggaggaagaatcaatctcgtgaaaatggccatactgcccaaggtaatttacagattcaatgccatccccatcaagctaccaatgactttcttcacagaattggaaaaaactactttaaagttcatatggaaccaaaagagagccctcattgccaagtcatccctaagccaaaagaacaaaactggaggcatcacgctacctgacttcaaactatactacaaggctacagtaaccaaaacatcatggtactggtaccaaaacagagatatagatcaatggaacagaacagagccctcagaaataatgccacatatctacaactatctgatctttgacaaacctgacaaaaacaagcaatggggaaaggattccctatttaataaatggtgctgggaaaactggctagccatatgtagaaagctgaaactggatcccttccttacaccttatacaaaaatcaattcaagatggattaaagatttaaacgttagacctaaaaccataaaaaccctagaagaaaacctaggcattaccattcaggacataggcatgggcaaggacttcatgtccaaaacaccaaaagcaatggcaacaaaagccaaaattgacaaatgggatctaattaaactaaagagcttctgcacagcaaaagaaactaccatcagagtgaacaggcaacctacaacatgggagaaaattttcgcaacctactcatctgacaaagggctaatatccagaatctacaatgaactcaaacaaatttacaagaaaaaaatcaaacaaccccatcaaaaattgggcaaaggatatgaacagacacttctcaaaagaagacatttatgcagccaaaaaaacacatgaaaaaatgctcaccatcaatggccatcagagaaatgcaaatcaaaaccacaatgagttatcatctcacaccagttagaatggcaatcattaaaaagtcaggaaacaacaggagctggtattttgaaaagatcaacaaaattgatagactgctagcaagactaataaagaaaaaaagagagaagaatcaaatagacgcaataaaaaatgataaaggggatatcaccactgatcccacagaaatacaaactaccaccagagaatactataaacacctctatgcaaataaactagaaaatctagaagaaatggataaattcctcgacacatacaacctcccaagactaaagcaggaagaagttgaatctctgaatagaccaataagaggctctgaaattgtggcaataatcaatagcttaccaaccaaaaaaagtccaggaccagatggattcacagccgaattctaccacaggtacaaagaggagctggtaccattgcttctgaaactattccaatcaatagaaaaagaggtaatcctccctaactcattttatgaggccagcatcatcctgataccaaagcctgacagagacacagcaaaaaaagagaattttagaccaatatccttgatgaacatcgatgcaaaaatcctcaataaaatactggcaaaccgaatccagcagcacatcaaaaagcttatccaccatgatcaagtgggcttcatccctgggatgcaaggctggttcaacatacgcaaatcagtaaatgtaatccagcatataaacagaaccaaagacaaaaaccacatgatcatctcaatagatgcagaaaagtcctttgataaaattcaacaacacttcatgctaaaaactctcaataaattaggtattgatgggtcatatctcaaaataataagagctacctatgacaaacccacagccaatatcatactgaatgggcaaaaactggaagcattccctttgaaaactggcacaagacacggatgccccctctcaccactcctattcaacatagtgttggaagttctggccagagcaatcaggcaggagaaggaaataaagggtattcaattaggaaaagaggaagtcaaattgtccctgttcatagatgacatgattgtatatctagaaaaccccatcatctcagcccaaaatctccttaagctgataagcaacttcagcaaagtctcaggatacaaaatcaatgtacaaaaatcacaagcattcttatacaccaacaacagacaaacagagagccaaatcatgagtgaactcccattcacacttgcttcaaagagaataaaatacctaggaatccaacttacaagggatgtgaaggacctcttcaaggagaactacaaaccactgctcaacgaaataaaagaggatacaaacaaatggaagaacattccatgctcatgggtaggaagaatcaatatcgtgaaaatggccatactgcccaaggtaatttacagattgaatgccatccccatcaagctaccaatgcctttcttcacagaattggaaaaaactactttaaagttcatatggaaccaaaaaagagcccgcgttgccaagtcaatcctaagccaaaagaacaaagctggaggcatcacactacctgacttcaaactatactacaaggctatagtaaccaaaacagcatggtactggtaccaaaacagagatatagatcaatggaacagaacagagccctcagaaataacgccgcatatcaacaactatctgatctttgacaaacctgacaaaaacaagcaatggggaaaggattctctatttaataaatggtgctgggaaaacgggctagccatatgtagaaagctgaaactggatcccttccttacaccttatacaaaaattaattcaagatggattaaagacttaaacgttagacctaaaaccagaaaaaccctagaagaaaacctaggcattaccattcaggacataggcatgggcaaggacttcatgtctaaaacaccaaaagcaatggcaacaaaagacaaaatagacaaatgggatctaattaaactaaagagcttctgcacagcaaaagaaactaccatcagagtgaacaggcaacctacaaaatgggagaaaattttcgcaacctactcatctgacaaagggctaatatccagaatctacaatgaactcaaacagatttacaagaaaaaaacaaacaaccccatcaaaaagtgggcgaaggacatgaacagacacttctcaaaagaagacatttatgcagccaaaaaacacatgaaaaaatgctcatcatcactggccatcagagaaatgcaaatcaaaaccacaatgagataccatctcacaccagttagaatggcaatcattaaaaagtcaggaaacaacagcactattcacagtagcaaagacatggattcaacccaaatgtgcatcaatgatacactgtatgaagaaagtgtagaacatatacaccatgaaatacaatccagccataaaaaaggagttcacatcctttgcagcaatatggatggagctgaaagccactttcctaagcaaactaatgcaagaacagaaagccaaatactgcatgttctcacttggctttcttttaacccaccagttacaattactaaagttcatgaaaatgtctaccagccaagtaccactcgtaacactgaaacaacgcagggagtcccaagaaccagggaagaccaagaagcatatttataa

SEQ ID NO: 124835 - DNA, 585 bp, Homo sapiens
ttaagggacccagccaaggacacgggaaacggggtacaaccaccatgtccaaaaaacccctggtgaaaattcctgtgtcgccccccgattattcggcccccgaaaactttcaatacgctcatagtgctggcgcgtcggtgcatacagtgctttcgctttttcgatatcgcctgctttaatcgcgtcggtaaaggctttggtgtcggtcaccagctgcgtggtttccgccatgacatacgtggattcgcccaatggacccatttgcctgacggctgcgcttttcgcgatcgttgctatgcggcaggtgcacagtgtgaaaacgtcccggcgctgacagcgtgtggtgacaacaaccaacgctggggcctgttggtatccgcagcaggaggttataagtgtctgacacgttattaacgttacgcgacgtccatatcaatttcccggcccgtaaaaactgggttgggaaaactacggaacatggtcatgcctttaaggggatggatttacagaaccctttaaagtcgacctgaagggctgccagcttgggcactgggcctcggttaaaaacgtctggaatgggaaaaa

SEQ ID NO: 124836 - DNA, 918 bp, Homo sapiens
atgcgcatagttaccgctgccgtcatggcctcaacgctggcagtcagttcattaagccacgctgctgaagtcggttcaggcgataactggcatccgggtgaagaacttacgcagcgcagtacgcagagccatatgttcgacggcataagtttaaccgaacatcagcgtcagcagatgcgagatcttatgcaacaggcccggcacgaacagcctcctgttaatttggatgtggcccatgggaagcacggaagaacaggaatgtgggaaagagtgagcccaggggttcccgccccgtacttgggcaatgcggcgaacgaagaaattatgcaactggcgcatctggaatgtgcaaaatggctgatcctgacgattcccaacggttatgaagcgggtgagattgtggcatctgcccgcgcgaaaaatccggatattgagattattgcccgcgcccattatgacgatgaagtggcgtatatcaccgaacgtggtgcgaatcaggtagtgatgggcgagcgtgaaatcgcccgtaccatgctggaactgctggataagccaccggcggagggtgacctgcaggcatgtaagattcgcgccagggttcaatcttgcgaaggcagtgcaggcgcagcactggtgattaccgggaagggccgcatcgactcgcaaacggcaggcggtaaagcgccgctgggtgtggcgtcggtggcgaaccagtttaatgtaccggtgattgggattgctggcgtattgggtgatggcgtggaagtggtgccccagtacggcattgacgcggtattcagcattttgcctcgtctggcacctttagccgaagtgctcgccagcggtgaaaccaatctcttcaacagcgcgcgaaatattgcctgcgccattaaaataggtcagggaattaaaaactaa

SEQ ID NO: 124837 - DNA, 909 bp, Homo sapiens
atgtcaaacacgccaatcgagcttaaaggcagtagcttcactttatctgtggttcatctgcatgaggcagaacctaaggttatccatcaggcgctggaagacaaaatcgctcaggcccccgcatttttaaaacatgcccccgttgtactcaacgtcagtgcactggaagacccggtaaactggtcagcgatgcataaggcggtttcggcaaccggtttgcgggttattggctcgtgcacgtccatcgactcgcaaacggcaggcggtaaagcgccgctgggtgtggcgtcggtggcgaagcagtttaatgtaccggtgattgggattgctggcgtattgggtgatggcgtggaagtggtgcaccagtacggcattgacgcggtattcagcattttgcctcgtctggcacctttagccgaagtgctcgccagcggtgaaaccaatctcttcaacagcgcgcgaaatattgcctgcgccattaaaatagcctatatcatctcgcagagttacgtaaatattattaataacagccagacaccgcttggcgagattttcactgaaaaaggcatcaagccgacattaattatcgatgcggcttgtcatccttctatcctgaaagaggccgtaacgctggcttctccagcggcacgtattgtattgatggggttctccagtgaaccgtctgaagtgattcagcaaggaattaccggaaaagaactctctattttctcttcacgcttaaatgcaaataaattcccgatcgttatcgactggttaagtaaagggttaattaaaccagaaaaattaattacccatacgtttgatttccagcatgttgctgatgccattagtttatttgaacaggatcaaaaacattgctgcaaagtcttactcactttttctgaataa

SEQ ID NO: 124838 - DNA, 713 bp, Homo sapiens
gtccatattgaaagtagcatgtgacgttgataacccgctggtaggggcacgcggcgcggcggcggtgtttggcccgcaaaaaggggcaacgccggagatggtcgaagaacttgaacaggggctgcaaaattacgcccgtgttttacaccagcaacctgaaattaatgtctgccagatggcggggcgcgggcgctgcgggcggtatgggtattgcggcgccgggtatttttcaatggggatattaaaccgggcattgaaattgtgttgaatgcggtcaatcttgcgcaggcagtgcagggcgcagcactggtgattaccggggaagggcgcatcgactcgcaaacggcaggcggtaaagcgccgctgggtgtggcgtcggtggcgaagcagtttaatgtaccgtgtgatctgggattgctggcgtatgtgggtgatggcgtggaagtggtgcaccagtacgggattgacgcgggattcaacattttgccttgttttggcacctttagccgaagtgctcgccagcggtgaaaccaatctcttcaacagcgcgcgaaatattgcctgcgccattaaaataggtcagggaattaaaaactaacccttacctttaaagcggatgcgatttatatcgcataagagtgcagtactcatcccccatgcggcatgagtaccatatccttcctgaaaatcgcgcaaattctatatattgcaga

SEQ ID NO: 124839 - DNA, 1143 bp, Homo sapiens
atgagcacaggacggagcccatcgccgactcgccgcagcaatattatcggcatcaaagacaccatcgactccgtcgcccacgtgcgcagcatgatccataccgtcaaaggtgcccatccgcacttcaccgtgctctgcggctacgacgatcatctgttcaatacctggctgctcggcggcgacggggcgatatcggcgagcggcaactttgccccgcaggtgtcggtgaatcttctgaaagcctggcgcgacggggacgtggcgaaagcggccgggtatcatcagaccttgctgcaaattccgcagatgtatcagctggatacgccgtttgtgaacgtgattaaagaggcgatcgtgctctgcggtcgtcctgtctccacgcacgacgacgcgttttatgcggtgatcacccacgcggcggggccgcagggcgctctgccgctgaccccgcagatgctgatggaatctcccagcggcaacctgttcggcatgacgcagaacgccgggatgggctggcacgccaacaagctcaccggcaaagaggtgctccagtggcttctgtttctatcagctgtccctcctgttcagctactgacggggtggtgcgtaacggcaaaagcactgccggacatcagcgctatctctgctctcactgccgtaaaacatggcaactgcagttcacttacaccgcttctcaacccgccgggcagtgacgtcatcgtctgcgcggaaatggacgaacagtggggatacgtcggggctaaatcgcgccagcgctggctgttttacgcgtatgacaggctccggaagacggttgttgcgcacgtattcggtgaacgcactatggcgacgctggggcgtcttatgagcctgctgtcaccctttgacgtggtgatatggatgacggatggctggccgctgtatgaatcccgcctgaagggaaagctgcacgtaatcagcaagcgatatacgcagcgaattgagcggcataacctgaatctgaggcagcacctggcacggctgggacggaagtcgctgtcgttctcaaaatcggtggagcagcatgacaaagtcatcgggcattatctctttagagcacagggcgagaatcactacaccttagaatatcaggaactcacttag

SEQ ID NO: 124840 - DNA, 912 bp, Homo sapiens
tgatgctgctgactactaataccagctcggcccccggggatcaacccctactactggaaagtgtcggaagctaacctgatccgctatttccagcaggtgggggacagcgtcacgctgccggtgatgctctataacttcccggcgctgaccgggcaggatctgactccggcgctggtgaaaaccctcgccgactcgcgcagcaatattatcggcatcaaagacaccatcgactccgtcgcccacctgcgcagcatgatccataccgtcaaaggtgcccatccgcacttcaccgtgctctgcggctaccacgatcatctgttcaataccctgctgctcggcggcgacggggcgatatcggcgagcggcaactttgccccgcaggtgtcggtgaatcttctgaaagcctggcgcgacggggacgtggcgaaagcggccgggtatcatcagaccttgctgcaaattccgcagatgtatcagctggatacgcccgtttgtgaacgtgattaaagaggcgatcgtgctctgcggtcgtcctgtctccacgcacgtgctgccgcccgcctcgcccctggacgagccgcgcaaggcgcagctgaaaaccctgctgcaacagctcaagctttggtgagccggaccaatacgatgacctttgggaaaatttttacccccgcaggaacgacgcggtttaatgcgggggacaacccacgcggcggggccgccagggcgcttctgccgcttacccccgcagaagctgatggaaatttcccacgggcaaccctggtcgcgcatgaccccaaaacgcccgggatggggctgggaaccgccaccaagcttccccgggaaaaaaggggctggaataatcggccttcagggggggatcccgggccgggagcacggacgccccattcgccg

SEQ ID NO: 124841 - DNA, 1188 bp, Homo sapiens; identical to SEQ ID NO: 123394

SEQ ID NO: 124842 - DNA, 541 bp, Homo sapiens
aagctgaaaattgaaacactgaacaacgatagttgttcgtgagtctctcaaattttcgcaacacgatgatgaatcgaaagaaacatcttcgggttgtgaggttaagcgactaaccgtacaacggtggatgccctggcagtcaaaggcgatgaaggacgtgctaatctgcgataagcgtcggtaaggtgatatgaaccgttattaccggcgatttccgaatggggtaacccagtgtgtttcgacacactatcattaactgaattcataggttaatgaggcgaaccggtggaactgaaacatctaagtaccccgaggaaaagaaatcaaccgagattcccccagtagcggcgagcgaacggggagcagcccagagcctgaatcagtgtgtgtgttagtggaagcgtctggaaaggcgcgcgatacagggtgacagccccgtacacaaaaatgcccgtgctggggagctcgatgagtaagccgctacacgtgcaatccctggctgaaatatgaggggaccatcctccaaggctaaatactcctg

SEQ ID NO: 124843 - DNA, 613 bp, Homo sapiens
cctccatcccgcgggttctttaagagatattgccggtcccaggcccggtagtcatcgcatggggatttttcgtcgcattgccggagaaagctggtcagcgattgttatttccggcctttcaattgcgcgacatgcacagcaaaaacgcatcattacgttcaccgcctcactggcggcgcggctggagattgcgctaaaaattgtgcgcaatgccgacggcacggaatccgccagcgaacagctttaccaggtcgttggcgcagggtgcaagatgccctggcagtcagaggcgatgaaggacgtgctaatctgcgataagcgtcggttaatgaggcgaaccgggggaactgaaacatctaagtaccccgaggaaaagaaatcaaccgagattcccccagtagcggcgagcgaacggggaggagcccagagcctgaatcagtgtgccaccgaagccgtggtcctgacgcgagtcgattcccacctgaaggttggtgatagcctcagtcacacgacaagttttttaaaaaagtttgctgctaggtttggaggacagctggaaaaagcccttggacttggatccatgcaagccttctcagacatcaggggcctatga

SEQ ID NO: 124844 - DNA, 718 bp, Homo sapiens
tctgcaatatatagaatttgcgcgattttcaggaaggatatggtactcatgccgcatgggggatgagtactgcactcttatgcgatataaatcgcatccgctttaaaggtaagggttagtttttaattccctgacctattttaatggcgcaggcaatatttcgcgcgctgttgaagagattggtttcaccgctggcgagcacttcggctaaaggtgccagacgaggcaaaatgctgaataccgcgtcaatgccgtactggtgcaccacttccacgccatcacccaatacgccagcaatcccaatcaccggtacattaaactgcttcgccaccgacgccacacccagcggcgctttaccgcctgccgtttgcgagtcgatgcgcccttccccggtaatcaccagtgctgcgccctgcactgcctgcgcaagattgaccgcattcaacacaatttcaatgcccggtttaatatccccattgaaaaatacccggcgccgcaatacccataccgcccgcagcgcccgcgccccgccatctggcagacattaatttcaggttgctggtgtaaaacacgggcgtaattttgcagcccctgttcaagttcttcgaccatctccggcgttgcccctttttgcgggccaaacaccggcggcgggccgcgtgcccctaccagcggttattacggcacatgcttatttcatatggcattcgccagacgc

SEQ ID NO: 124845 - DNA, 1710 bp, Homo sapiens
atgacgcgagatgggctagccaacaaggcactggcagtggcgcgtaccctcgccgactcgccggaaatccgtcagggcttgcagaaaaaaccgcaggagagtggcatccaggccatcgcggaagccgtacgcaaacgcaacgatctgctgtttattgtcgttaccgatatgcaaagtcttcgctactcgcatcctgaagcccagcgtattggtcagccatttaaaggtgatgacatccttaaagcgctgaatggcgaagaaaatgtcgctatcaatcgcggttttctggcgcaggctttacgcgtatttacccccatctacgatgaaaatcataaacaaattggcgtgatcaatgacagtcgctggagcattatctggtcggtattatttggcatgctggtcggactgattggcacctgcattctggttaaggtactgaaaaaaatccttttcggcctggaaccctacgaaatctccacgctgtttgagcaacgccaggccatgttgcagtctatcaaagaaggcgtcgttgccgtggacgatcgcggcgaggtcacgctgatcaacgatgccgcacaagaattgctgaattaccgtaagtcgcaggacgatgagaaactgtcgacgctaagccactcatggtcacaggtggtagatgtctcggaagtgttacgcgacggtaccccgcgccgcgacgaagagattacgattaaagaccggctattactgatcaacaccgttccggtgcgcagtaatggcgttatcatcggtgccatttcaaccttcagggacaaaactgaagtacgtaaactgatgcagcgactcgacggtctggtcaactatgctgacgcacttcgtgaacgatcccgcttagagcacattctccacaatcaaagagtgccatttatcatgaaattgcaccatagaatgctccggcattttatcgccgcaagtgtcattgtgctgacatcttccttccttatttttgaacttgtcgccagcgacagagcaatgagtgcctatctgcgctatatcgtgcagaaagcagactcctcctttctttatgataagtatcagaatcagagtattgccgcgcatgtgatgcgcgctctcgctgctgagcagtcggaagtgtcgccagaacagcggcgcgccatctgcgaggcttttgagtctgccaataacacccatggcttaaacctgactgcccataaatacccgggcttacgcggcacactacaaaccgcatccactgactgcgacacaattgtggaagctgcagcactattacccgcttttgatcaggcagtggaaggcaaccgccaccaggatgattacggttcaggtcttgggatggccgaagagaaatttcactattatctcgatctctttagagcagtaggagacggccacaactctaaggaagatgccacttttggcctcggctggcgcgtgaatggtaatgccaccatgacgccaacgtttggcacgctggcaagcccgcaaacctacggtcacactggctggaccggaacggtgaccgttatcgatccggtgaatcatatgacgattgtgatgttaagcaacaagccacattcgccggttgccgatccgcaaaagaatcccaatatgttcgaaagcggtcagttgccgattgcaacttatggttgggtagttgatcaggtgtatgcggcgttaaagcagaagtaa

SEQ ID NO: 124846 - DNA, 551 bp, Homo sapiens
tcaatgcggaaacgtgaagatgttcaccaccagctctaaggaagatgccacttttggcctcgctggcgcgtgaatggtaatgccaccatgacgccgacgtttggcacgctgcaagcccgcaaacctacggtcacactggctcgcctccccttcccccaatttgtcctgtgcggccccctggttatctccgccgtctttccccgcgttttccccgattatttggtatctcattgccgcagcggccccctggtatcctggagcgctcactccaacgccgccgtaacccctctggttggcgtcgtcgcaaccagtaatgaccgtgatgggatgctgccttatgggtgatggcgtgaaatgcctacctttaaagcggatgcgatttatatcgcataagagtgcagtactcatgcggatgcggcatgagtaccatatccttcctgaaaatcgcgcaaattctaatattgcagagatcatgtaggcctgataagcgaagcgcatcaggcaatgtacaaaaaaagccacggtataaaccgtggcaaaatccaacatag

SEQ ID NO: 124847 - DNA, 1992 bp, Homo sapiens
  misc_feature (1)...(1992): n = a,t,c or g
atggacgtacaaagtgcagctgatgacaccggtttaccaatgctggtcgtacgcgggccgttcaatgtggtttggcaacgtctgccagcggcgctggaaaaagtgggcatgaaagtgaccgacagcacccgttcgcagggcaacatggccgtaacttataagccgctgtctgacagcgactggcaggaactgggcgcgagcgatccaggcctggcatccggtgactataaactgcaggttggcgatttagataaccgcagcagcctacagttcatcgatccgaaaggtcatactctgactcagagtcagaacgacgcgctggaaaacgcgattttagcggtaattcgccacgaaatttgtttgtcggacgtagttcggataagggcgtcacgccgattcgacaaaacatccggcacaccagacaggcaaaagattttaaaactcggttatctgctgcctgctggctggcttgctgatgtggatccccgactggttggcgtgatgaatgtctggacgctgctcgttcccgccgcgctgttctttttcggtgccgggatgctgtttccgctggcgaccagcggcgcgatggagccgttccccttcctggcgggcacggctggcgcgctggtcggcggtctgcaaaacattggttccggcgtgctggcgtcgctctctgcgatgttgccgcaaaccgggcagcctggggttgttgatgaccttaatgggattgttgatcgtgctgtgctggctgccgctggcgacgcggatgtcgcatcaggggcagcccgtttaagcgcacgtcaccgcagcatcgtcatcagctccatgggagaacgatgctgctttatcagatcacgcatcacccgcatatgcggatttctggcggcgggggttgggcttgatcaacttgcgccagatttcgccacgcccgtcattcgcgaactgctggcgttgttgttgtgtctgttttccggcgggttagcgatgtatggctacttgcgctggttacgcaatgaaaaagcgatgcgtctgaaagaggacctgccctacaccaacagcttattaatcattagcttaatattgatggtcgtggcggtgatcgttatgggactgtggatccccccaacttgcatcgttgacgatcggatggcgaaatatattccggggttggccgatagtccaaatgacaccattaaaggcaaaaacaccctgcggatttctgacctgctgcatcacagcggcggtttcccggcagatccgcaatacccgaataaagcggtcgcgggcgcgttatattcccaggataaaggccagacgctggagatgatcaagcgcacgccgctggaatatcagcccggcagcaaacatatctacagcgatgtcgattatatgctgctgggatttatcgtcgagtcggttaccggtcagccgcttgaccgctatgttgaagagtcgatttatcgcccgctcggcctgacacatacggtatttaacccgctgctgaaaggctttaaaccgcaacaaattgccgccacggaattgaacggcaatacccgcgatggcgtgatccatttcccgaatatccgcacctccactctctggggtcaggtgcacgatgaaaaagccttttattcgatgggcggcgtttccgggcacgcaggtttgttttccaataccggcgatattgcgctgttcaatgcggaaacggtgaagatgttcaccaccagctctaaggaagatgccacttttggcctcggctggcgcgtgaatggtaatgccaccatgacgccgacgtttggcacgctggcaagcccgcaaaccctacggtcacactggctggaccggaacggtgaccgttatcgatccggtgaatcatatgacgattgtgatgttaagcaacaagccacattcgccggttgccgatccgcaaaagaatcccantatgttcgaaagcggtcagttgccgattgcaacttatggttgggtagttga

SEQ ID NO: 124848 - DNA, 322 bp, Homo sapiens
gaactgtttgtcgccggtatccgcgaactgatggccagcgaaaactgggaggcctattttgccgagtgcgaccgtgacagcgtctacccggaacgttttgtcaaagcactggcggatatgggtatcgacagtctgctgatccctgaagagcacgtgttgccgggcgggtgcaacaccttcctgcgcgaaggcacacaagagcagatcgacaaaattatggctttccgcggcaccggtaagcagatgtggaactcagcgattaccgaaccgggcgcgggctccgacgtgggtagcctgaaaacgacttatacccgtagaaatg

SEQ ID NO: 124849 - DNA, 1374 bp, Homo sapiens
tcagcaaattgtgaacatcatcacgttcatctttccctggttgccaatggcccattttcgatacattgggatgatactggggcctgcgaacatttgcccggcaaacggtccggcgatttcgataccggagaagacaacgcgcaatccggccaacggccgaatttcggcatgggtagatgatccattatttgctcctgaaaaatttatgtagcgcatgactgccggatgcggcgtaaacgctttatccggcctacattcgtgctcccgtaggcgacccagcgtcaggatctgcatttcgtcagatcccccggagacgcggtctacacgcagatcacgccagaagcggctgatgcggtggttgcccgcaatcccgacaccgcccagcacctgcattgcgctatccacaacttcaaatgccgcattggcgcagaagtatttgcacatcgctgcatcgccagaggtgatggtgccgttgtctgctttccacgctgcttcatacagcatgtttttcatggagtttaatttgatcgccatgtgggcgaatttttcctgaatcaactggaaacgaccaatagcctcgccaaactgcacgcgctgattggcgtacgcgccgcatatcgccgtaccgtagttggtgagggctaccaggaaacgttcatggtcgaactcttctttgacgcggttaaagccgttaccttcccgaccgaacatgtctttctcgtccagttccacgtcgtcaaaggtgatttcacagcagctatccatacgcagaccgagcttttcaagtttggtcactttgatgcccggtttgctcatatcaacaaaccattcggtgtagacaggtttgtccggagaagccccgtcgcgcgccatcaccacgatgtacggggtgtaggcgctgctggtaataaaacacttactaccattaagataaatcttaccatttctacgggtataagtcgttttcaggctacccacgtcggagcccgcgcccggttcggtaatcgctgagttccacatctgcttaccggtgccgcggaaagccataattttgtcgatctgctcttgtgtgccttcgcgcaggaaggtgttgaacccgcccggcaactggtacagcacataggttggtgcccccagacgtcccagctccatccacacggcggcgagagtaacaaaccccgcgtccagaccaccgtgctcttcagggatcagcagactgtcgatacccatatccgccagtgctttgacaaaacgttccgggtagacgctgtcacggtcgcactcggcaaaataggcctcccagttttcgctggccatcagttcgcggataccggcgacaaacagttcctgctcatcatttaaattaaaatccat

SEQ ID NO: 124850 - DNA, 3141 bp, Homo sapiens; identical to SEQ ID NO: 123356

SEQ ID NO: 124851 - DNA, 1083 bp, Homo sapiens
atggattttaatttaaatgatgagcaggaactgtttgtcgccggtatccgcgaactgatggccagcgaaaactgggaggcctattttgccgagtgcgaccgtgacagcgtctacccggaacgttttgtcaaagcactggcggatatgggtatcgacagtctgctgatccctgaagagcacggtggtctggacgcggggtttgttactctcgccgccgtgtggatggagctgggacgtctgggggcaccaacctatgtgctgtaccagttgccgggcgggttcaacaccttcctgcgcgaaggcacacaagagcagatcgacaaaattatggctttccgcggcaccggtaagcagatgtggaactcagcgattaccgaaccgggcgcgggctccgacgtgggtagcctgaaaacgacttatacccgtagaaatgccgacgataatactccagacgttgtagatataacggcacgctttcatcgggtattccggacggaatcgcgttacggaggaagttttttcagatactcccggaacgcctggcttgatgccatgaaatctacggctttatcgataagaagcggaactgcatggaaataccgctttttctgtccggtaatatttgcggcaataataacgcattcccccaccgccggcctttatacccgtggaccgggccttcgccgtaacccacgaacatctggtggtacccattttgcaggtcccgcacggatggaagccggtttcggcgtggttacgcccgaactcatcaagctgttcatccgtctggcattcgacaccggggctgatttcgcggccacgatactgatccagcgcgggttaatgcatgatctcgcgggtgatgcgaattgcgtcgcggaactcctgccagtcctgctcgtgcgacatgtagttaaacagaatcgccggatgctggaaatggtactgaatattcggccacgcaaattcctcacggctgcgaataaatccacctgcttcaaagtggttgctggcaccaacgccagtgccgccaaacagccactccgcaccgattttcggctggttccaccactgcagggcagg

SEQ ID NO: 124852 - DNA, 1648 bp, Homo sapiens
atgtggcgctggttatacgctggtgcgcggatgacggtacgtgataaacagccattggagcaaatgctggcaggctgtactcacgcttcactggtgccaacacaactctggcgtttgctggttaaccgtagttccgtttccctgaaagcggtgttacttggcggcgcggctatcccggtcgagttgacggaacaggcgcgcgacatggggattcgttgcttttgcggctatggtctgaccgagtttgcctccacggtgtgtgcgaaagaagccgacggcctggcagacgttggttcgccgctgccgggtcgggaagtgaaaatcgttaataatgaagtgtggctgcgggctgccagtatggcagaaggttactggcgtaacgggcaactggtttcactggttaatgacgaaggctggtacgctacgcgcgatcgccgtgagatgcataatggcaagctgaccattgtcggacgtttagacaatctattcttcagtggcggagagggtattcagccggaagaagtcgagcgcgtaattgctgcacatcctgcggttttgcaggtgtttatcgtccccgttgccgacaaggagttttgtcatcgaccggtggcggtgatggagtatgaccacgagagcgttgatcttagtgaatgggtgaaagataagctggcccgttttcaacacctggtgcgctggctaactctgcccgcggagcctaaaaacggcggtattaaatttcacgtcagcgctaaaagagtgggtgcactaaccacgcggatggaagccgcacagcaacatgctgacgataaaattcgccagatgattaacagcgagcagcgcctcagtgagcagtttgaaaacctcgccaaccgtatttttgagcacagcaatcgccgggttgatgagcaaaaccgtcagagtctgaacagcctgttgtcgccgctacgtgaacaactggacggtttccgccgtcagttcaggacagcttcgttaatgaaagtagccggatgggattacctgatgaattcactctacaacgcgaattcgagcgcgctcgtcaacagggtgcgctagcacaatggttgcggcttttgaaggtggtttcactggtatcgtcgccaccctggataccggtcgccccggtccggtgatggctttccgtgtcgatatggacgcgctggatctcagtgaagagcaggatgtcagccatcgcccctaccgcgacggttttgcgtcatgtaacgccggaatgatgcatgcctgtggtcatgatggacataccgccattgggcttgggctggcgcatacccttaaacagttcgagtccggactacatggcgtcatcaaactgatttttcagcctgcagaggaaggtacgcgtggcgcgcgggcgatggtcgatgcaggtgtcgtagatgatgttgattattttactgccgtgcacattggcactggcgtacctgcgggcactgttgtgtgcggcagtgataattttatggcaaccaccaaatttgacgcgcacttcaccggtaccgccgctcacgcaggcgcaaaaccagaagacggtcacaatgccttgttggcggcacacaagccactcttgcactgcatgcaatcgccccgcacagcgaaggagcttccagagtaa

SEQ ID NO: 124853 - DNA, 3132 bp, Homo sapiens
tcacactgtttctgccttaggaactgcctccaccagcgcagagagacagacctgttctgtctccccccggttgtccccttttctgtgttccccgcacgtgtgataccccgtgggcgtccacggcccacgccctcggaggtgtgcccggctgtggtcctgcgacggggtgcctacggggtgccgcctggtcatgaccgttccgcgggtcggcccgtgggtgtgcttggccggcgttgcttcacgcgttttcaccactgcgccgctaaattgttctttgccactttcatctttaaagcggtaaagcaccgccagataatggtcgaacaagttatgtttccattccggttgggaataggtgtcatattccagattgccattgtcctggcagtcaacgtcgtataacggcaggaaatctaacagtgaggtaatacgtaatgccagttcacgcatttccgcattattaattgcatgaatgattgctcgcgccagcatttcaatctgcaactcattgacgactaactcacatttgctaccgtcatgtagcgttaatacgaaggtaagattttcgccttgattatcggtaagttccagcgtgttaacccgacgattaatatcggcatttttaagctcatcaaccagaatttctgggatgttttctgccattttcttaatgactttatcgcgagcttgctcatactgaaggtgtgcagcagcatccagtttatgcttttgatgcagacgactttccagcgcaatcagcaggtcgcgcagttccagacagatatcacagttgtatctgttgttatttagaaaaacaactttcccgaacggtaccagattagtttgatacagcaggatgtccgctgccatcagcaccggatagtcaaacagaccagcgttgatgttctcggcataacgcgcagatttatctttaaactgcgtcatgcagaccagttcgccatatttacgcagattctctggttcacctgtcaggccaattacgccgacaatttcaccttccagccgtaacggtagattaatcccctgccgcacaccgtgcagatgacgtgctaccgcgtcatcgatatcgacgactcgcgcgataccggataccgcgacgaataggactttttttatttcgtcgatcgccgctgcaatatgattaaacgtggcggcgagaatgtctcctgcgtggagctggaaaatattatcgccgcgcacccgaaaattcaggacatcgtggttgtgggtattaaagattcgattcgcgatgaagccatcaaagcatttgtggtgctgaatgaaggtgaaacattgagcgaagaggaatttttccgcttctgcgaacaaaatatggcgaaatttaaagtgccctcttatttcaaatgccgcattggcgcagaagtatttgcacatcgctgcatcgccagaggtgatggtgccgttgtctgctttccacgctgcttcatacagcatgtttttcatggagtttaatttgatcgccatgtgggcgaatttttcctgaatcaactggaaacgaccaatagcctcgccaaactgcacgcgctgattggcgtagcgcgccgcatcttcaaaggcgcacatcgccgtaccgtagttggtgagggctaccaggaaacgttcatggtcgaactcttctttgacgcggttaaagccgttaccttcccgaccgaacatgtctttctcgtccagttccacgtcgtcaaaggtgatttcacagcagctatccatacgcagaccgagcttttcaagtttggtcactttgatgcccggtttgctcatatcaacaaaccattcggtgtagacaggtttgtccggagaagccccgtcgcgcgccatcaccacgatgtacggggtgtaggcgctgctggtaataaaacacttactaccattaagataaatcttaccatttctacgggtataagtcgttttcaggctacccacgtcggagcccgcgcccggttcggtgatcgctgagtacgaaccgacagcaccactaccgttggtcaccgggattgcataatcaccggaggtcaccggcaaaatcattccagccggggcatgaagctccgcaagcggtgccgcttccaggtaggtttcatcaccactgaccgtctcacgaccactgtcggtgattggtgtcattggcaggcgcagcgtatcggtcgccacaagacccagttccttacatgcccatttcaccgggattggattgggttcgacaaatagtttgttgtgtaatggcatcagacgctgattaataacgcgtgcctcggcaaaatgcccttctgctgccagtttgcacatctgggccatatcacgcgctggcgactggctgtggatttcgccgcggccagatgctgaaaaccactgttctccctcggcactacaaactttacttgggcgcgagttccggcatgcggtattcgacgcccgccacggctttgatgccgctgcctttgccgcacttagcggaacgttgaaagcgggaagctggctggttttgttactccggcggataacgaggctatcctctggcggcaaaaccagccattctcgttggcgcattttactccgggtcaccccagagatggaaggcggtgaaggtgtgctgatgacttccgctttactctgggcttctgctaccagcggtgttaatggctgagctggtgtgccgggggcgtcatcaggctgtgctgttgtgagttgctcagaagtcagttttgtgaagagcgttggtttctctgtcggtaacacggttgacggcgcatcagtcactttgggcgtattgtcaaaacccggcaacatcgcaaaaagggcgctcaggcttgcggtgacgtcttcattcagatcatccgctttttcgtcttttgtcgtatttttgtcagccaccgcagccaacgccatcgtctgagcggtggttaacggtgttgatgtggattgttcgtcgttgatgacaggcggtgtttcatccacagggatcagtaaattagcttgttgcgcgtcggaaacaatatcgctgatcagcggctcgccttttgtcgtgggcttatcagcaactggggggccgctttgtcggtagttgtctcgcctgcggggatgctctatcat

SEQ ID NO: 124854 - DNA, 3618 bp, Homo sapiens
atggttgacctgcacgaaaaaggtctgatccgcaaactgctggatgtgcagagctttgacagccatgctgcgcaatcgctggcccgtaaccccaatcacatcgaaatcagcgccaaccagtacgctaactggggttcgaaaggcgcatcggttgatcgtctcgacgtggtggtactgagcgcgctggaaattgacacccagttcaacgttaacgtgctgaccggctctgacggcgtactgcgtggtgcttccggtggtcactgcgataccgcgattgcctctgcgctttccatcatcgtcgcgccgctggtacgcggtcgtattccgactctggtggataacgtactgacctgcatcaccccaggctccagtgtcgatattctggtcacagaccacggtatcgcagttaacccggcacgtccggaactggcagaacgtctgcaggaagcgggcattaaagtggtttccattgagtggctgcgcgaacgtgcgcgtctgctgaccggtgaaccacagccgattgaattcacagaccgcgtcgttgccgttgtgcgttaccgcgatggctcggtgatcgatgttgtgcatcaggctattatggtagcggcattcgctggcttcatcggttatgcggtaatgaacctcgcggtaaacttctggttgaccaataaaggcattctgccaaccacggatgccgcggttctgaaagccaataacatccagagcattcttgggatccagtcgatcgataccgggatcctcggtgcggtgatcgccggtattatcgtctggatgctgcatgagcgtttccataatatccgcctgccggatgcgctggcattcttcggcggtacgcgcttcgtaccaattatctcctcgctggtgatgggccttgtcggcctggtgattccattagtctggccgattttcgccatgggtattagcggcttgggccatatgataaacagcgcgggtgatttcggaccgatgctgtttggtaccggtgaacgtctgctgttgccgtttggtctgcatcacattctggtggcattaattcgctttaccgacgcaggcggcacgcaggaagtctgcggtcaaaccgtcagcggcgcactgaccatcttccaggcgcaattgagttgcccgaccactcacggtttttctgaaagcgccacgcgtttcctttcgcaagcaccgccaccatgtgggcttcttcatctctgctttattgccaccgttacgctggttaacgcctgctcttataccctggcgatgtccacttgccgcgaagtacgcgatggtgaagaaccacctctgctggtgcgtatcggttggtcaattctggttggcattatcggtattgttctgctggcgctcggcggcctgaaaccgattcaaaccgccattatcgccggaggatgcccgctgttcttcgtcaacattatggaactgtttgtcgccggtatccgcgaactgatggccagcgaaaactgggaggcctattttgccgagtgcgaccgtgacagcgtctacccggaacgttttgtcaaagcactggcggatatgggtatcgacagtctgctgatccctgaagagcacggtggtctggacgcggggtttgttactctcgccgccgtgtggatggagctgggacgtctgggggcaccaacctatgtgctgtaccagttgccgggcgggttcaacaccttcctgcgcgaaggcacacaagagcagatcgacaaaattatggctttccgcggcaccggtaagcagatgtggaactcagcgattaccgaaccgggcgcgggctccgacgtgggtagcctgaaaacgacttatacccgtagaaatggtaagatttatcttaatggtagtaagtgttttattaccagcagcgcctacaccccgtacatcgtggtgatggcgcgcgacggggcttctccggacaaacctgtctacaccgaatggtttgttgatatgagcaaaccgggcatcaaagtgaccaaacttgaaaagctcggtctgcgtatggatagctgctgtgaaatcacctttgacgacgtggaactggacgagaaagacatgttcggtcgggaaggtaacggctttaaccgcgtcaaagaagagttcgaccatgaacgtttcctggtagccctcaccaactacggtacggcgatgtgcgcctttgaagatgcggcgcggctacgccaatcagcgcaggaaagcacaatggaagcattaggaatgatcgaaacccggggcctggttgcactgattgaggcttctgacgcgatggtgaaagctgcgcgcgtcaagctggttggtgttaagcagattggcggcggcctgtgtactgccatggttcgtggtgatgttgcagcctgtaaagccgcgaccgatgcaggtgccgcagcggcacagcgtatcggcgagctggtatctgtacacgttatcccgcgtccgcacggcgacctggaagaagtcttcccgatcggcctgaaaggcgatagcagcaacctggggagcttttacctgaaatacgccacggaggcgggtatgaaactggcagtcgtcactggacaaattgtttgtaccgtacgccatcacggactggcgcatgacaaattgctgatggtggaaatgattgatccacaaggtaatcctgacgggcaatgcgccgtcgccatcgacaatattggcgcgggaaccggggagtgggtgttactggtgagtggcagttccgcccgccaggcgcataaaagcgaaacgtcaccggtcgatctgtgcgtgattggcattgtcgatgaggtggtgtctggcggtcagcgatatagcgcagttgatgcaaaacacagcgatgtgaccgtgcaggaggctgccgccatcgcatggcatatgccgtttgatgacgatcaatatcaccgtttactctccgctgccgggttatcgaaaagctggacgcggacgatgcaaaagcgccgactgagcggcaagatcgaagatttttcccgccggttcggcaaccaaatcaccagccgtaaaggcccacaacccgcaaatttgtgggccaaaccggagcttctgcccggaatgcaaacaacgcgcgacctgatcatcgacgatacagatgtactgctggtgtattcgacgcagaacgttttggcattaaggttgtttcatcacccgcgtcacgccgatattttgttatttactggcgcagtcacccgggcgatgcgtatgcctgcacttcgggcgtatgagtctgcccccgatcataaaatttgtgtttcctacggcgcgtgcggtgtcggcggcggtattttccacgatctctacagcgtctggggcggtagcgacaccattgtccccattgatgtttggatccccggctgcccgccaacaccggccgccaccattcacggtttcgccgtggcgctcggtttgctgcaacagaagattcacgctgtggattatcgcgatcccaccggggtgactatgcaaccgttgtggccgcagatcccgccatcacagcgtatcgccattgagcgagaagcgcggaggctggcgggctatcgtcaggggcgagcaatttgccgatcaggctcctgcgccctttaa

SEQ ID NO: 124855 - DNA, 1209 bp, Homo sapiens
tcactggtatcgtcgccaccctggataccgtcgccccggtccggtgatggctttccgtgtcgatatggacgcgctggattcagtgaagagcaggatgtcagccatcgcccctaccgcgacggttttgctcatgtaacgccggaatgatgcatgcctgtggtcatgatggacataccgcattgggcttgggctggcgcatacccttaaacagttcgagtccggactaatggcgtcatcaaactgatttttcagcttcaccggtacgccgctcacgcaggcgcaaaaccagaagacggtcacaatgccttgttggggcagcacaagccactcttgcactgcatgcaatcgccccgcacagcgaagagcttccagagtaaacgtgggcgttatgcaggcaggaagcggtcgtaagttgttcctgcctcggcgttgcttacgccagcctactcgtagtgcactcaacactacacaacagcttaacgctcgttgaataccaacagtcccatagacgacatacaaggtgtacagcttataatagtcgtgcatcgccacgggaacgccgagtcgagccaccacccaccctgttctggatgctaatagcggtgaaaccattctcgacgcagctctgcgaacggtatcgagattgaacacgcctgtgaaaaatcctgtgcttgcaccactgccactgcatcgttcgtgaaggttttgactcactgccggaaagctcaagcaggaagacgacatgctgggaacaaagcctggggactggagccggaagccgtttaagctgccaggcgcgcgtttacgacgaagatttagtagtcgaatcccggcgttacattgccgcttcctgcaacgcgaatcatttagcggaaaaatcctggggctgccaactgcggcccttttacaaagaaggataactaaaatgacagaagcgatgaagataccctctctacccaaccctgcatttgaacggggcagacgactggggctgatccagcgtggcgggcgcagattgcggtctgggctcacgcgttccgttagcgctaaggctcgatccgatcgcgctgggcttctgcaagtaaaggccgaaaggccgtaatgcgttgcgcgcatttctacggtataagtcgttttcaggctacccacgtcggagcccgcgcccggttcggtatcgctgagttccacatcggtgccgcggaaagccat

SEQ ID NO: 124856 - DNA, 530 bp, Homo sapiens
atggggattgaatctctgcaagcgttcctgcgttcggcgggtgcacttggggtctgggtttacaccttcctcgaacgtattctgatcccaaccggtttacaccacttcatctacggacagtttatctctggtccggcagctgttgaaggcggcattcagatgtactgggcgcagcatctgcaagagttcagtttgagcgccgagccgctgaaatcgttgttcccggaaggcggtttcgccctgcacggtaactcaaaaatctttggtgccgtgggcatttatttagcgatgtacttcgctgccgcaccggaaaatcgggtaaaagtggcgcgcttgctaattcccacacccttagccgccatgttggtggtaattcccgaaccgctggtaatttaccttcctgttcatttctccgatactgtatgcggtacacgccgtgctgacggcgtcaatgtcgcccgtaatgtatctccccggtgtggtgggcaacatgggtgaaggtaagattgactaggttttcccgcacaatt

SEQ ID NO: 124857 - DNA, 4944 bp, Homo sapiens
atgtataaagaagtgaataccggcaccaatctgccagcgcagatcgatctttatgccgttgatggcgacgaatacaaattcctctgtatcgccaaaggtggtggttcggcaaacaagacgtatctctatcaggaaaccaaagcgttactgacgccggggaaactgaaaaattacctggttgagaagatgcgcacgctgggtacggcggcctgtcctccgtatcatattgcgttcgttattggtggaacttctgcagaaacgaaccttaaaacggtgaaactggcttccgcgaaatactatgatgaactgccaacggaagggaatgagcacggtcaggcgttccgcgatgtggaactggaaaaagaattgctgatcgaagcgcaaaatcttggtctgggtgcgcagtttggtggtaaatacttcgctcacgacatccgcgtgattcgcctgccacgtcacggcgcatcctgcccggtcggtatgggcgtctcctgctctgctgaccgtaatatcaaagcgaagatcaaccgtcaggggatctggatcgaaaaactggaacataatccaggcaaatatatcccggaagagctgcgcaaagcgggagaaggcgaagcggtgcgcgttgaccttaaccgtccgatgaaagagatcctcgcacagttgtcgcagtatcccgtttctacacgcttatcgcttaacggcacgattatcgtcggtcgtgatattgctcacgccaaactgaaagagcggatggataacggtgaagggctgccgcagtacatcaaagatcatccgatttactacgcgggtccggccaaaacgccggaaggttatgccctccggttctcttggcccaacgaccgccggacggatggattcttatgtcgatcaactgcaagcgcagggcggaagtatgatcatgctggcgaaaggcaaccgcagccagcaggacccaggggaaagccgccagcccaggagagccgcgagacagaaacagaggcttggtgcctggagacaccagggcccgaccccgggcccggtctggaggcccttacggggaacccggaaaggggaaccttctccccagcaatgggctttacaggagcacggtctgtgaccgagcacccacacgccctgcgcgagccaagcactagagtgaatactctgcagctggaattaaaagcgggcaaaacaatcacgctggaagatggaaggcagattaacggcgcagattacttagctgctccagtgccaggtaaagcgctcgctattttcggcgataccggcccctgcgatgccgcacttgacctggctaaaggtgtcgatgtcatggtgcacgaagcgacgctggatataaccatggaagccaaagccaatagtcgcggccatagctctacacgccaggctgcgacactagcccgtgaggctggagtcggcaagctaatcattacccacgtcagctcgcgctatgatgacaaaggttgtcagcacctgttacgtgaatgcaggtcaattttcccggcgactgaactggcgaatgatttcaccgtgttgttcacttacaccgcttctcaacccggtacgcaccagaaaatcattgatatggccatgaatggcgttggatgccgggcaacagcccgcattatgggcgttggcctcaacacgattttacgtcacttaaaaaactcagggcggagtcgggtacctcccgccttccggcggggcggggagttcttcgctggcgcggaaatggacgaccaggggggctatgtcggggctaaatcgcgccagcgctggctgttttacgcgtatgacagtctccggaagacggttgttgcgcacgtattcggtgaacgcactatggcgacgctggggcgtcttatgagcctgctgtcaccctttgacgtggtgatatggatgacggatggctggccgctgtatgaatcccgcctgaagggaaagctgcacgtaatcagcaagcgatatacgcagcgaattgagcggcataacctgaatctgaggcagcacctggcacggctgggacggaagtcgctgtcgttctcaaaatcggtggagctgcatgacaaagtcatcgggcattatctgaacataaaacactatcgtaatttccgtgccacaatcatcccgacgattgccgtaccggtggttattctcgggacgtttgcgatcttgtcggcggtcggtttcaccatcaacacgttgactatgttcgggatggtgctggcgatagggttactggtggatgacgccatcgtggtggtggagaacgtcgagcgtgtcattgcggaagataagctaccgccgaaggaagcgacgcataaatcgatggggcagatccaacgtgcgctggtcggtattgccgttgttctttccgcagtgtttatgccgatggcctttatgagcggtgcaaccggggagatctaccgccagttctccatcacgctgatctcctccatgctgctttcagtatttgtggcaatgagcctgacccctgccctgtgcgccaccattctgaaagccgcgccggaaggcggtcacaaacctaacgccctgttcgcacgcttcaacacgctgtttgaaaaatcaactcaacactataccgatagcacccgctcgctgttgcgttgtaccggtcgctacatggtggtctacctgctgattgcgccgggatggcggactgtcctgcggaccgcgatgtacttcactgccgcaccggaaaatcgggtaaaagtggcgggcttgctgattcccgcaaccttaaccgccatgctggtgggaattaccgaaccgctggaatttaccttcctgttcatttcaccgttgctgtttgcggtacacgccgtgctggcggcctcaatgtcgaccgtaatgtatctctttggtgtggtgagtgtgattgtcgatatcgactttaaccgtgtgctgggagcctggagcgatttaacgcgtattccgctggcatcgcttaagaagagttttcatatgggggaggcgtttcatcagcatgagcgtggggaaattagcgacgaagcgttcgcagaggcgctgtgtcatgagatggctctaccgctaagctacgagcagttctctcacggctggcaggcggtgtttgttgcgctgcgcccggaagtgatcgccatcatgcataaactgcgtgagcaggggcatcgcgtggtggtgctttccaataccaaccgcctgcataccaccttctggccggaagaatacccggaaattcgtgatgctgctgaccatatctatctgtcgcaagatctggggatgcgcaaacctgaagcacgaatttaccagcatgttttgcaggcggaaggtttttcacccagcgatacggtctttttcgacgataacgccgataatatagaaggagccaatcagctgggcattaccagtattctggtgaaagataaaccaccatcccggactatttcgcgaagccgcaaagccagacgcattgccgacccaggactgcagccggagcgcacatcactggcgtggtttcgtaccatgctgggctacggcgcgttgatggcgttggctatcaaacacaactggcaccaggcgggcatgttattctggatttcgattggcattctcgccatcgtggcgctgatcctctggcactacacccgcgacatcgtcaacgttggcggtgatatggccaccatcatggcaggcctggcctgtggcgaacctaacccgctgggctgggaaatcctacgtaactgcgccacccaattcatctcctgccaggacagcgttgccgcattaggtatgcgcgtgctgggtaatccgtacggcaacgaacccgcgcataatctccgatggcatactgtggaggagctgccgcaggtcacacagccagggaagctgactgaagccttcaaatacttcttgcaaggcatgggttacagttttttgggtattgcatcgcgtcaaaccaatgtcaaaaaggcaggtcccgataatattgccacctgctggtattgtaacacttttatcctagtaccactgacaaagcgtcaagtttttcgtgtcgcgcgagtatacaccgtgtcaaaatactcgagtgtcgctatcatgagggaccacccacagtataccactctagcacgctcctcatcccgcaccgtgactcggaatagcatctacaactcgtcttattctacgtcgcttacatactgctacccgcatcagcggttggaacaggccgcttacgaaatgacggcgctgcgtgctgcgaccattgagcttggtccgctggtgcccggtttaccgcatttgcgaactatccatcgccagctgtatcaggatattttcgactggtcagggcaactgcgtgaagttgatatttatcagggtgatacgccgttctgccactttgcttatatcgaaaaagagggcaatgccctgatgcaggatctggaggaagaaggttatctggttggcctggagaaagcgaagttcgtcgagcggctggcgcattactattgtgaaatcaacgtgctgcatcccttccgggtgggaagtggtctggcacagcggatcttcttcgagcaactggcgattcatgccggatatcaactgagctggcagggtatcgaaaaagaggcctggaatcaggcaaatcagagtggggcaatgggggatctcaccgcactgcagatgatatttagcaaagtgtacttttgtgaactgggggcggatgtgctggttaagcgcaacgatgcgttgacgctggcggatatcgacgcccttaaaccacaaaaaattgtcatctcacctgggctcactgaacgctgggggtcaatcagagccaaaactactgctctgagaaatgcgtaccgagctcgagtctactctaaagaggtgcatatcgagggctatacgccggaagataaaaaataa

SEQ ID NO: 124858 - DNA, 1086 bp, Homo sapiens
atgaaagggaaggtgaaggaggccaagcaggtgctgtgctacgccgcaagtgtgaacaagaagaccattccttcaaatctgctggacgagctgcagctgcccagaaagaaggtgactcgggcctctgtcctggacttctgtaagaataggcagctctgcaaggtgaccttggtgatgagctgtgtgtggtttaccgtcagttacacctattttacgttgagcctgagaatgagagagctgggcgtgagcgtccacttcagacacgtggtccccagcatcatggaggtgcctgcccggctgtgctgcatctttctcctccagcagattgggaggaagtggagcctggctgtgactctcctccaagccatcatctggtgcttgcttctccttttcctccctgaaggggaggatggcctcagactcaagtggccacgttgtccggccacagagctgaaatccatgacgatcttggtgctcatgctcagagagttcagcctggccgccactgtcactgtgttcttcctctacaccgctgagctcctccccactgtgctcagggcgacaggtctggggctggtgtctctggcctcggtggctggagccatcttgtccctgacaatcatcagccagaccccctccctcctgcccatctttctctgctgcgtcttagccatcgtggccttttccctctcctccctgctgccggaaacgcgagatcagcccctctccgagagcctgaaccactcctcacagataaggagctctgctgtgattcattccaataaagatgagccccaccactgtgcagtggcttgggtgaagaaccacactttcaacctgagtgctgctgaacagctggtactgagcgtgcccctggacactgcaggtcacccagagccctgcctcatgttccggccaccccccgccaatgccagcctgcaggacatcctcagccaccgcttcaatgagacgcagccttgtgatatgggctgggaatatcctgagaacaggctcccatccctgaagaatgagctcctcgatgaagcagacctccataacttgaaagagggtgttatcattccatag

SEQ ID NO: 124859 - DNA, 2571 bp, Homo sapiens
atgccagtacggaaaaacatgataatgaacgagggaaacataaccacgccgacaaacgggtgcagaattcgcgccagctgcggtgtgcccatgatatgcatcaaccagttgaaggacgggaacaaaaagcccagcccgctcaccgccgccaggatgaagcagaaggcgattattctcttcctcatccgcacggttcggaccgacacccacgtagtggaagatactggccgcaaaggtagccgcaaagccaacagccgcgagcggtttccagatgcctttccagaatttcacggtttcgctgatttccgggttctccggcaagccatgatacagatttggcttgtcagcatggtgcagcacgtacataacgtgtgtaccaccgacgcctgccggatcgtacagacccgcattgtcgtaaccgcgggttttcagctcagcaacgcgtcgctcgtagcgatgcgacggtgggtttaccgcgtgaggcggatacaataccgccgaacgactcaaacagccgtgttccacagcacccatggaaattaccgcgaaggacagcctgtcgggactctaatcgatgatcgctataaagctaacgagaatgtggaactggtgcattacgcacagccgctgctcaacgaagcagattcactggcaaaagtgatgccttccgacatcccgctgaaacaacgtcgctggctgggcctgcaaatgctggaaggcgatatctacagccgcgcctacgccggtgaagcgtcgcagcatctggatgccgccctcgcccgtctgcgtaatgagatggacgatccggcgctgcacattgccgatgcgcgttaccagtgcattgctgccatctgtgatgtggtaagcaacaccctgacggcagaacccagccgtttcaccactgcggtagataaaatcgtgctcaaccgtttcctcggtctgccgattttcctctttgtgatgtacctgatgttcctgctggctatcaacatcggcggggcgttacagccgctgtttgacgtcggctccgtggcgctatttgtgcatggtattcaatggattggctacacgctccacttcccggactggctgactatcttcctcgcccagggcctgggtggcggcattaacaccgtgctgccactggtgccgcagattggcatgatgtacctgtttctcttctttcttgaagactccggcgctggcttgccgggaaatctttgtgccgctgatgcggcttcgtgtgaacctccgttggtatccccctgtgctctaaagaatatcctggtggacgaattccaggataccaacaacattcagtacgcgtggatccgcctgctggcgggcgacaccggcaaagtgatgatcgtcggtgatgacgaccagtcaatctacggctggcgcggggcgcaggtggagaatattcagcgtttccttaatgatttccccggtgccgaaactattcgtctggagcaaaactaccgctctaccagcaatattctgagcgccgctaacgccctgattgaaaacaataacgggcgtctgggtaaaaaactgtggaccgatggcgcggacgtcgcgggtgctcccagaggcgttattgaggccagtatgccgcaccgtatttacggcgggatgcgcttcttggatcgccatgaaatcaaagatgcgctctcgtatctgcgcctgattgccaaccgcaacgacgacgcggctcttgacgcgtggggaatacgcgcacgcgggggtggtggtcgcttcagtagcgccagccaggaaggactcgtcaccctcgtaaatgacccagtatgtcaacccaaccaacaaaccaccaccgataatgttgccgatcgtaaccggaatcaggttatcagtgatgaaattcatcacggtccaggtgagaaaaattttcggtgcagaccgactgcgtgcaaaatttcgggattcgaaatcgcggatacaatcccatcggaacaaacaagttgcgatctgtgctcaaaccgtggaaaaacatgggacgggagacatatgacgcttgtcattagctgggcagattactatgaccgtgttactaggtgtataagctggctcatttcgacccacgcgccgcagtacatgccgacctttgaactgaataaagccattgtgcaaaaagcggagcactaccatttcgatttcgccctgtcgatgatcaaactgcgtggctttggcggcaaaactgagttctgggatcacaaccttgagtcgttcaccttgatggcggggctggcggccgtgacctcgcgcattcagatttacgccactgctgccaccttaacgttacctccggcaatcgtcgcccgtatggccgcaaccatcgactccatctctggcgggcgttttggcgtcaacctcgtgactggctggcaaaagcccgagtatgagcagatgggtatctggcctggcgatgactatttctcccgtcgttacgactatctcaccgaatatgttcaggtgctgcgcgacctgtggggcacggggaaaagcgattttaaaggcgattttttcaccatgaatgattgtcgcgcgtaa

SEQ ID NO: 124860 - DNA, 3453 bp, Homo sapiens
gggcgatgtcggcagtaccgcgtccagcgtccggtctccaatcccccgcgttggggtattcaccacacgatcaaaggccgcgtaggtcggttgcggttggcaatcaggcggcagatacgagagcgcatctttgatttcctggcgttcgaaaaagcgcatcccgccgtaaatacggtacggcatactggcctgcaataacgcctcttcgagcacccgcgactgggcgttgctgcggtagagaatggcgcactcggcaagcgctccgccgttgtcctgccaggttttgatgcggttaaccacaaaacgcgcttcatcgagttcgttaaaagcgcaatagagggaaataggctcaccgtccgcgccatcggtccacagttttttacccagacgcccgttattgttttcaatcagggcgttagcggcgctcagaatattgctggtagagcggtagttttgctccagacgaatagtttcggcaccggggaaatcattaaggaaacgctgaatattctccacctgcgccccgcgccagccgtagattgactggtcgtcatcaccgacgatcatcactttgccggtgtcgcccgccagcaggcggatccacgcgtactgaatgttgttggtatcctggaattcgtccaccaggatattggtaaaacgttcgcggtagtgttgcaggatatgcggcttgttaagccacaactcgtgagcgcgcagcagcagctcggcgaagtccaccaggcccgcgcggtcacacgcttcctgatacgcctgatacaccttctgccaggtctgctccaccggattaccgtagctttgaatatgatgcggacgcaggccttcatctttctggctgttgatgtaccacattgcctgccgcggcggccactgcttctcgtcgaggttcatggctttgatcagacgcagaaggttgctgcgtggcgcggccaccgcttcgcgctgtttgtcattaaggctgtcgagcaggtaagaaacgtccattggcaccgccgcgtaaaaataggttgggcggagaagcgcaacgccctccgccaaaaagcgggaaatttccagatgcggcagtaaacggctgtcccaggtttgcatcagatcgccattttccggtctgatccaacaagcctgcattccgctgcgaattgccccacccacgtcaactttgggtgttaaaagtgcccttcttctaaaatttaaggcttgccactctgtttttccagggggtcctctctttgcaggccctccaaacctccgttgcttttggaaaccctttttggaaaggccaggtttcccggtaagtctgttgctcttggttaggaaattgggccctgtccaggtttcccaaatggtggtggggggccccttggggatatgcctcgctaatacgcggctttttacatattcgcgcatggcgatgaattgtggatcggacttgatgctgcggctcgactctcccgctacgaagcggcgagcaaagttgagcggcagccgctccagcacacggccagggccggatgaaagcagaaccagttcagtcgccataaacaccgcttcttctatatcgtgggtaatcaacagcacctgcttgcccgtctcctgccagagtttcagcagcagggtttgcatctggtcgcgggtgaaggcgtccagcgcaccaaacggttcgtcgagtaataacatgctggggattcgccgccagcgcacgagcaatccccacccgctgacgttgaccaccggaaagctgccagatgtagcgtttttttttttcagcatctggtgcgcgatgttccagtgcgctgcattttgctctatacctgccaattgcaggccgaacgccacgttgtcctgtacattgcgccacggtagtagcccttcattctgaaaaactacgccacgctgctggctcccggtccctgcaatacgcttacccgccagttgaatgctgccatgctgataaggcacaaaaccggcaatcagattcagcagggtggttttaccgcagccggacggccccagcaccaccagtagctcgccgctttccagcgtcaggttgatatcttccagtgccggtttgccgccataatcggcgtaaagatgagagatttgcagcatctgcgcctccttgccctgctctttcaaaaactgcgcggtgtcgatgatcgctttgttcaccggtccggtcagttctgccgtttgttgctgcggcgtcagataggtattccccttcaccagccccggaacgtcaccttcaggcacgccgcttaaacgcgccagtttgctgatgttttccggctgtttcagccacacgtctgggttagcaatgtacggttgctgagcatcgatggcgcttttagcgaacgctttcacgaccacccagacgtccagcgttggcgcgccccactgcccgacctgttcagaatcggtcaacaccttgccgtctttttccagggcgttaaccgccggtgcccagacataagcaccatcaatatctccccgctgccaggcagcgataatcgcgggcggctgcaggttcacaatctccacttgcccgggtttaatgccccagtgtttcagtgccgccagcaggctgtagtgggtggtggagataaacggtacggcgatgcgtttgccagcgggtttatctaatgagtgagtggcgaggatccctagcagcgcgggaattttgagggcaaaggcgttacgctcttgatcctgttccggccaggcaaccacatggaacggtgcaggtgcaggttccgtttgccactccccttccatcgccgccagttttaccggttgtacttgcgcgacttcatacgcagaactgtctccgagttgcagggtaccgataatcgccagagtaccgaagacggaaccgatggcaaacgagcgtaatgcgacattgcgctcccgtccgcgcagtaaataccaggcgctgatcgccataataaacatggccccggtcacgtagcccgccattacggtgtgcacaaatttcacctggctgaccggattaaagaccagctcgctgaagctggtcatctccatacgcagggtgtcgatatcaaaatgcgcaccggtcgggtattgcatccaaccgttggcattcaatatccacaacgcagagagatttgaaccgaacgccaccagccacgtcaccagcaggtgctggtatttattcagccgttgccagccgaagaagaacagcccgacaaaggtggattcgaggaagaaggccattaatgcttccatcgccagcggtgcgccaaaaatatcgcccacatagttggaatagaatgaccagttagtaccaaactgaaactccatggtcaggccggtagccacgccaagagcaaaattgataccgaagagcttaccccagaagcgcgtcatatcgcggtagattgttttgccggtgaccacgtaaatggtttccat

SEQ ID NO: 124861 - DNA, 390 bp, Homo sapiens
ctaactgcttcccgctgaattggggcatagtaggggttgtgcagttgagatttcctcgggaggggtgccttcaatgtcattaacatcggagcatgggctagcaggccggtccaggggtccacggtggatcttagtcatggactccatctggtgctccatttgaagaacaatttgtagttttacggttttgattcccactttttgaagtcctttttctacaaaggaacttccatcagtatacaagttgaggttgggatcagtcaagggaacctctaaaaggtccccttgagcggcataggtttgagcaattatttgttgacagttatgttctatcttttcttcattgtatcttttcagcatggtgcctaatcttcccattggataggccat

SEQ ID NO: 124862 - DNA, 2200 bp, Homo sapiens
ggccagttcctagtcggtggctccatgctggtctctgatgtttaggaagtggtgtcagcagagactgagctgcaccctttctttggacagatggcaggagaggagaacttcaaggaagagctcagatcccaggatgcttccaggaacttgaaccagcatgaggtagcaggacatccacattcctggtctctggagatgctgttacgcagattgagggctgtccacaccaagcaggatgacaagtttgccaacctcctggatgcggtgggggagtttggcacattccagcagaggctagtagccctcacctttatccccagcatcatgtcggccttcttcatgtttgctgaccacttcgtgttcacagcccagaagccctattgcaataccagctggatcctggcagtgggcccccacctgtccaaagctgagcagctgaatctgaccataccccaagcacccaatggcagtttcctgacatgcttcatgtaccttcctgtgccttggaatctggattctaccatccagtttggcctcaatgacacagacacatgccaagatgggtggatctatcctgacgctaagaagcgatcgctgatcaatgagtttgacttggtatgtggcatggagacgaagaaggacactgcacagatcatgttcatggcagggctcccgataggctctctcatcttcaggctcataactgacaagatgggccgctaccctgccatcctgctgtcactgctggggctgatcatcttcggctttgggacagccttcatgaacagctttcacctgtatttgttctttcgctttggcatctcgcagtcagtggtgggctacgccatcagcagcatttctttggccactgagtggttagtgggtgagcaccgggcccacgccattatcctgggacactgctttttcgctgtgtgggccatgttgctgacagggatcgcctacggtcttccccactggcagctgctgtttctggtgggtgggatacttgtgatccccttcatctcctatatctggattctcccggagtccccgcggtggctgatgatgaaagggaaggtgaaggaggccaagcaggtgctgtgctacgccgcaagtgtgaacaagaagaccattccttcaaatctgctggacgagctgcagctgcccagaaagaaggtgactcgggcctctgtcctggacttctgtaagaataggcagctctgcaaggtgaccttggtgatgagctgtgtgtggtttaccgtcagttacacctattttacgttgagcctgagaatgagagagctgggcgtgagcgtccacttcagacacgtggtccccagcatcatggaggtgcctgcccggctgtgctgcatctttctcctccagcagattgggaggaagtggagcctggctgtgactctcctccaagccatcatctggtgcttgcttctccttttcctccctgaaggggaggatggcctcagactcaagtggccacgttgtccggccacagagctgaaatccatgacgatcttggtgctcatgctcagagagttcagcctggccgccactgtcactgtgttcttcctctacaccgctgagctcctccccactgtgctcagggcgacaggtctggggctggtgtctctggcctcggtggctggagccatcttgtccctgacaatcatcagccagaccccctccctcctgcccatctttctctgctgcgtcttagccatcgtggccttttccctctcctccctgctgccggaaacgcgagatcagcccctctccgagagcctgaaccactcctcacagataaggaataaggtcaaggacatgaagactaaggaaacatcatctgatgatgtctgaggaagcggccaagaatgtcattctcaatgcccagatcctgagattggacccataccctgtctccaaccctgccttgaagcaattcaataaagaggaagcaaacagccaggctccctgagggccaggcccccagaccatcttgggttggaattgagtggccaagtatggggtcatggattccaggccacaaattccaggcctagttcagtttgggggcagggtcagtcctgctcccaggccagcccttgacattaaaaaaaaatgccccctccttctgcaggagctctgctgtgattcattccaataaaggtacaatgttggtctt

SEQ ID NO: 124863 - DNA, 858 bp, Homo sapiens
  misc_feature (1)...(858): n = a,t,c or g
ctagtagttctcactgtggccgttgaaaagttcagcaaccgcttcctgaagaagaagccgatggagtttggttcgtggaccacacgagaaatcctgatcgcgtctttcgccggggtgcgtggggcgatcactctggccggtgtgctctctatcccgctgctcttgccggatggtaacgtcttcccggcgcgctatgagctggtgttcctggcggctgtataatgttttcaggaggttgattggagcagcccaccacaacagggtggagggcccgttattgttttcaatcagggcgttatcggcgctcagaatattgctggtagagcggtagttttgctccagacgaatagtttcggcaccggggaaatcattaaggaaacgctgaatattctccacctgcgccccgcgccagccgtagattgactggtcgtcatcaccgacgatcatcacttngctgagcacagtggggaggagctcagcggtgtagaggaagaacacagtgacagtggcggccaggctgaactctctgagcatgagcaccaagatcgtcatggatttcagctcaacccgatgccaacccgcttttcgaagtcctttttctacaaaggaacttccatcagtatacaagttgaggtcgggatcagtcaagggaacctctagaaggtccccttgagcggcgtaggtttgagcaatcacctgttgacagttaagttctatcttttcttcattggccggaaaaactgtggcatggtcttgatttgcatttccctcattattaaagaggttgagcatcttcacatgtttgtaggccacacgagtttcctcttcgtaaaatacctgttcaggtctttggcccat

SEQ ID NO: 124864 - DNA, 1236 bp, Homo sapiens
atggttataattattaaagatgccggtggtgacatcagtgctttagttatgggattcaccaaaaccgccacgggtaacggtagtggtggtcgccggttttggtgccattgccgtcttcggtacggtcatggtgcggcctggctgggctgcgccatagtttttacccgtcgcgtcggtatatttaccgtaagccggactggctgggtttttcgaggagaacagcggctgctgtgcaaatcccgcgccgccgcccatcagacgccccatcatgtaaccggccatcagcggcatccagaaactcccgctggattgctgggcctgcgcctggttttctggtgccatgccagcctgggctggtgcctgctggcactgaccttcaccaaattcagcaacacagtcttcacgggtggcgtatttcggcgcagtacgttcggcttctttcagcgcattgttgtacgcggtggtacattcggcgcttttgcctggctgaacagtcgtcagcattttgatagagagacactgtttcatcactcttttcacagcaaaaacaataaggagagcagtgtgggtccagtaatgttggatgtcgaaggttacgaactggacgcggaagagcgtgaaatactggcgcatccgctggtgggagggctgattctctttacgcgtaactatcatgatcctgcccagttacgtgaactggtgcgccagatccgcgcagcttcgcgcaatcgtctggtggtggcggttgatcaggaaggtggacgcgtgcagcgttttcgtgaaggttttacccgcttgccagcggcgcaatcattcgctgcgctgtcaggaatggaagagggtggcaaactggcgcaggaggcaggttggttgatggccagcgaaatgatcgctatggatattgatatcagctttgcgcctgtgctggatgtcgggcatatcagcgcggcgattggcgagcgttcttatcatgccgatccacaaaaagccctggcaattgccagccggtttattgatggtatgcatgaagccggaatgaaaacgaccgggaaacacttcccaggacacggtgcagtaacggcagactcacacaaagaaacaccgtgcgatccacgtccacaagcggagattcgcgctaaagatatgtcggtcttcagttccttaatccgcgaaaataaactcgacgccattatgcctgcgcatgtgatctacagtgatgttgcgctgctttattag

SEQ ID NO: 124865 - DNA, 1997 bp, Homo sapiens
atgaaaacacaacgtggttatacgctgattgaaacgctggtcgcgatgctgattttggtcatgctaagcgcaagtggactctatggctggcaatactggcagcagtcgcaacggctatggcaaaccgccagccaggcgcgggactatttgctctatttacgtgaagatgccaactggcataaccgcgaccacagtatcagcgttatcagggaggggacgttatggtgccttttcaccattggtctttgtgccacgctggcccgaagtcgaaatgagcgacctgacaccttcgcttgctttctttggcctgcgcaataccgcatgggccgggcatattcgcttcaaaaactcaacgggcgagtggtggctggtggtttcgccgtggggaagactccggctttgtcagcaaggagaaacagaaggatgcctgtaaaagagcaaggtttttctctgctggaagtgttgattgctatggcgatcagtagcgtattgttgctggggtcggcacgctttctgcctgcgttacagcgtgaaagtttaacgagcacccgtaagctggcgctggaagatgaaatctggctgcgggtatttaccgttcgcgaagcatctccccgagggcgggttattgtcctggcatctgtaccggcgaagggctggaaattgtcggaccgggtgactgtgtccttgtgccaatgggatgcgaaccataaccggtattctgggatccccgacccggtaaaagagtccgaccagattggatttcgtctgaaggagcatgtgctggaaacgctacgcggtgcgacatcctgtgaaggtaagggctgggataaagtcactaatccggatgccatcattatcgacacttttcaggtcgtacgtcaggatgtcagcggcttctcgccggtgttgacggttaatatgcgtgctgccagtaagtctgaaccgctaaccgtggtgaatgccagctatagcgtgacaggattcaactgcccgcactcgacggcccgctgtttaaaggtaaacgcgtagcggttatcggcggcggtactccggcgtggaagcggcaattgacctggcgggtatcgttgagcacgtacgctgctggaatttgcgccagaaatgaaagccgaccaggttctgcaggcaaactgcgcagcctgaaaaacgtcgacattatttgtgtagcggagcgcgcaccctacgcggtgattggtgaagcgaccgaagaactgcatcttctctgcacgatcgtcattttgataatcagccgatcgatctgccgctgacgtcctgcttggtaaaacgccgaagatgacccgcgatgtacaaacgcctggtgaagatgcgggctgtatgaagccgttaaagccgtgggcgaagagctttgtccggcgctgggctgacgatcccggtgggtaaagactccatgtcgatgaaaacccgctggcggaaggtaacgaagagcgcgaaatgacgtcgccgctgtcgctggtgattctgcatttgcccgcgtggaagatgtacgtcacaccatcacggccgcagcttgtgaagcggtcgagtccgtactggcacagcatgggcttgctgattgtgtcattatgtagggccaggcggtttccggtgaccgttttgtgattaccagcaacgggcagactgtattcagcgaaagccgcaccacgttgcgtgtcataggggcaggaaactacctgggtaccgaaatcgatgcgtatcatgtcatctatgccggtgtggtgttgcctgacgttgattgttgagtaatacgccaaggcgcaatagctcatgcgcatggcggcccatcgcagtagcgcctccagttgcggatgcgccagcttggttgctgttcccgccactgttcgtacatttgcatagtggtatccagcaccgtcgggcctgttcgctgtcgatgtgatactggttggcgaggctgctgcggtgcgactacgcacatcctgatgacggaaacgtccttccat

SEQ ID NO: 124866 - DNA, 786 bp, Homo sapiens
atgggctggcgtatgggaatctggctgcgggtatttaccgtcgcgaagcatctccagagggcggagtccgaccagattggatttcgtctgaaggagcattgctggaaacgctacgcggtgcgacatcctgtgaaggatgtcagcggcttctcgccggtgttgacggttaatatgcgtgctccacaaagcaatcggcgcggcggacagtgggttggctgcgaatgtttagacgtctgcgcaaacgggcaagccacggcctttacccttaagtccattgcatatggatgtccagccggaaatttagtgcatagcgcgtcagggctaaaactcatcgactggggtatgccggagatggggatatcgcgctggaatctggcggcggtgtgggtgaaaatactgaacagcaccggcagttggtcaatgactatgccactcgcggaagattcagccggcgcaattatggcgtcaggtcaggcgatggttgcccggctgctgatgctcaaagcagggtggtttgagtaccgctggcgacaaacggcgatcgacaatttatcaggctggccgatgacagctggcggcagctacataggagcaataaggagagcagtcgtgaactggtcgccagactccgcgtattcgcgcaatcgtctggtggtgcggttgatcaggaaggtggacgcgtgcagtgttttcgtgaaggtttataggcttgcagcggtgcaatcattcgctgccgagggccccccgcaacatattgaatactacaacagcagaagaattacctga

SEQ ID NO: 124867 - DNA, 240 bp, Homo sapiens
tcattcataaatgtcgagcgatatagagccgaaccgcaaaccgctgacgcggcccccttgaaacggggggcttttggttcttggctccccgagccggaccattatgccgaagatgacaccagcaatatctgcataaaaacccgtatggttactgtggaattggcggaattggcgtctgtcaggcctacaaaatcgtccaaattcaatatattgcaaggactgcgtaggcctgatcggcat

SEQ ID NO: 124868 - DNA, 577 bp, Homo sapiens
aagaattccgcccagggaatgcgtcaggcaaatgcccacggcacgcagtatcgttcagcgatttatccgctgaccccagaacaggatgccgcagctcgcgccagtctggaacgttttcaggcggcgatgcttgccgccgatgacgatcgtcacatcaccacggaaatcgctaacgccacaccgttttattatgccgaagatgaccaccagcaatatctgcataaaaacccgtatggttactgtggaattggcggaattggcgtctgtctgccgccggaagcatagcgttacgggtacaaatgtagtttgttgataaagtgctctttgtctatgcctgatgcggcgtaaacgacttaccaggcctacaaaatcgtccaaattcaatatattgcaaggactgcgtaggcctgatcggcatagcgtatcaggcagttttgcatttttcagctgtctgaattttaaccctctggcggctttacagtaccttacgctatactagccactgaaaatgccggttcactttcttcgaatcggctttcaatgtgtatttcacacaaattaatcaacttccccttcc

SEQ ID NO: 124869 - DNA, 1377 bp, Homo sapiens
atgtcggggctaaatcgcgccagctggctgttttacgcgtatgacagtctccggaagacggttgttgcgcacgtattcggtgaacgcactatggcgacgctggggcgtcttatgagcctgctgtcaccctttgacgtggtgatatggatgacggatggctggccgctgtatgaatcccgcctgaagggaaagctgcacgtaatcagcaagcgatatacgcagcgaattgagcggcataacctgaatctgaggcagcacctggcacggctgggacggaagtcgctgtcgttctcaaaatcggtggagctgcatgacaaagtcgttcatgttcccgccatcaaagtaaacctgaccgccgaactgatgcacgacttcacacacttcacggatcgtttcttcatacacgccgtggatcagttaataccgcaagggagggccatcaaatggctgatgaaattgatgcaatggctttatatcgagcctggcaacaactggataatggatcatgtgcgcaaattagacgtgtttcagaatatggcgaacataacaacagccatgctgacgattaatgctatgcattttcttaaacgccagcgccactgctttcaacatggcttgccgtacttcgtcagaataaggcgatactgcatgctgggcataccagtcagcaatgctgatgaaccccgccatatcttcagtcaccagcaacgctcgccattcaccctcaattttcaccgcttcaccaaaaacgatcttcggcacgatgacaccggcccgttccagttctttaattaccgcaacctcacggacaatcgttggtcggccgaacggataactgaagtcagtttcctgacgccatccggtcagcgcgccgagctggcgatcccacaactcacctggctgaacgatccacgtcgacaccgtgcggaaggcctggtaagcctctccagccttaccggacagcacggcgtgatgcaggtgcgcatggatttgcgcgatgatgaggggttgttaaacaatggtcgcgtctggctccaggcggatgacatcgacctgaagccgtggctcggtaaatggatgcaggacaatattgcgctggaaacggcacagttctcccttgaagatcaaaaggaaacaaaaatcattgtaaaccatgccatctttttagagattaccagcagaaaattccttgttcgaaatttagcagtgcaagctatggaaaaacttacaacggaactacactccttaattggtcgagcatatcaacagaacctgacggctgtttgtgtgaacgtgctgaaaagtctggcgcgtaaaaacggggcttcgactgatgaaaaagaagacgacctggatttggattttgaaattaattaa

SEQ ID NO: 124870 - DNA, 580 bp, Homo sapiens
tgggtattaacaccattttcgtaaggtactgtctaaaaaagagagaggatattacattgcttaatccgatcgttcgtaaattccagtacggccaacacaccgtgactctggaaaccggcatgatggctcgtcaggctactgccgctgttatggttagcatggatgacaccgcggtattcgttaccgttgttggccagaaaaaagccaaaccaggtcaggacttcttcccactgaccgttaactatcaggagcgtacctacgctgctggtcgtatcccgggtagcttcttccgtcgtgaaggccgcccaagcgaaggcgaaaccctgatcgcgcgtctgattgaccgcccgattcgcccgctgttcccggaaggcttcgtcaacgaagttcaggttatcgccaccgtggtttctgttaacccgcaagttaacccggatatcgtcgcgatgattggtgcttccgcagcgctgtctctgtctggtattccgttcaatggcccgattggtgctgcccgcgtaggttacatcaatgaccagtacgtactgaacccgactcaggacgagctgaaagagagcaaact

SEQ ID NO: 124871 - DNA, 1371 bp, Homo sapiens
ttaattaatttcaaaatccaaatccaggtcgtcttctttttcatcagtcgaagacccatttttacgcgccagacttttcagcacgttcacacaaacagccgtcaccactgctccgacagccactgctgcgatataacccagcttgccttcaaccaccggcagcacaatcagaccaccccagcctgcatagcactgcgcaccgaccagcgccgcagttactgcaccacaaactgaaccgaccatgatggaaggaatgacacgcagcggatcggcagcggcgaaaggaatcgccccttcagtaacgccaacacagcccatcaccagtgccgctttgccggtttcgcgctcttctgcggagaaatttttacgaccaatcagcgtcgccagccccatccccagcggcgggatacaaatacccacggcagcgatggccaccacggtataaacaccctgagcaacgcaaatcagcatgaaggcataggccactttgttaaccggaccgcccatatcgaacgccagcatcagacccatgatcaccgccagcataacaatgctgccaacagcggtactgaagtcagtcagtaagctcgataacacgctgctgtctaacggtacgttgctgaacgtgaaattcactccggcgaccgttgcgggaagcgcaacagcgcccacaagattatgccgggctggtggtgcgcgttgccggatacagcgccttctttgtcgaaggtggtcttttttaaaggctgtccgcatctttgcccgtggtgtgctaatccggagtcgatctccggcaaaatccagacggtacgcagagaggcgaaatgtctgcactgtgcgaaatgtttgcgtgatgcggatgaatgcccctccggggcgtttgaacggattggtcgcgatatcagccttgacgctctggaacgggaagtgatgaaagatgacattttctttcgcacgtccggcggcggcgtcacgctttatcgcggcgaagatccagccgaagacgcacgatacgctcacaccaatcaaccccggcagaataaagctgtggttgatgacgaagcgaccgatgtgggtggtgccggaacggtcaaactgaatcgctgccagatcgctcggataagtcggcaggatgtaataaccgtagcaagccggtgcgaacatggtttctgccatccatgcgataccgtacaccgccacgatggcgatcataccggaacggaagacttcgttttttgagatagacgcgggattggttttggtcaggataataatcagcgccccggtcagcagcataaacatctgaataaccagtaccatcgacagcggtttgccgccgaaggatgacgcagtttcctcaatggggcacat

SEQ ID NO: 124872 - DNA, 3943 bp, Homo sapiens
tcacagtcgttgccagtctggagtatccaatgtagctccgtaatgcatctgaaagcctccgtacagggtgaagatggccgtaaccaaatcctgacgatgggttgctacggtcatcggggtaacgcgtgtggtcagctgcggcgcattgagcagaacgaaaatgatcatagtcacatcgaacgcgattttcttttcatcgccgcactcctggccttcgcgatctacgatcagttcatcatgccccgccgtaacggccccaccctgctggcaattcctttgctccggcgtggtcgcatcgatagcgttatcttcgtcggattgattgtcattcttattgcaaagcggtccagtttccggaatattacacagcggttgttgcagatggcgacgggcatggcgtaactggcgcagcgtgttggagtaaatgccggtgatcgcactgttgtgcaccatggtgtagaacatacgcaagatggcttccggctggcgcataaatagtgtttcatcacgcaggtcgattagcgtaccgcgtagctgaaactcatcgtcgattggacgtggtttttcgtcggcgggaagggcgaggatggcttcatcgaacagttgcagcagcatctggttgagttcactgacgcggcgtgtaacgcggaagtaatccttcatcatccgctcgaccggttcgttaccttcaccactgtaattcagacgctgggcgacgctaagctggcgatcgaataacaggcgattatcgtaacggctgacgaccagatgcagggcaaagcgaatacgccacaatatatgcagacattcgtttaattccgcccgctccgccatttcatccagcgatgttgcgccaaaatgacggcgggccacccattgcagagtgtggatatcgcgcaagccgccagggctgcttttgatgtctggttcaaggttgtagctggtgccatggtaacgctgatggcgctggttctgttcttcaactttcgccgcgtagaacttgtcggaaggccagaatccttcgctgaaaatatgtttttgacagttcgaggaacagcgcaacatcgccaataataagcgggattcgattaaattggtggcgacggttaaatccgataacccttccagcatgcactcttcaagcgtgcgcacgctatgaccgacttccagctttacatcccagagcagcgttaacagctcgcccactttttgcgcctgatcgtccgggagctttttacggcttaaaatcagtaaatcgacgtctgaaagtggatgcagctcgccacgaccgtagccaccgacggcgaccaatgccaggtcggcaatctggctgaatcccgcttcaatccataatcgttgcaggagctggtcgataaactcggtgcgcgcctcaatcaactgttctgcagagatcccattgtcaaaggcatcacccagccaacgctggaaagtatcgatatgggcttttatcccaccgacggttaattcatcacggggccagacgcatggattttgcggttgaccgggcagggtggggagagcggtgtttgcgtactgttcgtaatttccaagctgctgagagatgcttatttgttcctgaccacgcttactggtagacagattaaaataatcaataaaatgtgtccgctcattggtgtctccggtaggagcctttgacggtgtaaccactcattcgactgtaggcactgtcggataagttataaaaaccttgcgtagaatagcgatatcctgcgaccagataaacatcgcggaagatccccgctgaccaccacatatcctggtcttccacgtaggtagagtccgcccactgcatcacgcgcacacacaacaggttgtcgccggttttaaccatcgcgctgatgtcaaactctgcggtcaggcgactgcccttgctgaaacccacatactgaccgttaacatagacttcaaaataggtttcgacgccgtcaaatttaatcagcgtctgtttaccctgccagccgtcgctgagggtgaaaatacgttgataggcaccggttgggttatcgctggggacaaacggcacatcgatggggaacggaaaaccttcgtcggtatattgcagtttgccgtgacccgaggggggatcctctagagtcagggacttcctcgcgataacgcagttcgtcttcgtccatccacggtagcggattgtgtccccactcacctgccgtgccattgcgcgccgatatgcgcccgcccattgaattggctttatcgcctctatgctccatcttggttcaccaatgcgcgcttttaactcgctcaaccggttaggggcttcagcactcagtaacgaaatcgccagcggttcgatcttttttcccgtagccggcatcggctggttgctggcaatgctgaaaaagctgtcaccggcattgcgtacgctgtggctgatagtgacgatggttcttggcgtcatctttgtctggatgatggtgcgtgtgtataacagcattgataccgttccgacctggtacagcatctggacgccgatgggcttcttcctgttgttgagtctggctggcgtcgatggctgggcgatgcgtctgctgccagcaatttctgtactggcacaaacattctgttgccatcgtttctgtcccgtgaatgaagagtcagttgttggaatattcagcttgtgcgacgtggatttgtcgggagcttcaaacctcttcgttagcagccatccataatccataaaggttggccagcaaatagccttcttcacacgggttaactgatgcaattgcacaacggcttgccagtggctggattgcgccagttctgccagcaactcgttatccagcggctctatttcttcaccacggcgactgcgcatcagtgcactcgccatatgtgtcatcgccatcgttccttgctcactgcgcaccggcagatggcactctgtttccagtacgttgacgacctgcatcatgcctttgcagatgtccttatcaataacgcctgctacccgttgttgatgggcgagcagggcgtgtttatctacaacggcacgcagcagttgttgcattgggtaatcatcgactcgcgtcaggaccacggcttcggtggcctgtaaaaatcgcggatcgtctgtgagcggcgtcgcctctaatcccagcatggtcagttcgttttccgccaccacgttccagatcaccgcatcgacatcgcctttaacaatgcgttgtaaactctcgtgataagagagatcagctcggtcccggccagtgttggggtgggtatcgatttccccgggggggcggccacttgggcgggcccggttgtaattaagcccggacaatcttaagccgtgatcatcgggtgtacccaaccacgaaacgggcttcaaagtgtgccagttaggacccacggcatgggccattatcaggaaagccggaaaaatattcggtcgtgaggagccaaaacgcgtatccgttccctgcatatatggcgacgcggcggaaagggcgataaagtgcggcacaaatcgtgacaagccgtgcagcaaataaatggcgtcatcgccactggcgcagccaacatggacatgctgaccaaaaacggtcgcctgctgaatgagataaccaaagttttccagcgtgcgttgatagcgttcgttatcgcatacctcctgacgctgccatttctgaaacgggtgcgtgccaccgccgcaaatttccagatgatggtctgtggctgcctgcaatacgactttctgcatcgctgaaaactgcccggcagcctggttgatatcacggcaaacatccgtcgccagctccagcatactttcggtgatatcgtgctttacctctccggccgtgatcttatttttaaccgcgtcaatcagcattgaagagtcctggcttaagtcatagcccggcggattaaccacctgcat

SEQ ID NO: 124873 - DNA, 1119 bp, Homo sapiens
atggcgtcagcacgttttactgcatcgctgatgttgacgcgcacgatggtcttgccagcaaaacgctcttcaaacttgatgccgatatctttggtcgtcttctttttcatcagtcgaagacccatttttacgcgccagacttttcagcacgttctgacacactttagctcggtacccaaaaaagattaccacagccgtcgtggtctgctgcgcatggtttctcagcgtcgtaaactgctcgactacctgaaacgtaaagacgtagcacgttacacccacctcatcgagcgcctggaggttcgcgcggctaatgagaggctttacccacatagagctgggttagggttgtcattagtcgcgaggatgcgcagaagatcgggtattaacaccagtgccgtaaggtactgtctaagaaagagaaaggatattacattgcttaatccgatcgttcgtaaattccagtacggccaacacaccgcgactctggaaaccggcatgatggctcgtcaggctactgccgctgttatggttagcatggatgacaccgcggtattcgttaccgttgttggccagaaaaaagccagaccaggtcaagacttcttcccactgaccgttaactatcaggagcgtacctacactgctggtcgtatcccgggatatcgctattctacgcaaggtttttataacttatccgacagtgcctacagtcgaatgagtggttacaccgtcaagcctcctaccggagacaccaatgagcagacacaatttattgattattttaatctgttctacatctgtattacgaacaaaatacagagacacgatacccggggctacaggcctataaaaacgttggatattgttccggcatttgaggcaagccatttgttatggcaaagctatgaaaatagctgggagcaaatattcagcgcaagtgttggtgcctcctggcaaaaacattatggcacggatgtccttacccaactcggctacgggcaacgcattatttggaatgacataattgatgctggcgcaacgctacgctgggaaaaacgaccttatgacggtgacagagaacacaacttatacgttgaattcgatatgacattcagattttaa

SEQ ID NO: 124874 - DNA, 636 bp, Homo sapiens
tcacctgtggcgaacggcgagcattgttgatcgtattcgtggcttctttgagccatccagtattctggtttctaccctggtgctaacgctgcgcccaaccggccttctgccgctggtcacagacagtcttccgatgcgcttgctgccaactgaaatcatggctggttcgccaattcgcagtcggatatcagtctgggtgatgacccgggtattaatggacagcgcgcacaaggaacgtgggaacgctggacggtacgcgcggacgagccgcaagcgttccatattgaaggcgtaatgttccagatccgtaacgtgaatggcgcgatgccgttcccggaagacagaggctggaaagataccgtttgggttgacggacaagtggagctgcttgtatatttcggtcagccttcctgggcgcacttccagttctacttcaacagtcagacgcacaaggttgggccacgcgcggtagcctagtacaggatccctgaaacggcgggaggcccaagcgagatggtctcgtgatgacaggattccacgacgagcctcgcgaacatggcgcaactctatctctactaagccgatgcaagaatcagctaagtgtggtggtccctgcctgttgtcacagctgcacat

SEQ ID NO: 124875 - DNA, 838 bp, Homo sapiens
tgagaagggcgttggccgaaaagtgtagcctaccacgccacgaatgagtgccattaggttttaaacagcggctggcgttggctagttcgctgatgcataagccgaacattctgtctcccggcaaaccgacttccggcgttgaccccctcacccgccgtgaattttggctgcacatcaacagcatggtagagaaaggcgtcacggtgatggtcaccacccactttatggatgaaccggaatattgcgaccgcatcggcctggtgtaccgcgggaaattaatcgccagcggcacgccggacgatttgaaagcacagtcggctaacgatgagcaacccgatcccaccatggagcaagcctttattcagttgatccacgattgggataaggagcatagcaatgagtaacccgatcctgtcctggcgtcgcgtacgggcgactgtgcgttaaagagacgcggcagatcgttcgcgatccgagtagctggctgattgcggtagtgatcccgctgctactgctgtttatttttggttacggcattaacctcgactccagcaagctgcgggtcgggattttcctggaacagcgtagcgaagcggcgctggatttcaacccacaccatgaccggttcgccctacatcgacgccaccatcagcgataaccgtcaggaactgatcgccaaaatgcaggcggggaaaattcgcggtctggtggttattccggtggattttgcggaacagatggagcgcgccaacgccaccgcaccgattcaggtgatcaccgacggcagtgagccgaataccgctaactttgtacaggggtatgtcgaagggatctggca

SEQ ID NO: 124876 - DNA, 1260 bp, Homo sapiens
tgcgggcggcgggctcatactccagcatgcgcagcaccaggtcctggaagcggaggtagtcggcggggctgtggcccggctcccccgcccgccggcccccgggcccgcccgtctgcacgcccagcacctcctgcagccgccgtgtcccggggccctggtaatccttcctgagttctttcgtccttcgtagggtccagccacccccaggcagccgttcaaagtacttgcgagccttgggcgcctggtccagcatggcggccggtgggatgcccagcacctccacaatgcggttcatctggtcgacctcattggagccactgaagaggggctctccggtgtgcatctccacaaggatgcagcccagggaccacatgtcaatggccaggtcgtagggtgtgcccaggagcacctcaggtgagcggtagaagcggctctggatatactggtagatcctctggccaagctggcaggagctgccgaagtccacaatcttgatggcgctgcgcttggggttgcacagcaagatgttttcgggcttgaggtcgcagtgaatgatgctgaagctcaggcgtggccagaaagagcagtgccgtgcagagctgctgcgccagcttccgggtcaggttcagcgagacgccgcggaagtgggtgttgcgcaggaggtcgtacaggttgtaggacagcagctcaaataccaagcacaagtgggttccggaacatgaagtgccgcttcaggtgtactatatagtacttcatctccgtgtcatgctggttcatcagctccagcagccgcagctcaatctgggcctggttcaggaaagcctttttgttcttgatgatcttgatggccacaagctcctgggtctgatgatcataggctttcaccacctggccaaaggagcctttgccaatgagcgagtcaatttcgtagcgctccagccagcgctcgccactgcgcacgatgtagtcatggttgtcgtcatcataaccatggttcaggaccttcttctccttcttgttgctcgaatcctggggtggcgcctgctgggcccgccgcttcttcttcgcatagtatacctcattgatgtgcttgtaggtcttgatgaggtccacagagagcttacgcagcggggctgaggttgcatcccggaaggccaggggcagcctccgaggcagtagccgcacatcaggcaatacctgcgtgtgctcctggggccctgggaagccagagaagggaccatggcccggtgggacggccat

SEQ ID NO: 124877 - DNA, 2724 bp, Homo sapiens
atgcatccacgttttcaaaccgcttttgcccaacttgcggataacttgcaatctgcactggaacctattctggcagacaagtacttccccgctttgttgaccggggagcaagtctcatcgctgaagagcgcaacggggctggacgaagacgcgctggcattcgcactacttccgctggcggcggcctgtgcgcgtacgccattgtcgaattttaatgttggcgcaattgcgcgcggtgtgagcggaacctggtatttcggtgccaatatggaatttattggtgcgacaatgcagcaaaccgttcatgccgaacaaagcgcgatcaaccacacctggttgagtggtgaaaaaacgcttgcaaccatcaacggtagagagtcgacttgctgtctgcagtcgatgttcactttagatagacactctggtatgtttctggtgtcaaaatcctttccaagtcagttctttaccaacgatatgggtggcaacatgatgatgtacatcaacctgatttgggcctggggccacccggaagtttacatcctgatcctgcctgttttcggtgtgttctccgaaattgcggcaaccttctcgcgtaaacgtctgtttggttatacctcgctggtatgggcaaccgtctgtatcaccgtgctgtcgttcatcgtttggctgcaccacttctttacgatgggtgcgggcgcgaacgtaaacgccttctttggtatcaccacaatgattatcgccatcccgaccggggtgaagatcttcaactggctgttcaccatgtatcagggccgcatcgtgttccattctgcgatgctgtggaccatcggttttatcgtcaccttctcggtgggcgggatgactggcgtgctgctggccgtaccgggcgcggacttcgttctgcataacagcctgttcctgattgcgcacttccataacgtgatcatcggcggcgtggtcttcggctgcttcgcagggatgacctactggtggcctaaagcgttcggtttcaaactgaacgaaacctggggtaaacgcgcgttctggttctggatcatcggcttcttcgttgcctttatgccactgtatgcgctgggcttcatgggcatgacccgtcgtttgagccagcagattgacccgcagttccacaccatgctgatgatttgcgccagcgaggaagcgcagcggatgcagcaggcaagtgaagacgaatttaatcgcgcgttaaatatcgcttttgataatcgcctgggcttatgcaaggttgagagcgcgcgtcaggtgttcccactgacggggcgttatgcgcgccagtttgcctcgcaccgtctggcgctggtgggcgacgccgcacataccattcacccgctggcggggcagggggtaaatctcggctttatggatgctgcagagctgattgccgaactgaaacggttgcatcgtcaggggaaagacatcgggcagtacatttatctgcgtcgctatgagcgtagccgcaagcacagtgcggcgttgatgctggctggcaggcatcacccgctacgcaatttccagctcactgcatttcagcacagcactcatcagccatccaacacatcatttttcaatatccagacaaacctggcatttaccaccaatgggacctggacctgggagcaagacttggcttacgcccaagattcccgggcagaacgggttaaacatccgctatttatcagtctgctgattatcacgttgtcgtttatcccgatcttcaccctggaagggcaggaagggcgtctgtttggcccgttggcgttcaccaaaacgtatgcgatggcgggtgcggcgctgctggcgatcgtagtgatcccgatcctgatgggctactggatccgtggcaaaattccgccggaaagcagtaacccgctcaatcgctttttgattcgtgtttatcatccgctgttgctgaaagtactgcactggccgaaaaccacgctgctggtggcggcgctttcggtgctgacggttctctggccgctcaataaagttggcggggaatttttaccgcagatcaatgaaggcgacttgttgtatatgccatcgacgctgccggggatttccgcagcagaggcggcgagtatgctgcaaaaaaccgacaagctaattatgagcgtacctgaagtggcgcgggtatttggcaaaaccgggaaagcggaaaccgccaccgattctgctccgctggagatggtagaaacgaccatccagcttaagccgcaggagcagtggcggccaggcatgacgatggacaaaatcattgaggaactggataacaccgtgcggctgccggggctggcgaatctgtgggtgccgccaattcgtaaccgtatcgatatgctctcaaccggcattaaaagccccatcggcattaaagtttccggcactgtgctggcggatatcgacgcgatggctgagcaaattgaagaagtagcgcgaacggtgccaggcgtaatttctgagcttgacgagcggctggaaagtaccgagctagaagtcgtatccaacagcgcgcggttctggcagagtcgggttgaatgcggcgttttcagcgtagctgccactgaaaatacgaccgtctttacattccagcgcgacaccgcttggcgacttactgtaaggcatgtgcgaacggtttgccgccgcaatcaataccgctaccggcgctcagaccaacgcctgccataa

SEQ ID NO: 124878 - DNA, 2458 bp, Homo sapiens
cgacgggatcgatcatccgaaggtattgagttatctcgatgtactgcgcgacaaagcgccggttggcaacaaagttgccatcatcggttgtggcgggattggttttgatacggcgatgtatttaagtcagccgggcgaatccaccagccagaatatcgccgggttctgtaatgaatgggggatcgacagtagcctacaacaggctggtggcttaagcccgcagggaatgcagatcccccgtagcccacggcagattgtgatgctccagcgcaaagccagcaaaccaggacaggggttaggcaaaaccaccggctggatccatcgcaccaccctgctctcgcggggtgtgaaaatgatcccaggcgtaagttatcagaagattgacgatgacgggctgcatgtggtgatcaacggcgaaacgcaggtattagcagtggacaatgtggtgatctgcgcagggcaagagccaaaccgcgcgctggcgcaaccgctgattgatagcgggaaaacggtgcatttaattggcggctgcgatgtggctatggagctggacgcacgacgggcaattgcccagggaacacggctggcggacctgcaggcagcaagtcaaggcacttgcattgatgaccaggatatcactatcgatacttatgaattcactactgactatctggagaatcccacctgtggtgaaaaagtagtggaagagacgcttgtcagccacctgctgaaatcaaactgcctgatcacccatcaaccagattggggttcgctccaaattcagtatcgtggacgccaaattgacagagaaaaactgctgcgttacctggtctcattccgtcatcacaacgagttccacgaacagtgcgtggaacgcatctttaatgacctgttacgcttctgccagccagaaaaattgagcgtttacgcacgttatacccgtcgtggcggtctggacattaacccgtggcgcagtaatagcgattttgtcccatcgaccacaagactgctggaagtggatatgcttaaacgcaccgccagcagcgacctctatcaactgtttcgcaactgttcacttgccgtactgaactccggtagtttgaccgataacagcaaagaattgctgtctcgttttgaaaatttcgatattaacgtcttgcgccgtggggggggcagtatgctaaacatcgtactttacgacccagaaattccgccaaatactggcaacatcatccgtctttgcgctaataccggctttcgtctgcatatcatcgaaccgatgggatttgcctgggacgataagcgcttgcgccgcgcggggctggactatcacgagtttaccgccgttacgcgtcatcatgactatcgcgcgttcctcgaagcagaaaatccccagcgcctgttcgccctcaccacgaaaggtacacctgctcacagcgccgtaagctatcaggatggcgattatctgatgttcggcccggaaacacgcggcctgccagcgagcattcttgatgccctgcccgctgaacaaaaaattcgcattccgatggtgccggacagccgcagcatgaatctgtccaatgcggtgtcggtagtggtgtatgaagcctggcggcagttggggtatccgggagcggataccggggcgtatcacatcattccgtggtcttcgataaccacctttgctaactttgtccgcggcattgtttcggtggtggcaaattatgatgttgatcgccatgaagatgctgataaagccaatcaggcactgaaagatgcggtagcggaattaatggaaaacgaagaaattcgcgggctgattattggtgaaccgaattttgccgggattgtcggcttaagcaataccgcgtttacactgcgtgtttcgttcaccacgctgccactcaaacagtggacgagcgacctgcaggcacattgccttggccgcaaatccaaaagaatatcccactcgaagacgaccagggcagtcacttccgtctggtggttcgtgatactgaaggccggatggtctggcgggcatggaactttgagccggatgccggtgaaggtcttaaccgctatatccgcacctcaggcatccgtacagacacggccacccgctgatcgcgaagcatttacccgcattcacctccccgaacacactttatatccccatacgccagccatcgccgctggcgtttttattgacggagacatacccatgacaacacagacgcagcacgacctcgcacccgctaaccaacccgaatttgaactgaccgtcacgccggtccccgatgaacagcgtatcgatttctggccacagtactttggcgctatcccgcagtggctactcctggagccgcatatcttcgcctggatggaccgcttctgtgagggctacagcggtgtatctggtcgttctacggggtcctcaagaggcgacctgcaggcatga

SEQ ID NO: 124879 - DNA, 1317 bp, Homo sapiens
atgctagctgactgcaaaaactttgattcgtcagacctgatttccgacctcgcgggcgattgccaacgtcaacggcaaatcagctgcggtagtttgctcaaccggacacgccagcgctattgttcccgtcaatcggcccttgctgtcaaacaacggcgttgcacaaaaggcccagttccagagtacctgtttgaaatgttgatcggccatcgtttgcggatcgccattacggctgagaatgcaggcggtttcatcgaggataaacagcgcacactctcgcggtgccatatattcccaggcatcttccagcgcagcctgcccgagcgtcagcatcgctttcttacgccgataaatagaagcaaatgtcagttgatacgaaccctgctaagtaccctgtgtactccaaaatgtggtccaggattcaagcatcggattgttctgtgcaagagcagtgacctttctaagacattcccagctgcacaatgtccagaggaaagcaaacctcctgtccgcatccgctgcagtttgggccgctgccctcctcctcgctgggtcacaggagactggggccagtcgactctagagatccccgacctggtcgaagacggcgggacttttgccgaaacggtagagctggcgcaggccattgaagcggcgggcgcgaccattatcaacaccggcattggctggcatgaagcacgtattccgaccattgccacgcccgtgccgcgcggcgcatttagctgggtcacgcgcaaactgaaaggccacgtctcgctgccgctggtaaccaccaaccggattaacgatccgcaggttgccgacgatattctctcgcgcggcgatgccgatatggtatcgatggcgcgaccgtttcttgctgatgcggagctgctgtcaaaagcgcaatcgggacgagccgatgagatcaacacttgtattggctgcaatcaggcctgtctcgatcaaatcttcgttggcaaagtcacctcgtgcctggtgaatcctcgcgcctgccacgaaaccaaaatgccaatccttcccgccgtgcagaaaaaaaatctggcggtggtcggtgcgggacctgctgggctggcgtttgccattaacgcggcggcgcgtgggcatcagatccccggcaaagaggagttgtacgaaacgctgcgctattaccgccggatgatcgaagtgacgggcgtgacgctaaaactcaatcacaccgtgacggcggatcagttacaggctttcgatgaaacgatcctcgccagtgggatcgtgccgcgcactccgcccatcgacgggatcgatcatccgaag

SEQ ID NO: 124880 - DNA, 2055 bp, Homo sapiens
atggaatttattggtgcgacaatgcagcaaaccgtcatgccgaacaaagcgcgatcagccacgcctggatgcctttgggccgaagatctggagattaaaaccctgctgatggacgaacaggattcacgctttgcgcgaccggtgaagcgctttcttcagcaacgattgcggccgcagaacgtcgccaagccttacaagaaggttgcgacgatattctctcgacggcgatgccgatatggtatcgatggcgcgacgtttcttgctgatgcggagctgctgtcaaaagcgcaatcgggacgagccatgagatcaacacttgtattggctgcaatcaggcctgtctcgatcaaatttcgttggcaaagtcacctcgtgcctggtgaatcctcgcgcctgccacgaaccaaaatgccaatccttcccgccgtgcagaaaaaaaatctggcggtgtcggtgcgggacctgctgggctggcgtttgccatttaatatcgccaaacagatccccggcaaagaggagttttacgatacctggctattaccgccggatgatcgaagtgacgggcgtgacgctaaaactcaacacaccgtgacggcggatcagttacaggctttcgatgaaacgatcctcgcagtgggaatgtgccgcgcactccgcccatcgacgggatcgatcatccgaggtattgagttatcccgatgtactgcgcgacaaagcgccggtttgaacaagttgccatcatcggttgtggcgggattggttttgatacggcgatgtattaagtcagccgggcgaatccaccagccagaatatcgccgggttctgtatgaatgggggatcgacagtagcctacaacaggctgattgtgatgctccagcgaaagccagcaaaccaggacaggggttaggcaaaaccaccggctggatcctcgcaccaccctgtctcgcggggtgtgaaaatgatcccaggcgtaagtttcagaagattgacgatgacgggctgcatgtggtgatcaacggcgcaaaccagggcagcgacatgctcaggcttcaaggcgagctagattcagccagtagaatcgggcgacggtctgcggctccgaagttgggaagcctgaacgacggccggtgcttcattaactgccacattctggacaggttaccctataaaggtctggtccccgcctgcagctggaatggaggctctctggaccctttagaaggtcgaccagatgaaccgcatgtggaggtgctgggcatcccaccggccgccatgctggaccaggcgcccaggctcgcaagtactttgaacggctgcctgggggtggctggaccctacgaggacgaaagaactcaggaaggattaccagggccccgggacacggcggctgaagaggtgctgggcgtgcagacgggcggggccgggtcgcgtgggcgggtgcgcgggccacagcccgccgacctaccctccgcttcaggacctggtgctgcatgctggagtatgagcccgccgcccgatcagcccccctgcgtcctggcacacggcttctttcgccgcacgcccaccagcacccaacaacggcccgcagagcagtgcttccactcgcccgcgcccctcgaactgcccctttcaagcaccagctccatcctcagttttgcggaatatggcaacgccatggcctggttgtaccgcgggaaaatattgccaagcggcacgccggacgatttgaaagcacagtcggctaacgatggcaaccccgatcccaccatggagaaagcctttattcagttgatccacgatgggataaggagcatagcaatgagtaacccgatcctgtcctgccgtcgctacgggcgctaccaagaatggtgtttaaccatccctgcggtgttcatcagcgcgccatacgtacggcgttacgtgcgattccacgaacatcaggaaggtggaggtgtacggcaggaagccaccgtgagggagataccgttagcaatcgcggtcataccgaactcgcgaacaccgtgtggatgtagttacccgcagcatcttcgttga

SEQ ID NO: 124881 - DNA, 534 bp, Homo sapiens
gatgcgatggtttcctcctggaaccgcgcagcaccaaacaccatcccgacggcggcaaaagccggtggtaactacctctcttccctgctggtgggtagcgaagcgcgccgccacggttatcaggaaggtatcgcgctggatgtgaacggttatatctctgaaggcgcaggcgaaaacctgtttgaagtgaaagatggtgtgctgttcaccccaccgggttcacctcctccgcgctgccgggtattacccgtgatgccatcatcaaactgggcgaaagaagctgggaattgaagtacgtgagcaggtgctgtcgcgcggaaatccctgtacctggcggatgaagtgtttattgtccggtacgggcgggcgaaatcacgcccagggcgcagcggaaacgggtattcagggttggcgaaaggccgttgtggcccggttaccaaacgcattcagcatgcgttgcaaggcgtttatagctgggtaaccccaggatatttcgagtcggttcgttgtacagcgtacggacattgaatctcg

SEQ ID NO: 124882 - DNA, 576 bp, Homo sapiens
atgttgaagggaaccggcgggggaaaatggccccccggtgtgcgacggcgcaatgctcgatctcaaagcgtggggagcgaatgtcatcaacaactcaccggacgcgataatcagcagattaagcgcagcatctatttgctgccagagcgcgccaagctggcggaactgcgtttgctggtgatccctggccaggtggattatttgcaacacatcgaagaactggcggcgtttatcaagggactcggcgatgttccggtacgcctgaacgcgtttcatgcccacggcgtgtatggcgaggcgcaaagctgggcgagcgccacgccggaagacgttgagccgttggctgatgcgttaaaggtgcgcgggacttgtaggcctgataagacgcgtcaagcgtcgcatcaggcattgtgcgccaactgccggatgcggcgcgaacgccttatccggcctacggttcggcacaaacctgtaggcatgataagacgcgacaagcgtcgcatcaggcattatgcgccgactgccggatgcggcgtgaacgccttatccggcctacggttcggcacagacttgtag

SEQ ID NO: 124883 - DNA, 501 bp, Homo sapiens
tctaacgccactaacggtattgaaccgccgcgcggttacgtcagcatcaaagcgtcgaaagacggtattttgcgccaggtggtgccggactacgagcacctgcacgacgcctatgagctgctgggggaaatgccgggtaacgatggttatctgcaactggtgggtatcatgcagaaatttatcgatcagtcgatctctgccaacaccaactacgatccgtcacgcttcccgtcaggaaaagtgccgatgcagcagttgctgaaagacctgctcaccgcctacaaattcggggtcaaaacactgtattatcagaacacccgtgacggcgctgaagacgcacaagacgatctggtgccgtcaatccagggacgatgggctgcgaaagcggcgcatgtaagaatcctggatatttgagaatgcccggatgccggcgtaaaacgcccttaatcccggccttaccgggcttcgggttttggtaggccccttgataagaaggccgcc

SEQ ID NO: 124884 - DNA, 445 bp, Homo sapiens
atggacagcctcatggacatgctggccagtaccccagggccgccgcatggatgaccaacgtgtgacagtcagcagcctgcccggcttccagcccgtggggtccaaggcctacaaaccgagccgtaggccggataaggcgtttacgccgcatccggcatctcaatatcagatcttacatgcgccgcttgtcgcagccatcgtctctggattgacggcagccagagtcgtctttgtgcgtcttcagcagccgtcactgggtgtgctgagtaatacgagtggttgtgacgccacgaatgttgtaggacggttgcaggataacgcatcggttagcccaggcattgtccacacagacagcgtcatatggcggtcgtgtcaggtgcgtcgtagtgccgtgcacacactctggcggcaaaagacacgtctgttcgacgctgttgatgcgtga

SEQ ID NO: 124885 - DNA, 323 bp, Homo sapiens
atggatctggtgaccgggtcgcgcaaagtgatcatcgccatggaacattgcgccaaagatggttcagcaaaaattttggcgccgctgcaccatgccactcactgcgcaacatgccgggcatatgctggttactgaactggctgtcgtgcgttcgtttgacggcaaaatgtggctcaccgaaattgccgacggaccaacttcacaggctcaaccagctgccacctacagaatccctctatcgaactctagggttcgccgtcgttatcgacatcgctactatcgctacaacctttcaatacgaaaaaagcggcaccgcccattag

SEQ ID NO: 124886 - DNA, 1485 bp, Homo sapiens
ctatccacaaccatgcgaatgtcttctcccgcaccgggcttgatatcggcgcgcgctatctttatgcaacatctgccagagaatctcgaaggggagatagtcgatctcggttgcggtaatggcgttattggtctgacgctgcttgataaaaacccgcaggcgaaagtggtgtttgtcgatgaatcgccgatggcggttgcttccagccgtttgaacgttgaaaccaacatgccagaggcgttggatcgctgcgagtttatgatcaacaacgcgctctccggcgtggagcctttccgctttaatgctgtgctctgcaacccgccgtttcaccaacaacatgcgctgaccgataacgtcgcctgggagatgttccaccacgcccgccgctgcctgaaaatcaacggcgagctgtatatcgttgccaaccgtcacctggattacttccataaactgaagaagattttcggcaactgcaccactatagcgacgaataataaatttgtggtactgccggatgcggcgtaaacgccttatccggcctacgttcagcacgtaactccaggccggataagacgcggcaagcgtcgcatccggcaatgtctgccagttctggaatcgcgcttccataacacgcagaaatcccggggcgagacagagggcgcctcgggcttctcgctccagcaccatctcggggacagctcccgcgccgcaccgggtccctatcgggtcagcactgcagcggcggacagcggcggccgggcgggctcctccgcaccctccgcactggttccgcgcggctgctaaggaccgtccctcgcccccgcgggccgctcccaacgctagcaccgcggcggcggacagctctctccggcggcaccgcgaaccgcgaacaaagccgcgggtctggggcccccagcgcgcctcaatttcttcattagagcgcaatgcgacagccgcatcaacgacatcacgcgttaaatgcggtgcaaaacgctgaatgaaatcatacatataactgcgcaagaaagtactacggcgaaaaccaattttggttgtactgtggctgaagatatcgtgagcatcaacacgcacaaggtcgggatcggcgaccggatccaccgccatgctggcaatgacccctacccccagccctaaccggacgtaagttttaatgacgtcagcatccgttgccgtgaaaacgatacgcggcgttaaccctgcgcgattaaaggcagtatccagttctgaacgtccggtaaagccgaaggtatatgtcaccaacggatattgcgccagttcttcaatggtaatggcttttttgcccgcatgcatatctcgttgtacggcggcagagccaggctttgtagagccctgaagcttacatgagctggagtgtatctcccgaagaaaaagagtacaaaaggataaatgggacaatgaagtccagagtcctagaaaacgagggtccctgaagcttcgggccat

SEQ ID NO: 124887 - DNA, 2049 bp, Homo sapiens
tcagtgctcgttgataatgatgacagtggtagtggcagtggtgatgattacgatgatgaaggcaagagaaacaactgccactaccttttcacaaactttggactttttattatctacactaggtctttcgtgatgagtggtagttatacccagctcaaacttcaggtacactatgactcgacagtcagttctcttcagggcctcaggagggtgtggaaaacgcgaagctcgggatttattcaaactgataccgtagctctcttcatagacaaagagcttgatatcatcaatgtcatcaatatcttcgccgccggtggtattgatttgcagaaactcatcgcctgaagtgtagtagcggaaaatctgactaccgccgcccagatcgatgtggctgacggcggctaccgtaaattcctcacccggcagcgcaatcagcaattcatcttccagcaaacgaaacgctaacgtgtcgagcgtaaagccactattgagatgaagtcccagcggaccacgagcgatagctggcttattatccttgccaaacagacgttttattgctaccgccaattccggcttcggccagcttttcgtcaaggtcgcgaccgtctgcgactttctccaactgtgcggcacatccaagcgagcctgacgttcggcctgacgcgtttgcaggcgttttaaagatttctgcgctgtccgaacgtttaaggtccggatatcgtgtccagcatgggacgcccttggtttttcaatgggtttccccttggggaaaaagattcccccgggaaaaaaatttttaagccccttattggttaacaagcggacttcattgacgccaaggagtttgaacatatcagcgcaaagagtgaagtcgcgctcatcagcggcgaagcctaactggtggttagcctctacggtatcgtaaccttgatcctgcagtgcgtaagcgcggattttattcagcagaccaatgttacgaccttcctgacggtgatacagcaaaataccacggccttcctcggcaatttgcgtcaatgccgcttcgagctggaagccacaatcgcagcgcaagctgaacagggcgtcaccggtcagcgccagttctgttgaacccatatgatccaggatcttctgattctttttcagccccttccgctgatgaatagctttctgatctaatccaccatacagcccctggtaaccatgattctgaaatatggcgaaatcagtagctgtcgctaccccagcttgctgtgctgcctcaaccaattgtttgttatgttctttcaactcatttctcagaaacagacgcttttcgtcttcacgaagttgcttaaatgcttcatcgtcagcaagctcctgccgtcgggtctggatagcaaaataagtctgccctgccgcaatgaccggtttcgcagggtcgccgttttgtactgcagtggtgacatttcccgacatcacaccgctgttatggatattaatgtgttgacttgccatattaatggcagagtcggaaccgaaagcaatttccccccccacgatatccgtcgtaccctgatacgccgcggaatcgttgttaagagtcaggatcccggtacccagttttgtcacatcaccgctaccgctgatactgtgcgtcatcgcccagctacgctcagtggagatggtgagcaggccattattgataacggaagcatcacccaggtttttctgctcgttgacgctgagcgcgctgcctgtatcaatgttgaattgccccacaaagcggctattatcgccatccaactctacatctgtcctggcggttgcgctcacgatacccttcccgcttatgctattacgcagttcgccagtcacgttttttagcgttaacagaccgtcatgggcaatatttcctctgcctaacccctgagtattatcgaggctgacttccgcatttgggctaatgctggttaacgcatggtagcgggcattaagccctcgatagccagggtccccctggtacttcaggtttccgcactggaagtccctgaacaatgctaccgccat

SEQ ID NO: 124888 - DNA, 1746 bp, Homo sapiens
atgccaaaaccaaatacacgctggagcgcgtgggggttgagacgtttaaagcggaagtggagcgtcgcgcggggatcaaatttgaaccgatccgtccaatatgagttcaccggacgaggcgatcgtattggctgggttaagggcattgatgataactggcacctgacgctgtttatcgaaaatggtcgcatccttgattatccggcgcgtccgctgaaaaccggcctgctggagatcgcgaagatccacaaaggcgatttccgcattaccggcgaaccagaatctgatcatcgccggtgtcccggaaagcgagaaagcgaagatcgagaagatcgccaaagagagcgggttaatgaatgccgtctcgccgcagcgtgaaaactcgatggcttgcgtgtcattcccgacttgcccgctggcgatggcggaagcagagcgtttcctgccgtcttttatcgacaacatcgataatttaatggcgaaacatggtgtcagcgatgagcatatcgtgatgcgtgtaacaggctgcccgaacggttgtggtcgcgcgatgctggcggaagtgggcctggtgggtaaagcgccgggtcgctacaacctgcatcttggcggcaaccgcattgggacacgtatcccacaaatcacgcgccggatcgagcaccgggcgaatgatgcccgcacgcaccgtaaagtcgccgaagccttcacccgcttcgcgctctttcgcccagcgccctatcagttcatcaagcgacgccaggatttccggctcgtgatgttttcaatatacatgccggtaccgagctgatctgcttcatcacgctgacgccagaaatcagtcagcggtcccatggtaaaagcagcaaacgcgttttctcttgtttcccagtctttttgctgctgaaacatcggcgtattgtggcacaaaaatatgcggaactggcctatgacctgttccatttggggtttgatgtcttaatcatcgaccatcgcgggcagggacgttccggtcgcctgttagccgatccgcatctcgggcatgttaatcgctttaatgattatgttgatgatctggcggcattctggcagcaggaggttcagcccggtccgtggcgtaaacgctatatactggcacattcgatgggcggtgcgatctccacattatttctgcaacgccatccaggtgtatgtgacgccattgcgctaactgcgccaatgtttgggatcgtgattcgtatgccgtcatttatggcacggcagatcctcaactgggccgaagcgcatccacgtttccgtgatggctatgcaataggcaccgggcgctggcgcgcgttgccgtttgctatcaacgtactgacccacagcagacagcgatatcgacgtaacttacgcttctatgctgatgacccaacgattcgcgtcggtgggccgacctaccattgggtacgcgaaagtattctggctggcgaacaggtgttagccggtgcgggtgatgacgccacgccaacgcttctcttgcaggctgaagaggaacgcgtggtggataaccgcatgcatgaccgtttttgtgaactccgcaccgccgcgggggtaccgagacgatggtatacaacaggaggtttttccgatgcttatctttatcccgattctcatttttgtcgcgctggtcattgtcggcgcgggtgtcaaaatcgtaccgcagggctatcagggtttacgccgtctattactctagatagagagtaa

SEQ ID NO: 124889 - DNA, 1004 bp, Homo sapiens
atgcgctttgacatgatgggttttctgcgcgggctggattgcggtaagaacggtgaaaccactgtaatgataggcaattcaggtaataaaaaagccggagctccctttccggcacgtctcattgccgtatcacttcctcccgaaaaagcattaatcagtaaaacccgactgctcagcgagaatcgtcgaaaaggacgagtagttcaggcggaaacgctggaagcagcgggccatgtgctattgctaacatcattaccggaagatgaatattcagcagagcaagtggctgattgttaccgtctgcgatggcaaattgaactggcttttaagcggctcaaaagtttgctgcacctggatgctttgcgtgcaaaggaacctgaactcgcgaaagcgtggatatttgctaatctactcgccgcatttttaattgacgacataatccagccatcgctggatttcccccccagaagggcggaaatcactattgctgccgatggcacaatctcggcgctcaatccgggcgatccggcaaatacggttgcgccagtagggcgtcttaaactggtgaaagccacgggcagcgaagtgcagcgcggtgacgacggcatttttcgtttaagcgcagaaacccaggccacgcgtgggccggtactgcaggcagatccaaccttgcgtgtgatgtcgggggttctggaaggcagtaacgtcaatgccgttgcggcaatgagcgacatgattgccagcgcgcggcgttttgaaatgcagatgaaggtgatcagcagcgtcgatgataacgcaggccgtgccaaccaactgctgtcgatgagttaattgaaaggatacatgacaagtataagttgcccgatgcgcaagtttatcgggtctatgggggcaatcgcaatttatcgattttgcgagcacttgtaggccggataaggcgtttacgccgcatccggcaagaagacatatgcactttgtcaataatccactacaggacattttat

SEQ ID NO: 124890 - DNA, 862 bp, Homo sapiens
atgaacttatcaaaccacgataccgtgacgacacatacccgcaactatgaatcgccgcagattacgacgatatacagcaattacggacatgacaaccctactaacctgggaaccccgcgatttccgaggggttaccctgccaaattggcaggctgcccatttccgaaggcccagtggcacgttaaggacccgaggtggaccttggaggtcccgcgcgtgttgtggggtagctggggggttggacttggaggtgggggtcacgtcgcggttcggacgcgcgtgggcctgccggggatgtcgggggtgcccaggttggttggggttggctctcggggggacagattaaatcgagctcggtacccgacatcacacgcaagtaccggcccacgcgtggcctgggtttctgcgcttaaacgaaaatgccgtcgtcaccgcgctgcacttcgctgcccgtggctttcaccatttaagacgccctactggcgcaaccgtatttgccggatcgcccggattggcgccgagattgtgccatcggcagcaatagtgatttccgccccttccggcacagcaattggcccagcctcgcctatcaccggatgcccctgaattgtcagttgcccggtgggatcaacctgaatgctgccattacgcgtatacccttcgctgccgtcagcggtctgcacggccagccagccatcctgctgcaacgcgacgtccagcgggcgcgagagaaagcccttccctggcaccgcgcgtaaagcattcaactgcgcgcgaaaaccgggcgttgagcattggccagattactggcggttaccgcctgttgattcagtgtctggcggctgctcccatcgcggtataa

SEQ ID NO: 124891 - DNA, 678 bp, Homo sapiens
atggagattgtaattccggaagttgcaagtatgttggctgccaagaccccatttgcgcccgtggtggacatgcaagccgcgttggtttggatcctgcctgcgcgtcttcctgctgagcgagtgattgtgatgtatgggattacgcttgtggtcggcgctgggtgtcgcattctttggctggcctttatcaccagcctacaggctaaacgcggctggatgcgtattgtgccaattattctgctggcagcggcattggttagcgtgcgcccacttcaggattgggcatttggtgcgacgcataccgcgcaaactcagacgcatctcaactttacacaaatccaaacggtagatgagttaaatcaggcgctcgttgaagcccaaggcaaaccggtgatgttagatctttatgccgactggtgcgtcgcctgtaaagagtttgagaaatacaccttcagcgacccgcaggtgcaaaaagcgttagcagacacggtcttacttcaggccaacgtcacggccaacgacgcacaagatgtggcgctgttaaagcatcttaatgtccttggcctaccgacaattctcttttttgacggacaaggccaggagcatccacaagcacgcgtcacgggctttatggatgctgaaaccttcagcgcacatttgcgcgatcgccaaccgtga

SEQ ID NO: 124892 - DNA, 1416 bp, Homo sapiens
gggatggcgctgacctacacggcgctgggtctggtggttgccgccgcagggttacagttccaggcggcgctacagcacccatacgtgctcattgggcctcgccatcgtctttaccttgctggcgatgtcaatgtttggcttgtttaccctgcaactcccctcttcgctgcaaacacgtctcacgttgatgagcaatcgccaacagggcggctcacctggcgcgcgattctgctgtatatcgcccaaagcgggaacatgtggctgggcggcggcacgctttatctctatgcgttgggcatgggcctgccgctgatgctaattaccgtctttggtaaccgcttgctgccgaaaagcggcccgtggatggaacaagtcaaaaccgcgtttggttttgtgatcctcgcactgccggttaatatcgcaccgggatcgctcgataaagcgctcaatcagtatgccgcacacagcggatttaccctctcggttgacgccagcctgacgcgcggcaagcagagcaacggcctgcacggcgattacgacgtcgagagcggcctgcaacaactgctggacggcagcggactgcaggtaaaaccgctgggaaataacagctggacgctggagcccgcgcccgcaccaaaagaagatgccctgaccgtggtcggcgactggctgggtgatgcgcgtgaaaacgacgtatttgaacatgctggcgcgcgtgacgtgatccgccgtgaggatttcgccaaaaccggcgcaaccaccatgcgtgaggtacttaaccgcatccctggcgtcagcgcgccggaaaacaacggcaccggcagccacgacctggcgatgaactttggcatccggggcctgaacccgcgcctcgccagccgctcgaccgtcctgatggacggcatcccccgtccccttcgccccttacggtcagccgcagctttcactggctcccgtttcgctcggcaacatggatgccattgtacgtggtacgcggtggtggtgcggtgcgttacggacacgcagagcgtgggcggcgtggtgaactttgttacccgtgccattccgcaggactttggtatcgaggcggggatccttatgagcgaccttaagcatgggtcgctcgtgggcgcttgtttggggcggcttgggccgggggcggtgttgtatctggccgtggcggtgttgggtgtgcgcgtgcggcgtggggtagtgcttgtgtgtccgttgggaggcaccggcttgggttacagttgccaagggggagcgttccagtttgcagcctcttgctttcttggacggtacggcgtcgtccagggggtgatccatgtctgttttggtcctcgatcggtattcctcgacgactgtttacggttcgacttaccttgtctggtatggctcagctgtcctcgttga

SEQ ID NO: 124893 - DNA, 910 bp, Homo sapiens
ttgctcaaaccgtttcacgtgatagcaatcgccacagggcggtcactggcggtgttttgtatggggcgattgcggactatctgttcacatgccacaccgcccgctagcgcgattctctgtatatcgccaaagcggaacatggggtgggggcggcacgctttatctctatgcgttgggcatgggcctgccgctgatgctaattaccgtctttggtacccgcttgctgccgaaaagcggcccgtggatggaacaagtcaaaaccgcgtttggttatgtgatcctcgcactgccggtcttcctgctggagcgagtgattggtgatgtatggggattacgcttgtggtcggcgctgggtgtcgcattctttggctgggcctttatcaccagcctacaggctaaacgcggctggatgcgtattgtgcaaattattctgctggcagcggcattggttagcgtgcgcccacttcaggattgggcatttggtgcgacgcataccgggcaaactcagacgcatctcaactttacacaaatcaaaacggtagatgagttaaatcaggcgctcgttgaagccaaaggcaaaccggtgatgttagatctttatgccgactggtgcgtcgcctgtaaagagtttgagaaatacaccttcagcgacccgcaggtgcaaaaagcgttagcagacacggtcttacttcaggccaacgtcacggccaacgacgcacaagatgtccctacttcagccccctttatatcgcccccaaacgccttggtggcgatcattgtacagttgcgctttggagacttctataatcgggtctctaagggaagtaggcccacagtgttcggacgtacactcaaggctagaaggattacgcttagtgagaaaagcattttgaaagccaagatacactga

SEQ ID NO: 124894 - DNA, 922 bp, Homo sapiens
tttcgtccggtggccacggccgccgcgctgctggtcggctccagcaccctcttcttcgtgttcacgtgcccgtggttgacacgagctgtgtccccagctgttcccgtctacaatggcatcatcttcctctttgtcctggccaacttcagcatggccactttcatggaccctggtgttttcccccgagcggatgaggatgaggacaaggaggacgacttccgggctccgctgtacaagaacgtggatgtgcgaggtatccaggtccgcatgaagtggtgtgccacgtgccacttctaccgcccgccgcgctgctcccactgcagcgtctgtgacaactgtgtagaggactttgaccaccactgcccctgggtcaacaactgcatcgggcgtcgaaactatcgctacttcttcctgttcctgctgtcactcagtgcacacatggtgggcgtcgtggccttcggcctggtctacgtgctgaaccacgctgaggggctgggagccccgcacaccaccatcacgtatccttggttcctgtgggcctcattgcagaggcgatgtggaccggggacacgttcacccaggagaatgagccttccaaagcttggttccttgccaagggacccccaaggggccaatggcccctccctaagttggcaggggggttagtccaccggaacccgagttgaagctgctctctcttgcgaatcgcctccgcatgcacgacaaagcatgtgctttaacctccacacacatagcatagatcccaaacagtcgcgtcgaccctactcggataatgttgggaaagagtaaacgacataactcgtgatatacctgcatcagttcgacaagcaaccgcactacgagcacgtatagtgacgctgtacgtcctccaccagctccgtcttatcactctgtaccttcc

SEQ ID NO: 124895 - DNA, 699 bp, Homo sapiens
atgctcttggcagcctgcggtgcccacccagccccagcctgcagggcccagcgctccccgccagggcctgcctggacactcccgaggtgcccagcccgcactggtgtccccacacaagggactcaccccggtgcccgggacgccggcacaccgcttcaactcccccagccccagcgggtggagagggactgccatcgcctgcagccggcgccccgcccgcccactgcccggggccccgccagcccccgcgaccgctgcccccgtgcccgggctgtgcgggccctgcccatcgctgcccgcgtgcccccagacgcggcgccgactcacgtgaacacgaagaagagggtgctggagccgaccagcagcgcggcggccgtggccaccgggatgtacttggcggggtgccaggactgtcaccttcctccaccagctgaaccctggagtaaactgccaaatgctgacagtgggaagaagcggaatcaggcctacttgcaccatcgcatcctgcagtgtcaacaagctgcatcctcaaatgcaccctgcaacacagccccaccacaggatggcactgtctcccagccattccgaggggccttctcactgctggggactctcccttggagacatttctcccatccccagatgaaggaagtcagcctggaattttattggaaccccaaatcaaatacagaatgctaa

SEQ ID NO: 124896 - DNA, 550 bp, Homo sapiens
ggcttctcaacactcaatcttttccctgttctcttatgcagctcttgcaggaggctaccatgagctctctctggtgctcagggactggagatgtcatcgaggactggtgtcgatgtgactccactgcttttggaagttgtgtccctgtttcatgttccttcctgtctgcacacaggctgagactctccacggttcacgagcccagcagcactcttgtggtcctggagtgggaacactcagagccaccaatcggggtgcagattgtagattacctcctccgtcaagagaaagtcactgacaggatggaccactccaaagtggagacaggtgagcaccttctacttcatgggcttgtcttgatccaaggtgataaaactaaaacaaagaaaaatgccctgcctcatggctttgctccaggtccccagtatcccagggcaatgcaggaggagcagggagaagaagaagctgttcttcttctccaggaagcagctgttcttctgccactgagggttagagacatacgcagctgctgcttcaggcatagagagct

SEQ ID NO: 124897 - DNA, 1155 bp, Homo sapiens
cttgtgcctggtgatgatcctgtatactcgccggcgctggtgcaaacgccgccgggtcccgcagccccagaagagtgccagtgctgaggcagccaatgagattcactacattccttctgtgctgatcggcgggcacggacgggagagcctgcgcaatgcccgcgtgcagggccacaactccagtggcaccctgagcatccgggagacacctatcctggacggctatgagtatgacatcactgatctgcgccaccatctgcagagggagtgcatgaacggaggggaggactttgccagccaggtcacgcgcaccctcgactccctgcagggctgcaatgaaaagtcggggatggacctcacaccaggtggggatgggagaaaggcaaggctgatgaacaagtataaagataatattatagccactagccctgtggactccaaccaccagcaagccacccttctctctcacacctccagcagccagagaaagcggatcaacaacaaagcaagaggtatgcatgtctgacattagggcgaaggggattctggcacagaggcagaaaacgacccccagctgaccttttacacggatccttcaaggagcaggaggcgtagtagaggtaggaatgatagaggtggcagaaataagaccaccttgaccctgatcagcatcaccagctgtgtgattggcctcgtgtgctcctctcacgtcaactgccctctcgttgtcaagatcaccctgcatgtccctgagcacctgattgctgatggtgagcctgttcttctgaggatggggagccagctggatgccagtgactggctgaaccctgcccaagtggttctcttctctcagcagaactccagcggaccctgggccatggacctctgtgcccggcggctcctggacccctgtgaacaccaatgtgaccccgaaactggtaggcgggagcaccgggcagcgggtaactgtcagagagatcatgccagggcacactctgtctggctgggctctcctccgtaccatgacacgtctctccgttggagtcctatgtacaccaccatggagtcggcgcctcatgcgttcccaccatctgtcacagcagatgcagagactgtaacacttctagcttaggagggcatccaacacccttgtgg

SEQ ID NO: 124898 - DNA, 4229 bp, Homo sapiens
cccacgcgtccgggccggggctcaagatggctttagccgggctctgcgccctgctcgcctgctgctgggggccggcggcggtgctggccacggccgccggcgacgtggatccatccaaggagctggagtgcaagctcaaaagcatcacggtgtcggcactgcccttcctgcgcgagaacgacctgagcatcatgcacagcccctcggcctcggagcccaagctcctcttctcggtgcgcaacgacttcccgggagaaatggtcgtggtggacgacctggagaacacggagctgccctacttcgtgctggagatctcagggaacacagaggatatccctttggtgcgctggaggcagcagtggctggagaatggcactttgctttttcacattcatcaccaagatggtgccccaagccttcctggacaagaccccactgaagaaccccaacatgagtcggcagaagaggagctgaggatcctccacatctcagtcatgggtggcatgatcgctctgctgctgtccatcttgtgcctggtgatgatcctgtatactcgccggcgctggtgcaaacgccgccgggtcccgcagccccagaagagtgccagtgctgaggcagccaatgagattcactacattccttctgtgctgatcggcgggcacggacgggagagcctgcgcaatgcccgcgtgcagggccacaactccagtggcaccctgagcatccgggagacacctatcctggacggctatgagtatgacatcactgatctgcgccaccatctgcagagggagtgcatgaacggaggggaggactttgccagccaggtcacgcgcaccctcgactccctgcagggctgcaatgaaaagtcggggatggacctcacaccaggaagtgacaatgccaagctgtcactgatgaacaagtataaagataatattatagccactagccctgtggactccaaccaccagcaagccacccttctctctcacacctccagcagccagagaaagcggatcaacaacaaagcaagagctggttccgccttcttgaaccctgaaggggattctggcacagaggcagaaaacgacccccagctgaccttttacacggatccttcaaggagcaggaggcgtagtagagtgggttctccccgaagtcctgtgaataagaccaccttgaccctgatcagcatcaccagctgtgtgattggcctcgtgtgctcctctcacgtcaactgccctctcgttgtcaagatcaccctgcatgtccctgagcacctgattgctgatgggagccgcttcatcttgctggaggggagccagctggatgccagtgactggctgaaccctgcccaagtggttctcttctctcagcagaactccagcggaccctgggccatggacctctgtgcccggcggctcctggacccctgtgaacaccaatgtgaccccgaaactggtaggcgggagcaccgggcagcgggggaatgcctctgctatgaaggctacatgaaggatccagtacataagcacctttgcattcggaacgaatgggggacaaaccaggggccatggccttacacaatatttcagcgaggctttgacctggttttgggagagcagccctctgataaaatatttagattcacctacactcttggggagggcatgtggttgcccctcagcaagagctttgtgattccaccagccgaactggccatcaatccatcagcaaagtgcaagacggacatgactgtgatggaggatgctgtggaggtcagagaggagctgatgacttcatcctccttcgacagcctggaggttctcttagattcctttgggccggtgcgcgactgcagcaaagataacgggggctgcagtaagaatttccgctgtatttcagatcgcaagctggactccactggttgcgtgtgcccatctgccctgcaagctagtgaaggacagctctggctgctatgaccgccacatcggggtggactgttccgacggcttcaacggcggctgtgagcagctgtgcctccagcagatggcgcccttcccggacgaccccaccttgtataacatcctcatgttctgtgggtgcatcgaggactacaagcttggtgtggatggacgctcttgccaactcatcacggagacctgtccagagggaagtgactgtggggaaagcagggagcttcccatgaaccagaccctctttggggagatgttctttggttacaacaaccattccaaggaagtggctgccggacaggtgctgaaaggaacattcaggcaaaacaactttgctcgtggtttagaccagcaactgccagatggtcttgtggtggccactgtgcccctggagaatcaatgcctagaggagatctcggagcccacccctgaccctgacttcctgactgggatggtgaacttcagtgaagtgtctgggtaccctgtgctgcagcactggaaggtccggtctgtgatgtaccacatcaaactcaaccaagtggccatctctcaggccctcagcaatgctctccactcgctggatggggctacatctcgtgcagattttgtggcgctgttggaccagttcggcaaccattacatccaggaagctatctacggctttgaggagtcctgttctatctggtacccaaacaagcaggtccagcggcgactctggctggagtatgaagacatcagtaaaggcaactccccatcagatgagtctgaggagcgggaaagagaccctaaggtgctgacattcccagaatacatcaccagcttgtcagactccggcaccaagcgcatggcggctggagtccgcatggagtgccagagcaagggacgatgcccctcgtcctgccccctgtgtcatgtgacatccagccctgacacccctgctgagccggttctgctggaggtgaccaaagcagcccccatctatgaactagtgaccaacaaccagacccagaggctcttgcaggaggctaccatgagctctctctggtgctcagggactggagatgtcatcgaggactggtgtcgatgtgactccactgcttttggagctgatggactccccacctgtgcgcctctcccacagcctgtgctgagactctccacggttcacgagcccagcagcactcttgtggtcctggagtgggaacactcagagccaccaatcggggtgcagattgtagattacctcctccgtcaagagaaagtcactgacaggatggaccactccaaagtggagacagaaacagtgctgagctttgtggacgacatcatctctggagcaaagtctccttgtgcaatgccatctcaggtgccggacaagcagctcaccaccatctctctgatcatacgatgcctggaacctgacaccatttacatgttcacgctgtggggagtggacaacacaggacggcgctccaggccaagcgacgtgatcgtgaagaccccatgccccgtggtggatgatgtcaaggctcaagaaatagcagacaagatctacaatctcttcaatggctacactagtgggaaggagcagcagaccgcctacaacaccctcctggatctgggttcccccaccttacaccgggtcctctaccactataaccagcactatgagagttttggggaattcacctggcgatgtgaggatgagttaggtcccaggaaagctggtctcatcctttcccagcttggggacctcagcagttggtgcaatggactccttcaggaacccaagataagcttgcggcgcagctcactcaagtacctggggtgccgctacagcgagatcaaaccctacggacttgactgggcggagctcagccgggacctcaggaagacgtgtgaggagcagaccctgagtatcccctacaacgactatggggacagcaaagagatctagcaccataaggccagggagctgctgccagaatgaagtaggaaagaggagggatccatctgggttggtctgtggatttttaatattttttaatggaacatgaaaacctccacagcaacatcgaaaccagggagaaagtgatccttgctccctgtcagaacttcttcagtatgatgtttctccatctgcattgattggggaaatctgccaagccagtggtttcatgcagtgccatatttctttagaggattactttggggtttgctttgccattaatttggtccattcattttttt

SEQ ID NO: 124899 - DNA, 443 bp, Homo sapiens
cggcacgagggcaggaatgacagaagcagcagcgagagcccttcagaggaccgcgaaacgcgaactcccgccccctcaaacccaggacattcagtgtaaatgactgtgagcctcaggctggaaagatcgtttcccttcccagctagaaagactcatccatcaggctgtgtcagacgcacctgagccctccaggggtggtcaaagaatctgcatcacagaagatatccagttgggcaagaccccgcctccctgacaggtggcacaggagggtggttggagcaggagggtgggaagtgatacgtggatcttggaagaacagcctggctctaccactcgccgtgtgtctgtgggtatgtgagtccccactctgtgctgtggcctcctcatgcagagaaaggagctgataaaagtcaccgagttaaacttaaaaaaaaaaaaaaaaa

SEQ ID NO: 124900 - DNA, 779 bp, Homo sapiens
agaaatgagccccccgtgcctggctcaaagttcattcttacactttgctcagtaaaggaagaccctcttgtgcagcaggttttgttgtggtggtggggtgtgtgtgtatgcatgtgcctgtggccataggtgtaaaaatgtctccaagcactattgctgtcagaggactccatgtcactaagcatcctgctaagagcactgtgagctcttctgggtcttttctgagtcatcctctcctcctttgatctcatcaagcatggtatccttttggaaatatcagacagcatccaatttagaggatgcaagaggtccagaattcccgagctgggaggcttagaagagttgtggtgaccaggtgactgccgccaaccacgtcctgtggagagctgtgtcgacacctgcagccaggctctctgggcagccttgtgtccaaacaccagctcagaggcagcaggaagacgctaactctgcgttccggaaatgtcacctgctcagtgtttgggaagggaaacctctcaagatctaacggggtgatcaggtagcagactctagtcagaagaagcaacttgcagctgatgcccatacaccctacaggggaggagacatttgagatgggtgagataagaaaagtcctcaaggtagttaaaaccagtcccaaccaaatgtcggtctaaaaggaaggaaaccaacatttgctaaatgcctactatgtgccataagctttcacaggtaagaaaagattttttaaagtatgttttaaaaaaggaatattcctcgaa

SEQ ID NO: 124901 - DNA, 1320 bp, Homo sapiens
atgagtggaagcttcctgaagctctcaccagaagcagatgctggcaccatgcttcctgggcagcctgcagaactggcaacaccacactgctggaaaagggaaagggttcttggaacatgtgcttttggtgaacagctggctgcctctgggcacatgaaagaaacccgcgctgaccgcagcaagaagcttttcaggcactacaccgtgggctcctatgacagcttcgacacttccagaggtgggagggtccggaagccctacgctgggttcttccccgacctccaggatatctgtgatgagcagcccagacccctgcactcgactcttagacctgcctgtggagggatccaacctggcaaacaacagcccatgccttttgccaagaccgacacctgtgcctcagacaaacacgtggagaagaagctagaaagactcatccatcaggctgtgtcagacgcacctgagccctccagggtggtcaaaggaatatttattggtggcctgccatgtgctcggctctgggtggtcccttatctgatggggcatgtgcaggaagtgactatggcagagggttatgagcgggcatcacaggcaactttcagggagcagatgcaggaggtgccctgttgtcttcagaggtctaccgggtcatccatgaagacagggaataaaatacgtagagttaccgacaatgtgctgacaagaagtgggcctttgataaatgacattctcagtgttgctgtggatagcagtgtttctgtgttgatatggatgcatcttttctcctcgcatcctcttgggatcgtgcggtattgggggtgtatgggcatcagctgcaagttgcttcttctgactagagtctgctacctgatcaccccgttagatcttgagaggtttcccttcccaaacactgagcaggtgacatttccggaacgcagagttagcgtcttcctgctgcctctgagctggtgtttggacacaaggctgcccagagagcctggctgcaggtctaggagagacagtttcacccatagagtattttatagtgttacaccaacctctggagatgtccctggatcacatccattttgtgataaaccagttagacgaggtgatgacccctacatcagaaatgaccgtggcactttgtacagtactctacagtttataagcacgtgtgtgcaggtagtcggtgtttatgggcatctcccaggttttaaatcagacgccgctcaggctgtgcccaggctgctgagccaaaagcgggatcagaaccacaaggaggaagaaattactgatggggatgaaagaccgaaataa

SEQ ID NO: 124902 - DNA, 5976 bp, Homo sapiens; identical to SEQ ID NO: 119514
  misc_feature (1)...(5976): n = a,t,c or g

SEQ ID NO: 124903 - DNA, 3657 bp, Homo sapiens; identical to SEQ ID NO: 120146

SEQ ID NO: 124904 - DNA, 5130 bp, Homo sapiens; identical to SEQ ID NO: 116418

SEQ ID NO: 124905 - DNA, 3819 bp, Homo sapiens; identical to SEQ ID NO: 118066

SEQ ID NO: 124906 - DNA, 3666 bp, Homo sapiens; identical to SEQ ID NO: 116259

SEQ ID NO: 124907 - DNA, 3213 bp, Homo sapiens; identical to SEQ ID NO: 116408

SEQ ID NO: 124908 - DNA, 3357 bp, Homo sapiens; identical to SEQ ID NO: 120163

SEQ ID NO: 124909 - DNA, 5076 bp, Homo sapiens; identical to SEQ ID NO: 118069

SEQ ID NO: 124910 - DNA, 3235 bp, Homo sapiens; identical to SEQ ID NO: 116409

SEQ ID NO: 124911 - DNA, 3300 bp, Homo sapiens; identical to SEQ ID NO: 118070

SEQ ID NO: 124912 - DNA, 4989 bp, Homo sapiens; identical to SEQ ID NO: 120155

SEQ ID NO: 124913 - DNA, 3420 bp, Homo sapiens; identical to SEQ ID NO: 120156
  misc_feature (1)...(3420): n = a,t,c or g

SEQ ID NO: 124914 - DNA, 4374 bp, Homo sapiens; identical to SEQ ID NO: 116411

SEQ ID NO: 124915 - DNA, 4830 bp, Homo sapiens; identical to SEQ ID NO: 120159

SEQ ID NO: 124916 - DNA, 4452 bp, Homo sapiens; identical to SEQ ID NO: 120160

SEQ ID NO: 124917 - DNA, 3693 bp, Homo sapiens; identical to SEQ ID NO: 118073

SEQ ID NO: 124918 - DNA, 3300 bp, Homo sapiens; identical to SEQ ID NO: 118076

SEQ ID NO: 124919 - DNA, 4794 bp, Homo sapiens; identical to SEQ ID NO: 118075

SEQ ID NO: 124920 - DNA, 3316 bp, Homo sapiens; identical to SEQ ID NO: 120164

SEQ ID NO: 124921 - DNA, 3457 bp, Homo sapiens; identical to SEQ ID NO: 120165

SEQ ID NO: 124922 - DNA, 4797 bp, Homo sapiens; identical to SEQ ID NO: 120167

SEQ ID NO: 124923 - DNA, 3384 bp, Homo sapiens; identical to SEQ ID NO: 120168

SEQ ID NO: 124924 - DNA, 3348 bp, Homo sapiens; identical to SEQ ID NO: 120169

SEQ ID NO: 124925 - DNA, 3783 bp, Homo sapiens; identical to SEQ ID NO: 120170

SEQ ID NO: 124926 - DNA, 3723 bp, Homo sapiens; identical to SEQ ID NO: 120171

SEQ ID NO: 124927 - DNA, 3897 bp, Homo sapiens; identical to SEQ ID NO: 120172

SEQ ID NO: 124928 - DNA, 3726 bp, Homo sapiens; identical to SEQ ID NO: 120173

SEQ ID NO: 124929 - DNA, 3783 bp, Homo sapiens; identical to SEQ ID NO: 120174

SEQ ID NO: 124930 - DNA, 3855 bp, Homo sapiens; identical to SEQ ID NO: 120175

SEQ ID NO: 124931 - DNA, 3348 bp, Homo sapiens; identical to SEQ ID NO: 120176

SEQ ID NO: 124932 - DNA, 6136 bp, Homo sapiens; identical to SEQ ID NO: 120177

SEQ ID NO: 124933 - DNA, 3924 bp, Homo sapiens; identical to SEQ ID NO: 120178

SEQ ID NO: 124934 - DNA, 7383 bp, Homo sapiens
atgacaggatcaaattcacacataacaatattaactttaaatataaatggactaaattctgcaattaaaagacacagactggcaagttggataaagagtcaagacccatcagtgtgctgtattcaggaaacccatctcatgtgcagagacacacataggctcaaaataaaaggatggaggaagatctaccaagcaaatggaaaacaaaaaaaggcaggggttgcaatcctagtctctgataaaacagactttaaaccaacaaagatcaaaagagacaaagaaggccattacataatggtaaagggatcaattcaacaagaggagctaactatcctaaatatttatgcacccaatacaggagcacccagattcataaagcaagtcctgagtgacctacaaagagacttagactcccacacattaataatgggagactttaacaccccactgtcaatattagacagatcaacgagacagaaagtcaacaaggatacccaggaattgaactcagctctgcaccaagcagacctaatagacatctacagaactctccaccccaaatcaacagaatatacatttttttcagcaccacaccacacctattccaaaatcgaccacatagttggaagtaaagctctcctcagcaaatgtaaaagaacagaaattataacaaactatctctcagaccacagtgcaatcaaactagaactcaggattaagaatctcactcaaagccgctcaactacatggaaactgaacaacctgctcctgaatgactactgggtacataacgaaatgaaggcagaaataaagatgttctttgaaaccaacgagaacaaagacaccacataccagaatctctgggacgcattcaaagcagtgtgtagagggaaatttatagcactaaatgcctacaagagaaagcaggaaagatccaaaattgacaccctaacatcacaattaaaagaactagaaaagcaagagcaaacacattcaaaagctagcagaaggcaagaaataactaaaatcagagcagaactgaaggaaatagagacacaaaaaacccttcaaaaaatcaatgaatccaggagctggttttttgaaaggatcaacaaaattgatagaccgctagcaagactaataaagaaaaaaagagagaagaatcaaatagacacaataaaaaatgataaaggggatatcaccaccgatcccacagaaatacaaactaccatcagagaatactacaaacacctctacgcaaataaactagaaaatctagaagaaatggatacattcctcgacacatacactctcccaagactaaaacaggaagaagttgaatctctgaatggaccaataacaggctctgaaattgtggcaataatcaatagtttaccaaccaaaaagagtccaggaccagatggattcacagccgaattctaccagaggtacaaggaggaactggtaccattccttctgaaactattccaatcaatagaaaaagagggaatcctccctaactcattttatgaggccagcatcattctgataccaaagccgggcagagacacaaccaaaaaagagaattttagaccaatatccttgatgaacattgatgcaaaaatcctcaataaaatactggcaaaccgaatccagcagcacatcaaaaagcttatccaccatgatcaagtgggcttcatccctgggatgcaaggctggttcaatatacgcaaatcaataaatgtaatccagcatataaacagagccaaagacaaaaaccacatgattatctcaatagatgcagaaaaagcctttgacaaaattcaacaacccttcatgctaaaaactctcaataaattaggtattgatgggacgtatttcaaaataataagagctatctatgacaaacccacagccaatatcatactgaatgggcaaaaactggaagcattccctttgaaaactggcacaagacagggatgccctctctcaccgctcctattcaacatagtgttggaagttctggccagggcaatcaggcaggagaaggaaataaagggtattcaattaggaaaagaggaagtcaaattgtccctgtttgcagacgacatgattgtttatctagaaaaccccattgtctcagcccaaaatctccttaagctgataagcaacttcagcaaagtctcaggatacaaaatcaatgtacaaaaatcacaagcattcttatacaccaacaacagacaaacagagagccaaatcatgggtgaactcccattcacaattgcttcaaagaggataaaatacctaggaatccaacttacaagggatgtgaaggacctcttcaaggagaactacaaaccactgctcaaggaaataaaagaggacacaaacaaatggaagaacattccatgctcatgggtaggaagaatcaatatcgtgaaaatggccatactgcccaaggtaatttacagattcaatgccatccccatcaagctaccaatgactttcttcacagaattggaaaaaactactttaaagttcatatggaaccaaaaaagagcccgcattgccaagtcaatcctaagccaaaagaacaaagcaagaataaagctggaggcatcactattcaaactatactacaaggctacagtaaccgaaacagcatggtactggtaccaaaacagagatatagatcaatggaacagaacagagccctcagaaataatgccgcatatctacaactatctgatctttgacaaacctgagaaaaacaagcaatggggaaaggattccctatttaataaatggtgctgggaaaactggctagccatatgtagaaagctgaaactggatcccttccttacaccttatacaaaaatcaattcaagatggattaaagacttaaatgttagacctaaagccataaaagtcctagaagaaaacctaggcaataccattcaggacataggcatgggcaaggacttcatgactaaaacaccaaaagcaatggcaacaaaagccaaaattgacaaatgggatataattaacctaaagagcttctgcacagcagaagaaactaccatcagagtgaacaggcaacctacagaatgggagaaaaattttgcaatctacccatctgacaaaggactaatatccagattctacaaagaactcaaacaaatttacaagaaaaaaacaaacaaccccatcaaaaagtgggcgaaggacatgaacagacacttctcaaaagaagacatttatgcagccaaaaaacacatgaaaaaatgctcatcatcactggccatcagagaaatgcaaatcaaaaccactatgagatatcatctcacaccagttagaatggcaatcatgaaaaaagtcaggaaacaacaggtgctggagaggatgtggagaaataggaacacttttacactgttggtgggactgtaaactagttcaaccattgtggaagtcagtgtggcgattcctcagggatctagaactagaaataccatttgacccagccatcccattactgggtatatacctaaaagattataaatcatgctgctataaagacacatgtacacagctacgcggcggcggcggagcgcaggcctcgtgccgttacggccatcacggcggccgcagtggcgtcctggagccctcctcaggtagctcttcaacaagcaggcataaacacttctctgatgagggacgcgatggggaaaggctttgttctctgaaaactccctgtaggaactgcctttcttctgagtgtccacttgtgtccggaattggtgggttcttgatctcactgacttcaagaatgaagccgcagaccctcgcggtgagtgttacagttcttaaagatggtgtgtccggagtttgttccttcagatgttcagatgtgtctggagcttcttccttccagtgggttcgtggtcttgctgacttcaggagtaaagctgtgctcacaccacaaatgtaatcaaagggctgatcaactggtttctgagttagttcaactaatttgcatagtatctgcagagcaaccacataacttgttcctccatcttcaattatgaaaattgggattcctctccctttcaacccaggttctgttatcaatataattgcaataataatttctccctgaagagataaacggttgttcttctctgcatttttgtctttgctgatagcctgctcagttttagtaggcttttcctctttttctaagtgtctctttaaatcataatttaacttggggacaagtccaccaatattccacctgttgtttcctgactttttaatgattgccattctaactggtgtgagatgatatctcatagtggttttgatttgcatttctctgatggccagtgatgatgagcatttcttcatgtgttttttggctgcataaatgtcttcttttgagaagtgtctgttcatgtccttcgcccacgttttgatggggttatttgtttttttcttgtaaatttgtttgagttcattgtagattctggatattagccctttgtcagatgagtaggttgcgaaaattttctcccatgttgtaggttgcctgttcactctgatggtagtttcttttgctgtgcagaagctctttagtttaattagatcccatttgtcaattttggcttttgttgccattgcttttggtgttttggacatgaagtccttgcccacgcctatgtcctgaatggtaatgcctaggttttcttctagggtttttatggttttaggtctaacgtttaaatctttaatccatcttgaattgattttggtataaggtgtaaggaagggatccagtttcagctttctacatatggctagccagttttcccagcaccatttgttaaatagggaatcctttccccattgcttgtttttctcaggtttgtcaaagatcagacagttgtagatatgcggcattatttctgagggctctgttctgttccattgatctatatctctgttttggtaccagtaccatgctgttttggttactgtagccttgtagtatagtttgaagtcaggtagtgtgatgcctccagctttgttcttttggcttaggattgacttggcgatgcgggctctattttggttccatatgaactttaaagtagttttttccaattctgtgaagaaagtcattggtagcttgatggggatggcattgaatctgtaaattaccttgggcagtatggccattttcacgatattgattcttcctacccgtgagcatggaatgttcttccatttgtttgtgtcctcttttatttccttgagcagtggtttgtagttctccttgaagaggtccttcacatcccttgtaaattggattcctaggtattttattctctttgaagcaattgtgaatgggagttcactcatgatttggctctctgtttgtctgttgttggtgtataagaatgcttgtgatttttgtacattgattttgtatcctgagactttgctgaagttgcttatcagcttaaggagattttgggctgagacgatggggttttctagataaacaatcatgtcgtctgcaaacagggacaatttgacttcctcttttcctaattgaataccctttatttccttctcctgcctgattgccctggccagaacttccaacactatgttgaataggagtggtgagagagggcatccctgtcttgtgccagttttgaaagggaatgcttccagtttttgcccattcagtatgatattggctgtgggtttgtcatagatagctcttattattttgaaatacgtcccatcaatacctaatttattgagagtttttagcatgaagcgttgttgaattttgtcaaaggctttttctgcatctattgagataatcatgtggtttttgtctttggctctgtttatatgctggattacatttattgatttgcgtatattgaaccagccttgcatcccagggatgaagcccacttgatcatggtggataagcttttggatgtgctgctggattcggtttgccagtattttattgaggatttttgcatcaatgtttatcaaggatattggtctaaaattctcttttttggttgtgtctctgcccggctttggtatcagaatgatgctggcttcataaaatgagttagggaggattccctctttttctattgattggaatagtttcagaaggaatggtaccaattcctccttgtacctctggtagaattcggctgtgaatccttctggtcctggactctttttggttggtaagctattggttattgccacaatttcagagcctgttattggtctattcagagattcaacttcttcctggtttagtcttgggagagtgtatgtgtcgaggaatgtatccatttcttctagattttctagtttatttgtgtagaggtgtttgtagtattctctgatggtagtttgtatttctgtgggatcggtggtgatatcccctttatcattttttattgtgtctatttgattcttctctctttttttctttattagtctggctagcggtctatcaattttgttgatcctttcaaaaaaccagctactggattcattgattttttgaagggttttttgtgtctctatttccttcagttctgctctcattttagttatttcttgccttctgctaggttttgaatgtctttgctcttgcttttctagttcttttaattgtgatgttagggtgtcaattttggatctttcctcctttctcttgtaggcatttagtgctataaatttccctctacacactgctttgaatgcgtcccagagattctggtatgtggtgtctttgttctcgttggtttcaaagaacatctttatttctgtcttcatttcgttatgtacccagtagtcattcaggagcaggttgttcagtttccatgtagttgagcggctttgagtgagattcttaatcctgagttctagtttgattgcactgtggtctgagagatagtttgttataatttctattcttttacatttgctgaggagagctttacttccaagtatgtggtcaattttggaataggtgtggtgtggtgctgaaaaaaatgtatattctgttgatttggggtggagagttctgtagatgtctattaggtctgcttggtgcagagctgagttcaattcctgggtatccttgttgactttctgtctcgttgatctgtctaatgttgacagtggggtgttaaagtctcccattattaatgtgtgggagtctaagtctctttgtaggtcactcaggacttgctttatgaatctgggtgctcctgtattgggtgcataaatatttaggatagttagctcctcttgttgaattgatccctttaccat

SEQ ID NO: 124935 - DNA, 705 bp, Homo sapiens
ttattttactgatcgccttcgcgcccggctggctggcacgccgctgaaatgtttggcaccatcgcccgctccggtgtgcgtatcgtttctcgtgagccgctgaaccgtcgggcgattctgattatcgcgctgtcgctggcggttggtctgggcgtgtctcagcagccgctgattttgcagtttgcccctgaatggctgaaaaacctgctctcctccgggatcgccgcgggcggtattactgccatcgtgttttctcttgcggggcaccctgcgctggcgacaaatgcgcaaccgatggaagcctttcttcttcatcagaccacgttctttcagaacctgattagggtgaaggaagccatctgtagtgatcagttcaacacgacgatgttccgtggccttcaggggaacagcgcctgcacaaagtgcaatccccgatgcctgaatgaactgacgccgactgagtgacatatttttgttggaggcctggaacgcaccttcaacgttgtagctggcacgatagtttttggtcattttgttgccattctgcgcggtagcgatgatggcgatatccgctttggtcgcgatgttgtagcgcacgttgccctgggacacgtcagcatacagttggctaacgatgatttgcagattaacccggcaataaatgttgccgggagagatggtagggcggataagatgcgccagcat

SEQ ID NO: 124936 - DNA, 506 bp, Homo sapiens
cgtgaagtgcgcatcatgcagttctgccacacgctgcgggaatttgcgcttgagtatcggacttgccgggaacgagtgctacagcagcagcagaagcaggccacataccgtgagcgcaacaagacccggggacgcatgatcaccgagacagagaagttctcaggtgtggctggggaagcccccagcaacccctctgtcccagtagcagtgagcagcgggccaggccggggagatgctgacagtcatgctagtatgaagagtctgctgaccagcaggcctgaggacaccacacacaatcgccgcagcagatggcattggtccagagcagctccccaatcattgcccacaagtggggccctccactgcatccccagaagaacccccaggctccagtttacccagtgatacatcagatgagatcatgggacctttctgggttgcagttcagtgaccaagaagcagtcctcgtgcctttaggcttgcttagggaacgcaagcgtttccgc

SEQ ID NO: 124937 - DNA, 1981 bp, Homo sapiens
tcgcgatgaagttaacggatgtatccgtttagtctatgatatgtacagcacttttggtttcgagaagatcgtcgtcaaactctccactcgtcctgaaaaacgtattggcagcgacgaaatgtgggatcgtgctgaggcggacctggcggttgcgctggaagaaaacaacatcccgtttgaatatcaactgggtgaaggcgctttctacggtccgaaaattgaatttaccctgtatgactgcctcgatcgtgcatggcagtgcggtacagtacagctggacttctctttgccgtctcgtctgagcgcttcttatgtaggcgaagacaatgaacgtaaagtaccggtaatgattcaccgcgcaattctggggtcgatggaacgtttcatcaggtatcctgtccgaagagttcgctggtttcttcccgacctggcttgcgccggttcaggttgttatcatgaatattaccgattcacagtctgaatacgttaacgaattgacgcaaaaactatcaaatgcgggcattcgtgttaaagcagacttgagaaatgagaagattggctttaaaaatcgaagtggagaactctctcatcttccccccataaatcagtccaagccccggaatttccccagtgcagctctcccccaagttccacaacctactcatttgagtcagcgccccagagcctccccaaaaccgcccccaccagatccagagcgagtggagctgtccttggaagagcaccgggagatgctggagggcttctatgaagagatcagcaaagggcggaagcccacgctgatccttcggacccagctctctgtgagggtcaacgctatcttggccagcctggagtccgtgaaaccgctctacacaatggccctgggtctgctggtcaagtacccggactctgcgctgggccagcttcgcatcgagagcacggtagacggaagccgactgtacatcacagggaatggcgtcctctttcagcacgtcaagttccatgccttcctgctctacctgggctacaccccgcaggcggcccgtgaagtgcgcatcatgcagttctgccacacgctgcgggaatttgcgcttgagtatcggacttgccgggaacgagtgctacagcagcagcagaagcaggccacataccgtgagcgcaacaagacccggggacgcatgatcaccgagacagagaagttctcaggtgtggctggggaagcccccagcaacccctctgtcccagtagcagtgagcagcgggccaggccggggagatgctgacagtcatgctagtatgaagagtctgctgaccagcaggcctgaggacaccacacacaatcgccgcagcagagaccgccatgggccccggggctgccaggtctgcagtgctcagcccagccttcttcgtgcagtccctgtggcagacatgagggcactcatgacaggcaaggactgccccccatgtccgggaaagaggctccggggagcagaactaggacctctatgagtaggccttctcaatcagctatgaccgtggggaggaggaagcgtacctcaacttcattgccccctccaaacgggagttctacctgtggaaagatgggctcagtgccttgctgggcagttccatgggcaacgagcagacacggctggacctggagcagctgctgaccatggagaccaaactgcgtttgctggagctggagaacgtgcccatccccgagcggccacccccttgtgcccccaccccccaccaacttcaacttttgctatgactgcagcatcgctgaaccttgacagtgtggctggccatgggccccagctgcggcccctgcagcagccattaagggcagtgggtaaaggagtgcaggccccctgaccaccaaagattgctgcagaaataaagtctgcttggctcttgggatatgttgagccagctctgtaaaaaaaaaaaaaaaaaaaaaaaaaaaaaaaaaaaaa

SEQ ID NO: 124938 - DNA, 1833 bp, Homo sapiens
ctaaaaggcatcgttgatatgcggttgcagccgataatagatagcagccagtttagcccaggggtggacatagggactgcagcatgatgatttgccccactcgatgttaaaagtcaggcggctgtcctgatacgtttcccgtacataggcaatgtcgttagcgataatcgataatacgtcgcgcaaattactttcataacgtggataaaaacgtacggacgatgccccagttttcaacgcgatggcgacggcttcgtcaatagatgccttatctgaggcgctggtttcaatatgaatatcaaggttcagacggcgggctttatccccaaaggcagagagttctttatcgtccatattaccaagagaaaaacgctcgccatcgagaacatggattttgacgccacgtagattattttcacttgcgatatcaagtaaatcagcaggcaacactctttccagccgcatatttaaatgaaaggcataagcatgtaaataaagaggaagagtgtcgacacgttgtagaatctttcttgcgttatttattgtcaccataaaacacagattaatgatgaggtctacggcctcaaatcgccaatattcaatatctatttggacaatattgccttgctggtcggcgcgatgcttttcaattaagatcgctggcatacccgcagaaccgccaagatacttgctgatatcgcccggcattctgacgggtttgaaaatcaatttttttactaccgtctctttttggtagcacttttcccagactgcagaaaatgagtggttttcaagttgttcaataaagcccggagcaacttcaggattaatatatgtttcgtgatagaaaactttatgtccttccagcgccccccagccggtgatgcgatagagttcagttgatggcgtcactgcaatcagtggcgcgagcgtctcgggaatatcgctggtacggtttttctcggtaaacccccaggaaggctctcgcccttgctcaattgcggcccgctgaaagctcgccgacagctccggactgtaattaaatcgcggctgggtcacgaaccaccccttacgatccttacggaagattttggattctgcgtgcgcctgccgctggttcaggtctttcagctcctggaggttctccagcacctccatctccagcttggagtccttggtccggttctccagcacccccacgtttccatcctgctcagggaaccccctgcccatgcccagcgctgtgtccatttcacaggtgagaacactcaggtgttggctaatacgcttaaccagcattacggaaaccaccgcaccactgaatgcgaagcaggccataatgccaaacacgattttgtagccaataatccccggatttaaatccagaatgtagccatacagacgacattctaatatcgaagcccatatcgcaaccattttgcggatcagcgccagttgctgaaaatctttttcaccgaagcaggcgaatgtccggctggaccaggttgaacagcttgctgacaatagtcgaaacgccgcgaaaatgtcccggacggctggcaccttccagcatgtcgaaaggccaggaacgtcaacgtaagtgtgggtttcagtaccgttcgggtagatctcttttaccgaaggggcgaaaactaaatccactttacgtttgtttagcttctcgcagtcctcctgcaaggtccgtggataacgagccagatcttccgggcggtcgaactgcatcgggttaacgaaaatactgacgacgaccacatcggcgcgggctttggcttcgtcgaccagcttcatatggccatcgtgcaggttacccat

SEQ ID NO: 124939 - DNA, 898 bp, Homo sapiens
atgggcttgccgtggcaggtcgggatgggcgcaatcttctggggcgcgataggtctgctgttactgacgattttccgcgttcgctactggatgatagccaacattccggtgagtctgcgtgtgggtattaccagcggtatcggtctgttcattggcatgatggggctgaaaaacgcaggtgtgattgtcgctaacccggaaacgctggtgagcatcggtaatctgacttctcacagcgtacttctgggtatcctcggcttcttcatcattgctattctggcctcgcgcaacattcacgcagcggtgctggtttctatcgtggtgacgacgctgctgggctggatgctgggtgatgtgcactacaatggcatcgtttctgcgccgccgagcgtaatgacagttgtgggtcatgtagatttagccgggccaattggcaactcgctggtagatgcccttactttgcaatattacgaaggttttccgatggatcaggtggcctggggagaaatcaaatctgaccagcagtggaaggtgttgtcgaagcttaaaaacggctaccaggacagcctgtttacctcaccggaagtggcgcgcaatgttgcgaaaccgctggtcagttatatcgacaaagctctggtcaccgatcgcaccagcgcaccgaaaattacagtgttggttgggcacgactccaacattgcctctctgttaacggcgctggatttcaaaccgtatcagttgcatgaccagaacgaacgcacgccgattggcggcaaaatcgttttccagcgttggcatgacagcaaagccaatcgcgatttgatgaaaattgaatatgtgtatcagagtgcggaacagttacgtaatgccgatgcgttaaccctgcaggcacctgcgcagc

SEQ ID NO: 124940 - DNA, 3489 bp, Homo sapiens
atggtgtggggaatgtctcccaacaagacaccttatcaagcgctctctctccactctgctgttcctaccacatattcccaggcagatgatgattattctccaccgtctaagagaccaaaggccaatgagctaccgcagccaccagtcccggaacccgccaatgctgggaagcggaaagtgagggagttcaacttcgagaaatggaatgctcgcatcactgatctacgtaaacaagttgaagaattgtttgaaaggaaatatgcggaagccttggggagcactgaagccaaggctgtaccgtaccaaaaatttgaggcacacccgaatgatctgtacgtggaaggactgccagaaaacattcctttccgaagtccctcatggtatggaatcccaaggctggaaaaaatcattcaagtgggcaatcgaattaaatttgttattaaaagaccagaacttctgactcacagtaccactgaagttactcagccaagaacgaatacaccagtcaaagaagattggaatgtcagaattaccaagctacggaagcaagtggaagagatttttaatttgaaatttgctcaagctcttggactcaccgaggcagtaaaagtaccatatcctgtgtttgaatcaaacccggagttcttgtatgtggaaggcttgccagaggggattcccttccgaagccctacctggtttggaattccacgacttgaaaggatcgtccacgggagtaataaaatcaagttcgttgttaaaaaacctgaactagttatttcctacttgcctcctgggatggctagtaaaataaacactaaagctttgcagtcccccaaaagaccacgaagtcctgggagtaattcaaaggttcctgaaattgaggtcaccgtggaaggccctaataacaacaatcctcaaacctcagctgttcgaaccccgacccagactaacggttctaacgttcccttcaagccacgagggagagagttttcctttgaggcctggaatgccaaaatcacggacctaaaacagaaagttgaaaatctcttcaatgagaaatgtggggaagctcttggccttaaacaagctgtgaaggtgccgttcgcgttatttgagtctttcccggaagacttttatgtggaaggcttacctgagggtgtgccattccgaagaccatcgacttttggcattccgaggctggagaagatactcagaaacaaagccaaaattaagttcatcattaaaaagcccgaaatgtttgagacggcgattaaggagagcacctcctctaagagccctcccagaaaaataaattcatcacccaatgttaatactactgcatcaggtgttgaagaccttaacatcattcaggtgacaattccagatgatgataatgaaagactctcgaaagttgaaaaagctagacagctaagagaacaagtgaatgacctctttagtcggaaatttggtgaagctattggtatgggttttcctgtgaaagttccctacaggaaaatcacaattaaccctggctgtgtggtggttgatggcatgcccccgggggtgtccttcaaagcccccagctacctggaaatcagctccatgagaaggatcttagactctgccgagtttatcaaattcacggtcattagagtcttcctgaaacacagctacacccgtattatccatggctgctttcctgtcacagctcagaggctcaggcaagagctacagatgctcatgaccgaatgtctcacctgggccaggaatggcagcagcaagcaccctctcagcctagcccagaagccagagttcctatttcatcagttgcaaagcagagacaatgccatctgcccgatagcagagcaaaaggcaggtaaagccttagggacaacagtgatggtgtctgttccctatgagaagatgctgcgagaccagtcggctgtggtagtgcaggggcttccggaaggcgttgcctttcaacaccctgagaattacgaccttgcaaccctgaaatggattttggagaacaaagcagggatttcattcatcataaatagacccttcctaggaccagagagtcagctgggtggccctgggatggtaacagatgcggagagatccatagtatcaccaagtgaaagctgcggccccatcaatgtgaaaactgaacccatggaagattctggaagccacccttcttccacaagcaatgaagtaatagaaatggaattaccaatggaagattccactccgctggtcccttcagaagaaccaaatgaggaccctgaagccgaggtgaaaatcgaaggaaacacaaattcatccagtgttacaaattctgcagcaggtgttgaagatcttaacatcgttcaagtgactgttccagaacctgctaaggccatcaaacctattgatcggaagtcagtccatcagatttgctctgggccggtggtactgagtctaagcactgcggtgaagaagatagtaggaaacagtctggatgctggtgccactaatattgatctaaagcttaaggactatggaatggatctcattgaagtttcaggcaatggatgtggggtagaagaagaaaacttcgaaggcttaactctgaaacatcacacatctaagattcaagagtttgccgacctaactcgggttgaaacttttggctttcgggggaaagctctgagctcactttgtgcactgagtgatgtcaccatttctacctgccacgtatcggcgaaggttgggactcgactggtgtttgatcacgatgggaaaatcatccagaaaaccccctacccccaccccagagggaccacagtcagcgtgaagcagttattttctacgctacctgtgcgccataaggaatttcaaaggaatattaagaaggtaattgcgcgacgtattatcgattatcgctacgacatgccctatgtacgggaaacgtatcaggacagcggcctgacttttacgatcgagcagcatgaagatttaaactgtgcgaccttgccattgtacttctccaaagctagtgtcttcaccgctctgcaaaatatggcaaagtcaacggtagctctcatcaccactgcggcccgagaccggagctcggccggcgcgggggcggcggcgcgggcgggccgacaaaagggaggagcccgccaattgcaaggggagcgcgggcgagggagcagcgccgcagagcagcagccgaggggcgagcggcggagcagccggcgcgcgaccggcgcggggggagcagctggtgttcgctgtaacaaacaacttgccactcaaacgccggtccccgctgcgcatgcggccgcgcgcggctgccggacttgtagtccgcctgggggggctcccccggtgctgctgctgctgctgctgttgctgctgttgctgccgcgggggctgggcggccggagctaccggcagcccggtgcacgggaaatgcaggagcgcgggcaccctcaggactaa

SEQ ID NO: 124941 - DNA, 2235 bp, Homo sapiens
tcaatatctggctggaacaagtggattgtcgctgttaaatccttgagttggctgggaaacatcgttcgcgcagatcagatcaaggtttttacggatacgtttttgccgggcgtattcttccacattatttgtttcggcggcaaatccaacgacgtagggtcgatggtcttttagtgcggcaacggggcgcagcataaaaatattttgctgctgtacagaagcattcacggcggcttccatttccagcgcggtcatcacatcaacacgtttaacaaacggtggcgtcggtagtgaaaccggacctgataccagcgtgacgttcgcgccacgacgggcagcggcggcggcgatagaaaaacccatcttgccggagctgtgattagagatataacgcaccggatcgagcggttcacgcgtcgggccggcggtaatcataatgttcagatgtttcaggtcgttgacgggcgaaaatgcgctaccgccatatccacagttctggatatgtttggcgatcactttggtcggcagaagatcgcttcctgtcagcgctggctggcgaaaacgatccgtacagttcagcagccgatctgcaaaaacattgtcaggaaaccgggctgtcactctctggcctgatgatgaaaaacgagctggcgcaaatcggcgattgagagcgatggcgcgttgatggagtttgatgtaaacgaagctaacgtggtgaaaacgatgatggcgcacgcgagaaatattctgctggtcgccgatcacactaagtatcatgcttcggcggcggttgaaattggtaacgtggcacagtgatgggggagcagagataaccgtgatgaaattcgcaatacgcttgtacttgatacgcttcggctccagcgcgtctgcgcccagcgtgcgtttcttgtactcttcgtactcggtaaagttaccttcgaagaactcaactttaccttcatcctggtaatccagaatgtccgtggcgatacggtcgaggaaccaacggtcgtgcgagataaccatcgcacagcccgggaactccagcagggcgttttccagcgcgcgcagggtttcgatatccaggtcgttggttggttcgtcgagcagcagcatgttgccgccaacctttccagatgcagattggtgaatacaccaacgcagcaggtcaggttttccacggcgacattccgcgttatatggcgggtgaccccgactgcgggtaaactgtctggtggcttcctgttcaaaatgtacggtctgccagctgccgcaattgctatctggcactctgctaaaccagaaaaccgcgcgaaagtgggcggtattatgatctccgccggcgctgacctcgttcctgaccggtatcaccgagccgatcgagttctccttcatgttcgttgcgccgatcctgtacatcatccacgcgattctggcagcactgtttatgtggaaatttgtcccggaaaccaaacgtaaaacccttgaggagctggaagcgctcagtaacaggatcgcagccgagtagatcaacacatccagtggcgatttatgatcgacgatgatcaagcgcacaatggcgatgatcccaatatagacaaagtaacgtagcgggaagtgaaaaccggactgaaagtacttcacaatcagcgcgataaattcgaaatagagaaagtaaaccaccagtccttctaccagctcatatttgctggttgttcttgcgcggacagcctgacagccagatgcaccgtatctttgccgaggaagacaaccaaaatcaggagaggacgtcgaaaattgacctatcaaagtctctagggccgtgcttccagcatgtgttccttgatggatctgcttcacaaaccttggggctattgtctctgggacagctagcctcccgtcagagaacagccaccatccacctttaatatattttcctgtttcctggccaaaccaagctttttcaattgaagagtaattgggtacctctggcaaagggggctcaatgttgataatcaccgaagttcgcacgcccgccagaatcaccggagccgccagcggtagctcgaccttacgcacgattgccgcaatagtgtcaacattcagcccggtttcggcagagattggcacgatatcgaggaagttcatctggcttgccaggaactgcaggtgcggcagcagatcggctttctcctgcacgttgtccactttgttcaccgcgaggattacccccat

SEQ ID NO: 124942 - DNA, 573 bp, Homo sapiens
atgctgagcatggaagatgtgctggagatcctgcgcatcaaactcgtcggcgtgatcccagaggatcaatcagtattgcgcgcctctaaccagggtgaaccggtcattctcgacattaacgccgatgcgggtaaagcctacgcagataccgtagaacgtctgttgggagaagaacgtcctttccgcttcattgaagaagagaagaaaggcttcctcaaacgcttaaaccagcaccgctgcgtgaatgttgcgcgaggccagaatagcaatgatgaagaagccgaggatacccagaagtacgctgtgagaagtcagattaccgatgctcaccagcgtttccgggttagcgacaatcacacctgcgtttttcagccccatcatgccaatgaacagaccgataccgctggtaatacccacacgcagactcaccggaatgttggctatcatccagtagcgaacgcggaaaatcaagattgcgcccatcccgacctgccacggcaagcccatcgcctgtacaacgacaaaagcgaagaacgcattcaggcccatagcgggtgccagtgcaactggcag

SEQ ID NO: 124943 - DNA, 3273 bp, Homo sapiens
atgaagcggcatttgctacaggatatccgtcgctcggcttacgtttatcgcgtcgattgcggcggctgcaacgcctgtgaaatcgaaatttttgctgccattacaccagtattcgacgcagaacgttttggcattaaggttgtttcatcaccgcgtcacgccgatattttgttatttactggcgcagtcacccgggcgatgcgtatgcctgcacttcgggcgtatgagtctgcccccgatcataaaatttgtgtttcctacggcgcgtgcggtgtcggcggcggtattttccacgatctctacagcgtctggggcggtagcgacaccattgtccccattgatgtttggatccccggctgcccgccaacaccggccgccaccattcacggtttcgccgtggcgctcggtttgctgcaacagaagattcacgctgtggattatcgcgatcccaccggggggctggtgccgccgcatatcgccgccgggatcaacctgaatttctggcctgccgggcgatttttccgccgtctgggggcgttctttattcgccgtacgtttaaaggcaataaactttattccaccgttttccgggagtatctcggcgaactgttcagccgtggttattccgtcgagtacttcgtggaaggcggtcgttcccgtacggagcgtttgctggatccgaaaactgtcaataaaattgcggcattaatgcatgatgcaacagaagcgtattgccaggacatccacgaaccactgaaacgccttcttcctgactataaacggatggaagaaaaaatagatgcagtaatccgtgagaaatacgggttacctcctgttatgagcacgccagtgaaatatgccgatctcattatgctggcaaccgaacgccgtgatctcgggcttgatgatggctctttctggcctgtactggaaggcatcccggcaacagagatgttcaacgtgattccactggcaccgggtcatgcctacgggatgtttatggaacgttttaacgatttatcggataatgccaaaagcaccggaggctggagcataatgaccacatttaccaataaagaactgattaaagaaatcaaagaacgaatcagcagcctagaggttcgagacgatattgagcgccgtgcttatgaaatcgcactcgtatctctggaagtagagccagatgaacgcgaagcctatgaattattcatggaaaagcgtttcggtgacttagtagatcgtcggagagcaaaaaacggcgataacgaatacatggcatgggatatgactctcggttggatcatctggcagcaacgagctgtaccgcaaatcgccatcaaaagtaatgcccgtggttatgtaccccctgaacgttgggatgaagggatcaacgcgctattactgggatattcgtttagcggggctaacagtattcatagcagcgcagacagtgattctggcgacagctattttctgaatttaaacagtggcgttaatttaggcccatggagattgcgcaacaattcaacatggagtcgtagtagtggccaaaccgcagaatggaagaatctcagcagctatttgcaacgggcggttatgcctctgaaaggcgaactgaccgtaggtgatgattatactgcaggcgattttttcgatagtgtcagctttcgtggtgtgcagctggcgtcagatgacaacatgctgccagacagcctgaaagggtttgcgcctgtggtgcgtggtatcgccaaaagcaatgcccagataacgattaagcaaaatggttacaccatttaccaaacttatgtatcgcctggtgcttttgaaattagtgatctctattccacgtcgtcgagcggtgatttgttagttgaaatcaaagaagcggacggcagcgtcaatagctacagcgtaccgttctccagtgtgccattactccagcgtcaggggcgaatcaaatacgcggtgacgatcactgcaggcatgcaagctgcttgccgtaaagtgggaatcgggtatctttatgagaagggtcatgacgacgctatcgcaatagttctcgccctcgcctcaccagagcttgatgtcaaagcaattacgtcttccgccggaaaccagacaccagaaaaaaccttacgcaatgttctgcgtatgctgaccttgcttaatcgcaccgatattccggtagcaggcggcgcggtaaaaccgttaatgcgtgagttgattatcgcggacaatgtgcacggcgaaagcggtctcgacggcccggcattaccggaaccgacattcgcaccgcaaaactgtacggcggtagagctgatggcgaaaacgctgcgtgaaagtgcggaacctgtcaccattgtgtctaccggaccgcaaactaacgttgccttgctgctcaatagccatccggaactgcatagcaaaattgcccgtatcgtgattatgggtggcgctatggggctgggtaactggacgcctgcggctgaatttaatatttacgttgacccggaagcggcagaaattgtcttccagtcagggatcccggtggtgatggccggtctggatgttactcataaagcacaaatccacgttgaagacaccgagcgtttccgcgcgattgcaacgcactaccatactttaaaccacagacaaaaggagttaccgatgaaattgttctacaaaccgggtgcctgctctctcgcttcccatatcaccctgcgtgagagcggaaaggattttaccctcgtcagtgtggatttaatgaaaaaacgtctcgaaaacggtgacgattactttgccgttaaccctaaggggcaggtgcctgcattgctgctggatgacggtactttgctgacggaaggcgtagcgattatgcagtatcttgccgacagcgtccccgaccgccagttgctggcaccggtaaacagtatttcccgctataaaaccatcgaatggctgaattacatcgccaccgagctgcataaaggtttcacacctctgtttcgccctgatacaccggaagagtacaaaccgacagttcgcgcgcagctggagaagaagctgcaatatgtgaacgaggcactgaaggatgagcactggatctgcgggcaaagatttacaattgctgatgcctatctgtttacggttctgcgctgggcatacgcggtgaaactgaatctggaagggttagagcacattgcagcatttatgcaacgtatggctgaacgtccggaagtacaagacgcgctgtcagcggaaggcttaaagtaa

SEQ ID NO: 124944 - DNA, 4353 bp, Homo sapiens
atggattctcacggtttcggcatggcttcggtgcgttttatttgcggcactcaggacagccataaagagcttgaacaaaaactggcggccttcctggggatggaagatgcgattctctactcttcctgctttgatgctaacggtggcctgtttgaaacgcttctgggtgcggaagacgccattatctccgacgcactgaaccacgcgtctattattgatggtgtgcgtctgtgcaaagctaaacgctatcgctatgccaacaacgatatgcaggagctggaagcacgtctgaaagaagcgcgtgaagccggtgcgcgtcatgtgctgatcgccaccgatggtgtgttctcaatggacggcgtgattgccaacctgaagggcgtttgcgatctggcagataaatatgatgccctggtgatggtagacgactcccacgcggtcggttttgtcggtgaaaatggtcgtggttcccatgaatactgcgatgtgatgggccgggtcgatattatcaccggcctggcggttggcttctggcagaacctcgacgagctgcaagagaaagcggtgattgagcgcgagttccgtccaggcatcgaaaccactgagcagtttgctatgagacgagaacttgccatcgaattttcccgcgtcaccgaatcagcggcgctggctggctacaaatggttaggacgcggcgatgaaaacaccgcggacggcgcggcggtaaacgccatgcgtattatgctcaaccaggtcaacattgacggcaccatcgtcattggtgaaggtgaaatcgacgaagcaccgatgctctacattggtgaaaaagtcggtactggtcgcggcgacgcggtagatattgctgttgatccgattgaaggcacgcgcatgacggcgatgggccaggctaacgcgctgtcggtgctggcagtaggcgataaaggctgcttcctcaatgcgccggatatgtatatggagaagctgattgtcggtccgggagccaaaggcaccattgatctgaacctgccgctggcggataacctgcgcaatgtagcggcggcgctcggcaaaccgttgagcgaactgacggtaacgattctggctaaaccacgccacgatgccgttatcgctgaaatgcagcaactcggcgtacgcgtatttgctattccggacggcgacgttgcggcctcaattctcacctgtatgccagacagcgaagttgacgtgctgtacggtattggtggcgcgccggaaggcgtagtttctgcggcggtgatccagcgcattagatggcgacatgaacggtcgtctgctggcgcagtcatgacgtcaaagtgcgacaacgaagagaatcgtcgcattggcgtagcaggtagctggcacgctgcaaagcgatgggcatcgaagccggtaagtattgcgcctgaagcatatggcgccagcgatacgtctcggtaccaatattccctgatacttttcgactgcggttcgacaaaaatcccgctggatcatcggcatgttttccaaggctttaaaacccataaatggacctccagcctgacgctgaactactttctctggcgcgaccgcaaaggggcaatcagtaactttgtcagcttcctcgcgatgctggtgatgatccagcttttgctgttgctggcgtatgaaagtttgtggcccgatgcctggcatttcctttctattttcagcggcagcgcatggttaatgaccctgctgtggctaaactttggtttgatggttaaccgcatcgtgcagcgggtgattttcgttactggctactacggcctgacgcaggggctgctttccgtcctgcgtcttttctggggcaacctgattaacttcatggccaactggcgcgcgctaaaacaggtacttcaacacggcgatccacgtcgcgtggcgtgggataaaacaacgcatgacttccccagcgtgactggcgatacccgctcgttgcgcccgttaggtcaaattctgctggaaaatcaggtcatcactgaagaacaactcgatacagcactgcgtaatcgcgtcgaaggtctacgcctgggcggttcaatgctgatgcaggggctgattagcgccgagcagctggcacaggcgctggcagagcaaaacggccatgattgggtaacgccaaatcaccacattcaaaaaactgccgatgatcaatcctccgacggttgccacgacgggcatccgccgtgggtattgctgagctatacatatcgaatcgagctcggtacccaacgcgccaatgaaaatggcgaaagctttgtggcgatggtggatcgcatgatcgccgaaatgcacaaagattttgatgctttgaacattctgcgcccggatatggagccgcgcgcgacgcaccatatcgcagaaattattgaactcactgaacaactgatcgccaaaggtcacgcttatgtggcggacaacggcgacgtgatgttcgacgtcccgaccgatccaacttatggcgtgctgtcgcgtcaggatctcgaccagctgcaggcaggcgcgcgcgttgacgtggtcgacgacaaacgcaacccaatggacttcgttctgtggaagatgtcgaaagagggcgaaccgagctggccgtctccgtggggcgcgggtcgtcctggctggcacattgaatgttcggcaatgaactgcaagcagctgggtaaccactttgatatccacggcggcggttcagacctgatgttcccgcaccacgaaaacgaaatcgcgcagtccacctgtgcccatgatggtcagtatgtgaactactggatgcactcggggatggtgatggttgaccgcgagaagatgtccaaatcgctgggtaacttctttaccgtgcgcgatgtgctgaaatactacgacgcggaaaccgtgcgttacttcctgatgtcgggccactatcgcagccagttgaactacagcgaagagaacctgaagcaggcgcctggtacccatcagcactactgccagattctccagcatcgaaaacgccactgcgccgggcaaggtttccggtttacccgcaatcgccagatccgcttcaccagtgaccaccttttccatcgcatctgccgcatcaccagtagtaagtttaatctccaccgacgggtgttccgcgcggaagcgatccagaatcggcggcagatggctcacatcgcgcccattttttccctcaacatcctgttcctgttcgtctttaataccaccacgccgctgcagtggctgatggcttctgacgtggtggactacgaggagagccgcagcggtcgccgcctcgacgggctggtgttctccacctacctgttcagcctgaagattggcctggcgattggcggggcggtggtgggctggatcctggcgtacgtcaactattccgccagcagcagcgtgcagccggttgaggtgctcaccaccatcaaaattctgttctgcgtggtgccggtggtgctctacgcggcgcatgttcatcatgctgtcgctctacaagcctcaccgcatgcccgcgctggcaggcgcatcacggaccgcaggcacctcacctcaccacttcgccccacacatcgcacccgtatccgcacgctcgcgctctcacaccgctgccgcccgccgacatataaggaagataagaaagttctttttcgttcccgcctgacaactgccagcggcgggtattatcagaacttcgctaacaatctcaaccgcttctttctcaatctgcttgcgatgttcttcaccgaggaagctttcgcagtagatctatatgcgtcttccgtgcctgacggacgcgcggcgaaccagccgttgtcagtcatcactttcagaccgccaatagaagcaccgttgcccggagcagcagtcaggcgcgcggtgatcgggtcacctgcacagctgaacatccccggaaacagcgaagtgttccatctctgccgggtgatgtatctcgataaagagccgctgtttattgatagttcatggatcccgctgtcgcgttatcctgactttgatgagatttacgtcgaaggaagctccacctatcagttatttcaggagcgttttgacacgcgagtggtcagcgacaaaaagaccatcgatatctttgccgccacccgcccgcaggcaaaatggctgaaatgcgaactgggcgaaccgttgtttcgcatcagcaaaatcgcctttgatcagaatgacaaccggtgcacgtctccgaactcttctgccgcgccaatcgcgccgtccttctattccacccgccttggcctcccaaaatgctgcgatcacagacgtgaaccaccgcgcttgccctgtactgcagattaa

SEQ ID NO: 124945 - DNA, 1578 bp, Homo sapiens
atggggtttcgccatgttggccaggctggtctcaaactcctgacctcagtctattattgtgcaaaaatccaacaatccaacaacaatgtcaaggtcagagtgtcgtcatggtgtatcttgagtagggaggaggtgaaagctgctggagttgaggtccaagagagaggctggcatgttggagagatcatcatccaggatggtgacttgctctcagtgggctgctacaagaaacccggtagtggcgttgccaatttacggtttcatcgaacgttgcctggtaccgtttggtctgctccacatctggaacgtacctttccagatgcagattggtgaatacaccaacgcagcaggtcaggttttccacggcgacattccgcgttatatggcgggtgacccgactgcgggtaaactgtctggtggcttcctgttcaaaatgtacggtctgccagcttccgcaattgctatctggcactttgttaaaccagaaacccgcgcgaaagtgggcggtattatgatctttgcggcgctgacctcgttcctgaccggtatcaccgagccgatcgagttctccttcatgttcgttgcgccgatcctgtacatcatccacgcgattctggcaggcctggcattcccaatctgtattcttctggggatgcgtgacggtacgtcgttctcgcacggtctgatcgacttcatcgttctgtctggtaacagcagcaaactgtggctgttcccgatcgtcggtatcggttatgcgattgtttactacaccatcttccgcgtgctgattaaagcactggatctgaaaacgccgggtcgtgaagacgcgactgaagatgcaaaagcgacaggtaccagcgaaatggcaccggctctggttgctgcatttggtggtaaagaaaacattactaacctcgacgcatgtattacccgtctgcgcgtcagcgttgctgatgtgtctaaagtggatcaggccggcctgaaaaaactgggcgcagcgggcgtagtggttgctggttctggtgttcaagcgattttcggtactaaatccgataacctgaaaaccgagatggatgagtacatccataaaaaaccttctcgtccggacgcttcgcaaccggacacgcagacggatgaacaggattttttaactcgccatcctgatgcggttgtattcagccctaaaaagcgccagtggggaacgcaggatgatttgacctgcgcacagtggctctggaaaaaaatcatcgccctgtacgagcaggccgccgaatgtgacggcgaggtggttcgtcccaaagaaccgaactggacagcctgggcaaacgaaattcgcgtgatgtgtgtgcaggatggtcgtactcacaaacaaatgtgcgagatgtacagccgcgtcagccgcgatccgttttggtgccgtaacgtgctcagcccgtcgaaggtgcgggaaaaatgggatgagctttccctgcggttatcgccgtccgtcagcacgtacacagaaaaacgcgaagacccgtacttcaaagccagttacgacaatgtggaatacagccagatcccggcaggattcagggg

SEQ ID NO: 124946 - DNA, 3834 bp, Homo sapiens
tgtcaattggcatgatggggctgaaaaacgcaggtgtgattgtcgctaacccggaaacgctggtgagcatcggtaatctgacttctcacagcgtacttctgggtatcctcggcttcttcatcattgctattctggctcgcgcaacattcacgcagcggtgctggtttctatcgtggtgacgacgctgctgggctggatgctgggtgatgtgcactacaatggcatcgtttttggcgccgccgagcgtaatgacagttgtgggtcatgtagatttagccgggtcgtttaacctcgggctggcaggggtgattttctctttcatgttggtcaacttgtttgactcctccggtacgctgattggcgtgaccgataaagcaggttctggcggatgagaagggaaaattcccgcgcatgaagcaggcgctgtatgtcgacagtatctcttccgtgaccggttcgtttatcggtactttttccgttacggcttatattgagtcctcttccggcgtatcggttggcggtcgtaccggtctgacggcagtggttgttggtctgctgttcctgctggttatctttctgtcgccgctggcggggatggtgccaggctacgctgcagctggtgcgctgatttacgttggcgtgctgatgacttccagtctggcacgcgtgaactggcaggatcttactgaatctgttccggcgtttattaccgccgtgatgatgccgttcagcttctcgattaccgaaggtatcgcgctgggctttatctcctactgcgtgatgagtatactcatccggttccggggatctctagagtcgtggtatcccggtcggcggctattggcattgggtttgatcacaatattcggtttggtaaatggcatgacgttattgccggaagaaaaggtgctcgacgtcccgaccgatccaacttatggcgtgctgtcgcgtcaggatctcgaccagctgcaggcaggcgcgcgcgttgacgtggtcgacgacaaacgcaacccaatggacttcgttctgtggaagatgtcgaaagagggcgaaccgagctggccgtctccccggacgctcgataacgatacgagatacggacgctttagccagttccttagtcaggtactgacctgtacgtccgcaagacagattctacaacgtgtcgacactcttcctctttatttacatgcttatgcctttcatttaaatatgcggctggaaagagtgttgcctgctgatttacttgatatcgcaagtgaaaataatctacgtggcgtcaaaatccatgttctcgatggcgagcgtttttctcttggtaatatggacgataaagaactctctgcctttggggataaagcccgccgtctgaaccttgatattcatattgaaaccagcgcctcagataaggcatctattgacgaagccgtcgccatcgcgttgaaaactggggcatcgtccgtacgtttttatccacgttatgaaggtaatttgcgcgacgtattatcgattatcgctaacgacattgcctatgtacgggaaacgtatcaggacagcggcctgacttttacgatcgagcagcatgaagatttaaaaagtcatgagctggtgtcgctggtttcccccagccccgaccttggaaaacgaggccaggcgccaagctgccatgcctgcagctcccccgtgcgcccgaacagctgcgccgtggcggcgcaggtttatatcggcagcgaatatgaacatcagtcgatcaaaaatattattcagctggttgatgccggaatgaaagtgggaatgccgaccatggccgtgactggcatatggtgcgcgatcagcgttactttctcgctcgcgactcgaatcgccgctgaaatgggggcgcaaattatcaaaacctattatgtcgaaaaaggttttgaacggattgttgccggatgtccggtacccattgttattgctggcggtaaaaaattaccggagcgcgaggcgctggaaatgtgctggcaggctatcgatcagggcgcttctggtgtggatatggggcgtaatattttccagtctgaccatccggtggcgatgatgaaagccgtattggcagtcgtgaatatgacaccttttgtggggctatcgataaactcgaggcagaactcaaaaattccgcttcctgacagagttaatagcgggtcatgcgcgcgtacccgtgggatcctctatgagtcagcggcagatcttccagcggtttgcctgacgaatggcttccaccaccgcttcaccaacaatatggtgcgcctcgcggaacgagtccttgagatcctgctgaccatcctcaaagcggtggtgatcctgctggtggttgtcacctgcggggcattcatgagctccgctaaatcccacttgttgccagcgccaccgccaaagcgccgtgaaaaacatcaaccggccttcaaagttgatgttaagctttccggcatcacaaagcggttcatgtcggctaagcggccgtgcgtcaggaatacgccgattctaaccagctgtccctcctgttcagctactgacgccttattggaaggccaggaggtttttgcaaatcttcaggaaggaatgagccaaaggtggctgttctttcccagcggtaacaggcacaagattgatcagcagcatctctttacttttgaacacgcgttcggtgagggttccggcttcatcgacttcgctctgttcgtgggcgggatgctgtttatcaagatagtgtaccagagagaacgccagccaatcagcagcctagaggttcgagacgatattgagcgccgtgcttatgaaatcgcactcgtatctctggaagtagagccagatgaacgcgaagcctatgaattattcatggaaaagcgtttcggtgacttagtagatcgtcggagagcaaaaaacggcgataacgaatacatggcatgggatatgactctcggttggatcatctggcagcaacgagctggtatccatttttcaacaatgtcacaacaagaggtccttccggtcatcattatgaccgcacattccgatctggatgctgccgtcagcgcctatcaacaaggggcgtttgattatctgcccaaaccgtttgatatcgacgaagcagtggcgctggttgagcgcgctatcagtcattaccaggaacagcagcagccgcgtaatgttcagcttaacggcccaacgaccgatatcatcggcgaagcgccagccatgcaggacgtgttccgtattatcggtcggctttcgcgttcttctattagcgtgctgattaacggcgaatccggcaccggtaaagaactggtcgctcatgccctgcatcgcccagttcgcgcgcggcaacctgtaaaaaatggcgcgccagacggggaatatcttcccgacgttccgcagcggcggcagatgaacgcggataacgttcaggcggtggaacagatcctcacggaacttaccttcctgcactcgctgttcgagattcaggttttccacggcgacattccgcgttatatggcgggtgacccgactgcgggtaaactgtctggtggcttcctgttcaaaatgtacggtctgccagctgccgcaattgctatctggcactctgctaaaccagaaaaccgcgcgaaagtgggcggtattatgatctccgcggcgctgacctcgttcctggaccggtatcaccgagccgatcgagttctccttcatgttcgttcggcggatcagttacaggctttcgatgaaacgatcctcgccagtgggatcgtgccgcgcactggctcccagggcttgaggaaatggcgattctctgcgtaa

SEQ ID NO: 124947 - DNA, 642 bp, Homo sapiens
ggtaagttatgcgagcaaccgcagccaatctcttccttgattcagggctattccaagaatgccaacaagagcctcagcaagtaacggacacgcacccgtatcactgccctatcccgaaaaacgtgacaccgtcacctttaaaataacaacaacaacgcaaacacaacaaccgaggaatgcccatgagtatgtcatccataccgtcgtcctcccaatccgggaagctctatggctgggtcgaaagaattggtaacaaggttccccatccttttctgctctttatctatttgattatcgtactcatggtgacgacggcaattttgtcggcctttggcgtcagtgcgaaaaacccgacccgatggtacgccggtcgtggtgaaaaacctgctcagtgtggaaggattacactggtttttaccccaatgttattaaaaactttagcggttttgctccacttggtgcgatcctggcgctggttttaggtgccggtctggcggagcgccgtcggcttactgccagcactaatggttaaaatggcatcgcatgttaattgcccgctacgccaagttatatggtgctgtttattgcttttttcagccacatttcttccgatgcggcgttagtgatcatgccaccgatggg

SEQ ID NO: 124948 - DNA, 1197 bp, Homo sapiens
atgcaacgcaacgggagaaataacatggccgaacatcgtggtggttcaggaaatttcgccgaagaccgtgagaaggcatccgacgcaggccgtaaaggcgtgatttcactggagaaaaatatgaatatgaagaccattgaagatgtatttattcacctgctttcagatacctacagcgcagaaaaacaattaacccgggcactggcaaaacttcgcaggcaacatcaaatgaaaattaagtcagcttttcatcgcactcgagaaactcatgacagattgacgtttgatccgcaaattttgtcggcctttggcgtcagtgcgaaaaacccgaccgatggtacgccggtcgtggtgaaaaacctgctcagtgtggaaggattacactggtttttacccaatgttattaaaaactttagcggttttgctccacttggtgcgatcctggcgctggttttaggtgccggtctggcggagcgcgtcggcttactgccagcactaatggttaaaatggcatcgcatgttaatgcccgcgtaggttgcggctttacggctaatttactgattgtcacaaccgacgtgttgctgtcggggatcagcacggaagcggcagctgcgttcaatccgcaaatgcacgtcagtgtaattgataactggtattttatggccagctccgtagtcgtactgacgattgttggcggcctgataaccgacaaaatcatcgagccacgagcgggcagcgtggtgctcgactctgtcccggacaacgcgctggtggtgggagaaaaagcgcgagtgaaggggctggcgtcacattttgtctacggttacggcaaaggcggcaaagagagcgtcagccatcagaactatccgcaggtcatcaaacatacgccgcggatgaccgcgatggcgaatattgctctgtttcgtctgtttaatcgcgatctgtttggcaatttcaatgagttatatcgcaccattactcgcacagcgggtccggtggtcctgcattttcatgtgctgcacagctactggctaaatcttaagagcgtggtgcgcttttgcgaaaaagtgaaaaaccataaaccggacgtcactctggtctggacgctgcacgaccactggagtgttaccggacgtgcgcctttaccgacggttgcgaaggctggaaaacaggctgccagaaatgcccgaccttaa

SEQ ID NO: 124949 - DNA, 1311 bp, Homo sapiens
atgtgctctgagaaggttgctatgtgctgtgatgatgatgatgatgatgatgatgatgatgatgatgatgatgatgatgatgatgactattcttgctcccatggcttctgggatttctcctatacttggaacaccagtattccccaaggccatttaggaatggggtcccccattaaaggcctggtcgaaatcagggataaacttggtgaccgaacccaacgggtttacattcaaaggattacgggcaacggactcgaatttgaaaacccatgtaaacaatttaggggcctgaccagaatgtacatccgaagattaacccggctgagcgtccagtggtacatggtggccctagagcgtccagtgctacagaagtaccgttatagagggagcaaagcacacgagacaagccacagcatgagcactgtaaccagcagcaacgagaaacaagacaacacacgaatcgacacacaaggagcaacgaacagagagcaacattacgtcatcgtgaaacggtactggcgaatgaagtcgctccatatgccgccaccgataacgtgcttgcggcatcgactgatgtcggcgacgtcagttggaaactgcctgttgcccagtgtttcagcccctgttttgccgtcggtacaccgctacatacgtggcaactgggctattgcaagaatgccaacaagagcatcagcaagtaacggacacgcaaccgtatcactgccctatcccgaaaaacgtgacaccgtcacctttaaaataacaacaacaacgcaaacacaacaaccgaggaatgcccatgagtatgtcatccataccgtcgtcctcccaatccgggaagctctatggctgggtcgaaagaattgtgcgaaaaacccgaccgatggtacgccggtcgtggtgaaaaacctgctcagtgtggaaggattacactggtttatacccaatgttattaaaaactttagcggtttagctccacttggtgcgatcctggcgctggttttaggtgccggtctggcggagcgcgtccccaagcccaagttacgttccccgacaagttacattccccaagggcgccccgtgagacaaacaccaccaagagtaccccaaaaaccacaggatgtcccaattaactggcgtcagtataagcaaagcaacctaagccagaccgaacccaaagcagagccaggccaaccaaagcacagtttagccaagcgcaaacacaaccggacaacacagaccgaagagcaacgcaaccccaacgcaacagaacccaagcgccgccttcaagttagccgccgcgccagttag

SEQ ID NO: 124950 - DNA, 626 bp, Homo sapiens
cctctttgagttcacccttgacgtgaaagtcagggagtctccgattcttgttccgtgacgagagcatgcgcaccgcctgctcccctgacggcctgtgcagtaacgggttcggccttgagcttaaatgccctttcacctcccgcgacttcatgaaattccgccttggcggtttcgaagccatcaagtctgcgtacatggcccaggtgcagtacagcatgtgggtgaccggaaaagacgcatggttctttgcaaactacgacccgcgcatgaaacgcgaaggcattcaccacgtcgtcgttgagcgggatcctcagtacatgtccgatttcaacgaaatggtgccggagttcatcgagaagatggacgaggcgctggcagagatcggcttgactgtcagagaactggggatatgaaacttacaccattttaccgcaagcccgggcgagccgggcaattctccggcctccgtgaacgcgttatctggatgattcagacgcgcggccgcccggtcactggcagcgaaatcgccgagaagtttggcgtatcgctcattgagtttaaccgggtcgccaacggcatcacccgcggcaccggacagatagcgcagatcgttgagtcggaaaaat

SEQ ID NO: 124951 - DNA, 663 bp, Homo sapiens
gggcgcggggaaagaaacccccgaggaggggaaaagaggacttttgggacctttccatcgcaacccgtgtctccgtgaaccctataaaattcccggtagaagcgtgaccatttttaaagccgcctacaacaggtgagccggtccgttaggtggtcgtcttccgctaccgattcccggtaatctgctgttacaggttgctgacggtacgttgtcgctgaccggtactgatctcgagatggaaatggtggcacgtgttgcgctggttcagccacacgagccaggagcgacgaccgttccggcgcgcaaattctttgatatctgccgtggtctgcctgaaggcgcggaaattgccgtgcagctggaaggtgaacggatgctggtacgctccgggcgtagccgtttttcgctgtctaccctgccagcggcggatttcccgaacctcgatgactggcagagtgaagtcgaatttaccctgccgcaggcaacgatgaagcgtctgattgaagcgacccagttttctatggcgcatcaggacgttcgctattacttaaatggtatgctgtttgaaaccgaaggtgaagaactgcgcaccgtggcaaccgacggccaccgtctggcggtctgttcaatgccaattggtcaatctttgccaagccattcggt

SEQ ID NO: 124952 - DNA, 1080 bp, Homo sapiens
atgcaggggcgacgcccgagcggggcccccgcggcggcgttgggcttcccccgccggccccggcccggtccccccggactcacccaggccgcgccagcccagggcgctgtcccagctgtccagaacagcgcagagctctccgagcagcgcgggcggcaggtcgaacagcagcgtgtgcgccgacagcgcgccgcgggccccacagttccccgccatggctcggctgcccgagccccggggacgaggcggagtccaggtccctgcacgcctgcgacaggccgttacacaaccgcggaaatcctgcttccacgacggcagcagagccctaggaacacgccgttctccggtcactgcaggggcggatataagaaaataatggaggggccaacggtgtctggcgtctgtgtttccacgccaccccggggccgagggacgcggccgacccgttttccgggcggaaacaattttcctttaataatcccgccgtgggttggccagaaaggccgcaggaaattgccggtcaagctgaaagcggcggatttcccgaacctcgatgactggcagagtgaagtcgaatttaccctgccgcaggcaacgatgaagcgtctgattgaagcgacccagttttctatggcgcatcaggacgttcgctattacttaaatggtatgctgtttgaaaccgaaggtgaagaactgcgcaccgtggcaaccgacggccaccgtctggcggtctgttcaatgccaattggtcaatctttgccaagccattcggtgatcgtaccgcgtaaaggcgtgattgaactgatgcgtatgctcgacggcggcgacaatccgctgcgcgtacagattggcagcaacaacattcgcgcccacgttggcgactttatcttcacctccaaactggtggatggtcgcttcccggattatcgccgcgttctgccgaagaacccggacaaacatctggaagctggctgcgatctgctcaagcaggcgtttgctcgcgcggcgattctctctaacgagaaattccgcggcgtacgtctttatgtcagcgaaagccagctcaaatcccgccaatga

SEQ ID NO: 124953 - DNA, 1461 bp, Homo sapiens
ttaaacacgaggcatataggtctgattccgatattcaattggagtcagaccttttaatttcaggctaattcttctgctgttgtagtattcaatatattccgtaacagcatccttcagttcgcttatattactgaactcatcaagataaaaacactccgactttaaggttccaaagaaacactccaccacagcattatccagacaattgccttttctggacatgctttgtttaataccatgttctttaaggatattttgatatcttctcatacgatactgccatccctggtcagagtgcagaacaggatgctcgtgaggattaagctttttgaatgcctgatcgagcatattctcaaccatgttcatcactggtctttccgaaaggctgtaagaaataacttcgttgttgaagagatctattactggagacaaatacagcttgcgcccattgactgcaaattcagtaacatcggtaacccacttctcgtttggccgcgtagccttgaaatctcttaggagaacattaggggcggtttgccctacctctcctctgtaagagcggtatcgcttgaccttaatcgctgctttaagtgagagggttcccatcaggcgctgaacagctttatggttaatctgtatcccttttgatccttttgccaaacttgtcaaactcaggggaactggcttcccagttgcccctttgccatattccaagtccccctcagacttcatgtctctgctcatcagcactgtcccaggatcgcaactctgacagccaatacaacgggcagaattggtctgcaccacctgctcgcccatcgtcagcgcccccacggggcaagcgccaacacaaggggcgttttcacactgatggcacatcaccggcgcactgatgctgtccagtcgctgtaccttcagccggggtaaaaagacatcggcattcaactcctgttcggacgaggacgacggcgaccatccgcaccgctcccggtcaggatgaccaatccgagcgaacatttggtaaaaatcgatggtgtcattttgcacggcaacgggcagatgcagaatggtcacgcactcgaaggataaatgggcagtgttcatggcgattgtgcacagcgaccagcgtaattcatcaatctcctccatcgagcaataatttaattgctgaatgaatcgctgccaggcggagggcagaaaacgttcactatcagaggcaagtaacgcacgaaaggcgagcagaatttcatgttctgctacctcatattcttctggttgccaaacagatttagcaggcgactgcgcaatccgtagcgcctcctcatacgcctgacgaagttgtttaaaaccctgcggatcggtttctggatgaaaggacggtaacagcgccagataagcgcggcggataatatcgacgtcagtcgtttcctctatatcgaggatcttccagcaatttttcat

SEQ ID NO: 124954 - DNA, 1782 bp, Homo sapiens
atgagcgaaagtaataagcaacaggcagtgaataagttgacagagattgtcgctaactttaccgccatgatttctacccgaatgcctgatgacgtggtggataaactaaaacagctaaaggatgccgaaacgtcgtcgatggggaaaattatctaccatacgatgttcgacaacatgcaaaaagcgattgacctgaatcgtcctgcctgtcaggacaccggggagattatgttcttcgttaaagtcggttcccgcttcccactgcttggcgagctgcaaagcatactcaaacaagccgtggaagaggcaaccgtcaaagcgccactacgtcacaatgcggtagaaatttttgacgaagtaaacaccggcaaaaataccggtagcggcgtaccgtgggtcacctgggacatcatccccgacaatgacgatgcggaaatcgaagtttacatggcaggcggcggctgcacgctacctggccgctcgaaagtgttaatgccgtcagaaggctacgaaggcgtggtgaaattcgtcttcgaaaatatctccaccctcgccgtaaacgcctgtccaccggtactggtgggcgtgggcatcgccacctcggtggaaaccgccgccgtactctcgcgtaaagccattttgcgcccgattggcagccgccatcccaatccaaaagcggcagaactggagctacgcctggaagaaggactcaaccgtctggggattggtccacaagggctgaccggcaacagttcagtgatgggcgtacatatcgaatctgccgcccgccatccgtcaaccatcggcgttgctgtctctaccggctgctgggcgcatcgtcgcggcacgctgctgcgcgttatgaaaaagatcctgacaaccccgatcaaagctgaagatctgcaagatattcgcgtcggcgatgtgatctacctgaccggtacgctggtgacctgccgcgacgtttgtcaccgccgtttgatcgaactgaaacgtccgatcccttacgatctcaacggcaaagcgatgttcctatacttatatggtatgctgtttgaaacgaaggtgaagaactgcgcacgtggcaaccgacggccaccgtctggcggtctgttcaatgccaattggtcaatctttgccaagccattcggtgatcgcgtgattgaactgatgcgtatgctcgacggcggcgacaatccgctgcgcgtacagattggcagcaacaacattcgcgcccacgttggcgactttatcttcacctccaaactgaacccggacaaacatctggaagctggctgcgatctgctcaagcaggcgtttgctcgcgcggcgattctctctaacgagaaattccgcggcgtacgtctttatgtcagcgaaaaccagctgaaaatcaccgccaacaacccggaacaggaagaagcggaagagatcctcgacgttacctatagcggtgcggagatggaaatcggcttcaacgtcagttatgtgctggatgttctgaacgcgctgaaatggcgaaaacgtccgcatgatgctgaccgattcggtttccagcgtgccaacggcagtggcaaaaccagcgtgctggaagccatctatacgctcggccatggtcgggcgtttcgcagtttgcagattggtcgcgtcattcgccatgagcaggaggcgtttgttctccacgggcgattacagggcgaagagcgcgagacagcgattggcttaaccaaagacaaacagggcgacagcaaagtccgcatcgacggtacagacgggcataag

SEQ ID NO: 124955 - DNA, 1178 bp, Homo sapiens
atgaaatcgttaattatcgttaatccggctgactgtattggctgccgtacttgtgaagtagcctgtgtggtcgctcacccttcagaacaggagttgaatgccgatgtctttttaccccggctgaaggtacagcgactggacagcatcaaaagattttgggagcaaatgatgcgcatagttaccgctgccgtcatggcctcaacgctggcagtcagttcattaagccacgctgctgaagtcggttcaggcgataactggcatccgggtgaagaacttacgcagcgcagtacgcagagccatatgttcgacggcataagtttaaccgaacatcagcgtcagcagatgcgagatcttatgcaacaggcccggcacgaacagcctcctgttaatgttagcgaactggagacaatgcatttccctggtatgctgtttgaaaccgaaggtgaagaactgcgcaccgtggcaaccgacggccaccgtctggcggtctgttcaatgccaattggtcaatctttgccaagccattcggtgatcgtaccgcgtaaaggcgtgattgaactgatgcgtatgctcgacggcggcgacaatccgctgcgcgtacagattggcagcaacaacattcgcgcccacgttggcgactttatcttcacctccaaactggtggatggtcgcttcccggattatcgccgcgttctgccgaagaacccggacaaacatctggaagctggctgcgatctgctcaagcaggcgtttgctcgcgcggccgattctctctaacgagaaattccgcggcgtacgtctttatgtcagcgaaaaccagctgaaaatcaccgccaacaacccggatcaggaagaagcggaagagatcctcgacgttccctatagcggtgcggagatggaaatcggcttcaacgtcagttatgtgatggatgttctgaacgcgctgaaatgcgaaaacgtccgcatgatgctgaccgattcggtttccagcgtgcagattgaagatgcggccagccagagcggcggcttatgttggcatgcccatgagactggaaggttctccaccgcttggtaatcccgaattccaaaagatatcatcgccctgtgctctgtatatcgccctgtgctctaaagccaggcaccacacaggacgatatctcggactatgtggcctctaa

SEQ ID NO: 124956 - DNA, 1986 bp, Homo sapiens; identical to SEQ ID NO: 123025

SEQ ID NO: 124957 - DNA, 1516 bp, Homo sapiens
atggccttcggcctgttctggctgatctggattttaatgtccaccatcactcgcggtatcgacggtatgtcgctggcgctgttcactgaaatgacgccgccgcccaatacggaaggtggtggtctggcgaacgctctggcgggtagcgggctgttaattttgtgggccacggtattcggtacgccgctgggcattatggcggggatttatctggcggaatatggtcgtaaatcctggctggcagaagtgattcgcttcattaacgacattctgctctctgcgccgtcgattgtggttggtctgtttgtttacaccattgtggtggcgcagatggagcacttctccggctgggcgggcgtgattgccctggcgttgttgcaggtgccgattgttatccgcaccaccgagaacatgctgaaactggtgccgtacagcctgcgtgaagcggcttatgcgctgggtacaccgaagtggaagatgatctctgcgattacgctgaaaagcgcggtggtcgggaatatgacccggatcctgcctgcgaatggccccaattgtggtgaaaaccgcgccgctgctgtttaccgcgctctccaaccagttctggagcacggacatgatgcagccgatcgccaacctgccggtgacgatctttaagtttgcgatgagcccgtttgcggaatggcagcaattggcctgggccggggttcgtaatttgaacttctactacggcaaattccatgccctgaaaaacatcaacctggatatcgctaaaaaccaggtctgtgtctgttataaccagtgcacagaatccctggtaaatggactgtacgctaatgcagcacatttggtcagtgtaggccaaaggagcaccggtaattcgtcagtgattaaagctcggcagggtagttccatccggccaatgattgtcaagtacagtgcgctttgtttatgccgtatgcggtctgagcgctttatccgtcgtacaaagcatcgcaaattcgatagattgcaatgcacttgtaggcctgataagcgtagcgcatcaggcaatttggcgtttgtcatcagtctcaggccggtgccgctggttgccgttgtttttgcgcttttcgccgcttttcccatgttttccgacgtcagcattcagttacgtcactttatttttgccaactttctgcctgctactggcgatgttattcagcggtatatcgaacaatttgttgccaattccaacaagatgaccgccgttggggcgtgcgggctgatcgtcaccgcgttattgttgatgtactccatcgatagcgcgttgaataccatctggcgcagtaaacgagcgcgaccaaaaatttactcgttcgccgtgtactggatgattttaacgctggggccgctgctggcaggggccagtctggcgatcagttcctatttgctatccaagcaatgggctatcgatatcgattccgtcaatagattaggtgccattatcctaacggcactcattacaggtgacacataa

SEQ ID NO: 124958 - DNA, 1497 bp, Homo sapiens; identical to SEQ ID NO: 124494

SEQ ID NO: 124959 - DNA, 1005 bp, Homo sapiens; identical to SEQ ID NO: 124510

SEQ ID NO: 124960 - DNA, 1659 bp, Homo sapiens
ctatatttccagacatctgttatcacttaacccattacaagcccgctgccgcagatattcccgtggcgagcgataacccagcgcactatgcggatgccattcgttataatgctcgaacgcctctgcaaggttctttgctgccgttaacccgtctggtttgggcatgatactgatgtagtcacgctttatcgttttcacgaagctctctgctattccgttactctccggactccgcaccgccgtgttcttcggttcaagtcccaacatccgggcgaactggcgtgtttcattagcccggtagcatgaaccattatccgtcagccactccactggagacgacggaagatcgttgccgaagcggcgttccaccgctcccagcatgacgtcctgtactggttcactgttgaagccgccgttagtgaccgcccagtgcagtgcctcacgatcacagcagtccagcgcgaacgtgacacgcagtctctctccgttatcacagcagaactcgaacccgtcagagcaccatcgctgattgctttctttcacggccactctggcggcgagaaccaccccagcgagcagccagatcatccccggcaggtagcccatttgcgccgccagtaccggccccaccagcggacctgctccggcaatggccgcaaaatggtgaccgaacagcactttcttgtccgtcggcacatagtccagcccgtcgttatggcgcaccgctggcgtcatacgcgtcgggtcaaccgccagcacatttttggcgatatacagcccataaaaacggtaagcgatcagatagatacagaccgacgccaccacaatccacagcgcgttgatctgttccccacgatttaaagcaatgtatcccagagcaaatgctcccattacagagagcactgtccagacgaggtatttccctgatttgttcatagttgttatccgtgtgcgtgtccatagagatgttacattttgtttcaccgaaggaatgataccgctgacttcagccaggattgccggctctttcggacgacgtgcttcgaacaggtccgcaacgcgcggcagaccaccggtgatgtccttggtaccgccggattcctgcggaatacgcgccagggtgtcaccagagctgatctgtacgccatcttccagctgaacaatcgctttacccggcaggaagtactgcgctggcatatcggtacctgggatcagaacgtcgttaccctgagcatcaacgattttcagtgccggacgcagatctttaccacctgcggtacgttctgcggaatccagaaccaccagcgaagacagaccggtcagttcgtcggtctgacgcgtaatggtctggccgtcgatcatgtcagtaaagcgtacaaaaccgcttacttcggtgataaccggcatggtgtgcgggtcccagtttgcaacggtttcgccgccagcaacctgttcgccatcgcctttcgccagtaccgcaccgtaaggtactttgtagcttttgaccaacatcttgatataccatatctttgaacactggcagaatattaacagcctgccaagttggccgcctggatatacctcgtactggcaatgccggagaaacagctcatatggcagcattaaagcaaacctctcgctgagctggaagcgagccat

SEQ ID NO: 124961 - DNA, 1115 bp, Homo sapiens
atgtaccaacagtccctgtacgttgttcgtgtgattgttctcatactgttaatctcagcctgtcgcaagtacgatgtaatgactctcaagagccgtgattggacggcctttattgatagcaagcgcccttattgcccggggatggggagtaagcttagtcagccgtgtctccgggtgtcgcgtgcgcagttgcacgtcattctcagacgaaccgatgactggatggatggccgccgcagtcgtcacactgatgatacggatgtgcttctccgtatacaccatgttatcggagagctgccaacgtatggttatcgtcgggtatgggcgctgcttcgcagacaggcagaacttgatggtatgcctgcgatcaatgccaaacgtgtttaccggatcatgcgccagaatgcgctgttgcttgagcgaaaacctgctgtaccgccatcgaaacgggcacatacaggcagagtggccgtgaaagaaagcaatcagcgatggtgctctgacgggttcgagttctgctgtgataacggagagagactgcgtgtcacgttcgcgctggactgctgtgatcgtgaggcactgcactgggcggtcactaccggcggcttcaacagtgaaacagtacaggacgtcatgctgggagcggtggaacgccgcttcggcaacgatcttccgtcgtctccagtggagtggctgacggataatggttcatgctaccgggctaatgaaacacgccagttcgcccggatgttgggacttgaaccgaagaacacggcggtgcggagtccggagagtaacggaatagcagagagcttcgtgaaaacgataaagcgtgactacatcagtatcatgcccaaaccagacgggttaacggcagcaaagaaccttgcagaggcgttcgagcattataacgaatggcatccgcatagtggtaccagggggcgaagggcgagattctctgtgcgcgcgacttacgcggccgggcgcttagcgaccatccctgggtaccgcgggggacctctcggcctgatgtgtggacaacccaataggaaacccacggatggtgccaatgagcggctgacgatgatccgcgctgctaccgcgatgagcgaagg

SEQ ID NO: 124962 - DNA, 727 bp, Homo sapiens
atgattgatgtcttagggccggagaaacgcagacggcgtaccacacaggaaaagatcgcaattgttcagcagagctttgaaccggggatgacggtctccctcgttgcccggcaacatggtgtagcagccagccagttatttctctggcgtaagcaataccaggaaggaagtcttactgctgtcgccgccggagaacaggttgttcctgcctctgaacttgctgccgccatgaagcagattaaagaactccagcgcctgctcggcaagaaaacgatggaaaatgaactcctcaaagaagccgttgaatatggacgggcaaaaaagtggatagcgcacgcgcccttattgcccggggatggggagtcacagacacccaacacagcatccagggtactcccattttccagcacaggtgcacccagccaggccatcatgcagccaggggctgcacaagcaaccatgtcaatcattgtgccacacacatcatctcttgcggccatcctgacacacattcatcagtctgtccaggttggctttcaggtcatgtcgtcagtcacaatcacaccagcacagcaagcacattcccgacatgcagacctcaccgttcaacttgcaccagcaacccaatccttcatgcatcctcactggtggcacagcccccaggggcacagtccatcaacaaggcagtccagcaacgaccatcatccccatcatcctgcaagtcaag

SEQ ID NO: 124963 - DNA, 2615 bp, Homo sapiens
atggccaaagagatcagcagtgaacttctgaacaccattcttacccgtgtcggcggaccgggaaatatcgccagttgtggtaactgtatgacgcgcctgcgtctgggtgtacatgacagttcactggttgatcccaatatcaaaacgctggaaggcgtgaagggcgtcattttgaccagcgaccaggtgcaggtcgtttttgggcctggtaaagcgcatcgtgccgcaaaagcgatgagcgagctgctgggagaagcaccggtacaggatgccgcagaaatcgccgcccagaacaaacgtcagttaaaagccaaacaaacctccggcgtgcaacaatttctcgccaaattcgccaccatcttcacgccgctgatccccggttttattgccgccggtctgctgctggggatagcgacgttaattgccacggtgatgcacgttccggcagatgctcagggaacactacccgatgcgctgaatttcatgaaggtgctcagcaaagggtaccgagctcacagtcgtatacagggtaccgagctaactaccgttgatggttgcaagcgttttttcaccactcaaccaggtgtggttgatcgcgctttgttcggcatgaacggtttgctgcattgtcgcaccaataaattccatattggcaccgaaataccaggttccgctcacaccgcgcgcaattgcgccaacattaaaattcgacaatggctaacgctgctgtcggcgtttgtggcatcgatttttaacggcgttttcggtctgctgatggcgtggatcctaacccgctatcgcttcccaggccgcacgctgcttgatgcgctgatggatttaccctttgcgctgccaacggctgtcgccggtttaacgctggcctcgctcttttccgtaaacggtttttacggtgaatggctggcgaagtttgatatcaaagtcacctatacatggctggggattgcggtggctatggcctttaccagcattccgtttgtggtgcgtaccgtgcagccggtgctggaagagttaggcccggaatatgaagaagcggcggaaacgcttggtgcaacgcgctggcagagtttctgcaaagtggtgctgccggagctttctccggcgctggtggcgggcgtggcgctgtcgtttacccgtagtcttggtgaatttggcgcggtgatttttatcgccggaaatatcgcgtggaagacggaagtgacgtcgctgatgatttttgtgcgcttacaggagtttgattacccggcagcgagcgcgattgcttcgttgcacgtcattctcagacgaaccgatgactggatggatggccgccgcagtcgtcacactgatgatacggatgtgcttctccgtatacaccatgttatcggagagctgccaacgtatggttatcgtcgggtatgggcgctgcttcgcagacaggcagaacttgatggtatgcctgcgatcaatgccaaacgtgtttaccggatcatgcgccagaatgcgctgttgcttgagcgaaaacctgctgtaccgccatcgaaacgggcacatacaggcagagtggccgtgaaagaaagcaatcagcgatggtgctctgacgggttcgagttctgctgtgataacggagagagactgcgtgtcacgttcgcgctggactgctgtgatcgtgaggcactgcactgggcggtcactaccggcggcttcaacagtgaaacagtacaggacgtcatgctgggagcgtttttcaacgtgctgctggccgatacccccggcttggacatcgacacgctggacaaagacgtggctcacgacagccgctctatccagcctgcgatgctgcgcgacgacgaaatcctcacccatccggtgtttaatcgctaccacagcgaaaccgaaatgatgcgctatatgcactcgctggagcgtaaagatctggcgctgaatcaggcgatgatcccgctgggttcctgcaccatgaaactgaacgccgccgccgagatgatcccaatcacctggccggaatttgccgaactgcacccgttctgcccgccggagcaggccgaaggttatcagcagatgattgcgcagctggctgactggctggtgaaactgaccggttacgacgccgtttgtatgcagccgaactctggcgcacagggcgaatacgcgggcctgctggcgattcgtcattatcatgaaagccgcaacgaagggcatcgcgatatctgcctgatcccggcttctgcgcacggaactaaccccgcttctgcacatatggcaggaatgcaggtggtggttgtggccggctcatcacaaacttacgttgagggtagatctcacgtagcttatccatcacttcgaagatattttgctgcaatggcatctggtcatgcccattcggcagcaaaatctctttggttacagacgctttttccagcacgtcaaaataactgtcgaggcgtttacgtaatccgttttcgtcggcaggtaagtacttaccgatggcgtagcccagcggcagcacctgcgccgtcacttcgctaccgtcactgctttgccacaaaaactcggttttatcagtaccgtggcgctccgaacatccgcgccagaacatg

SEQ ID NO: 124964 - DNA, 1164 bp, Homo sapiens
atggaccagtgtccttataaaagaggcgccagagagctgctttgccccttccaccatgtggagacacagagagaaggtgccatctctgagaaagtgggtccacatcagataccaaatctattggaccttggtcatgacttcgatgactggatggatggccgccgcagtcgtcacactgatgatacggatgtgcttctccgtatacaccatgttatcggagagctgccaacgtatggttatcgtcgggtatgggcgctgcttcgcagacaggcagaacttgatgagtggaccgtgaaagaaagcaatcagcgatggtgctctgacgggttcgagttctgctgtgataacggagagagactgcgtgtcacgttcgcgctggactgctgtgatcgtgaggcactgcactgggcggtcactaccggcggcttcaacagtgaaacagtacaggacgtcatgctgggagcggtggaacgccgcttcggcaacgatcttccgtcgtctccagtggagtggctgacggataatggttcatgctaccgggctaatgaaacacgccagttcgcccggatgttgggacttgaaccgaagaacacggcggtgcggagtccggagagtaacggaatagcagagagcttcgtgaaaacgataaagcgtgactacatcagtatcatgcccaaaccagacgggttaacggcagcaaagaaccttgcagaggcgttcgagcattataacgaatggcatccgcatagggcaaatccagatgccaacgtagtcagcgaagatgtgctgcgtgagagcgtcggtaagtcggtcgttaaccttattcacggcgtgcgtgatatggcggcgatccgccagctgaaagcgacgcacactgattctgtttcctccgaacaggtcgataacgttcgccggatgttattggcgatggtcgatgattttcgctgcgtagtcatcaaactggcggagcgtatggctcatctgcgcgaagtaaaagatgcgccggaagatgaacgtgtactggcggcaaaagagtgtaccaacatctacgcaccgctggctaaccgtctcggaatcggacaactgaaatgggaactggaagattactgcttccgttacctccatccataccgaatacaaacgaattgccaaactgctgcatga

SEQ ID NO: 124965 - DNA, 1936 bp, Homo sapiens; identical to SEQ ID NO: 124523

SEQ ID NO: 124966 - DNA, 1662 bp, Homo sapiens; identical to SEQ ID NO: 124524

SEQ ID NO: 124967 - DNA, 1281 bp, Homo sapiens
tcatgcaaaataactttgatttctcttatatctagcccagtctgtttcttggtctacaatcgcatgaacttgtaacatttcggcattttgttcttcatcaatttgtatcaatccatattttgaaaagaaagctaaagtcatttgtattttttcgacatcttcatccaagctaagcgataattcttcagaaagattatcaagtgctccttcataataaagaacaccttcattacttaacgactgcagcatcatgcgctgataaatgagcaccattgtatctccaccagcagattttcttggggatcctctgatcggcatgagtgtaggttgcatgaagggatgtggcagacatcgttttgcctgtccaatagccccccacttcctggtcatagaaccccagtcagctttgggaagctgcccctccccagtggaagtggatccagggggctggtaaggtgtcctgtcaactctcaagagctgcagaccagctgggtcgccagcaccacatttctgatccttgcttttcaatagttcctttaattctttgatttgctgcatattttccaataaatcctgccgttctgaagttagctccagtagccttgtatgcggatgccattcgttataatgctcgaacgcctctgcaaggttctttgctgccgttaacccgtctggtttgggcatgatactgatgtagtcacgctttatcgttttcacgaagctctctgctattccgttactctccggactccgcaccgccgtgttcttcggttcaagtcccaacatccgggcgaactggcgtgtttcattagcccggtagcatgaaccattatccgtcagccactccactggagacgacggaagatcgttgccgaagcggcgttccaccgctcccagcatgacgtcctgtactgtttcactgttgaagccgccggtagtgaccgcccagtgcagtgcctcacgatcacagcagtccagcgcgaacgtgacacgcagtctctctccgttatcatttaaatgcaaatttacaactttagcaacacaacccatctcacgaatcacaacacatttctcacatttcacaagacgttcaccgcagaaaccttccagcacataggaccacagcccactaccgacacgccttaccacactgctgaagcctactgctgtcagctcgtcaaactcatccgccgtcaagctttgcgccgttgctggcaaggagcagcaatcctgaagtgcaactccaagccgacgaaccactgcacctcctagacctcccat

SEQ ID NO: 124968 - DNA, 2373 bp, Homo sapiens
atgtcatatttgccacacagcagcctggtggccctgcctgttgcctttgaaagagagcctgccgtgatcctggctgtttctgtctccaggtatgatgaagaattggcccagggtgacggggctgaccgggagctgagaagccgtcagggtgatctgaaagtagagatgatggcaggggggactcagatcacacccctgaatgacaatgtcaccatattctgcaatatcttttattcccaacccctcaacatcacgtctatgggtatcacctggttttggaagagtctgacgtttgacaaagaagtcaaagtctttgaattttttggagatcaccaagaggcattccgacctggagccattgtgtctccatggaggctgaagagtggggacgcctcactgcggctgcctggaatccagctggaggaagcaggagagtaccgatgtgaggtggtggtcacccctctgaaggcacagggaacagtccagcttgaagttgtggggcccacaatgaaggcccagggccccccgccgccgacaacgaccgcaacgccacaccggcagcgccgccacctcggccacccgcagccacctccgcgactagtcattggagaacagatgattgatgtcttagggccggagaaacgcagacggcgtaccacacaggaaaagatcgcaattgttcagcagagctttgaaccggggatgacggtctccctcgttgcccggcaacatggtgtagcagccagccagttatttctctggcgtaagcaataccaggaaggaagtcttactgctgtcgccgccggagaacagttgcacgtcattctcagacgaaccgatgactggatggatggccgccgcagtcgtcacactgatgatacggatgtgcttctccgtatacaccatgttatcggagagctgccaacgtatggttatcgtcgggtatgggcgctgcttcgcagacaggcagaacttgatggtatgcctgcgatcaatgccaaacgtgtttaccggatcatgcgccagaatgcgctgttgcttgagcgaaaacctgctgtaccgccatcgaaacgggcacatacaggcagagtggccgtgaaagaaacaatcagcgatggtgctctgacgttctgctgtgataacgaagagagactgcgtgtcacgttcgcgctggactgctgtgatcgtgaggcactgcactgggcggtcactaccggcggcttcaacagtgaaacagtacaggacgtcatgctgggagcggtggaacgcagcttcggcaacgatcttccgtcgtctccagtggagtggctgacggataatggttcatgctaccgggctaatgaaacacgccagttcgcccggatgttgggacttgaaccgaagaacacggcggtgcggagtccggagagtaacggaatagcagagagcttcgtgaaaacgataaagcgtgactacatcagtatcatgcccaaaccagacgggttaacggcagcaaagaaccttgcagaggcgttcgagcattataacgaatggcatccgcatagggcaaatccagatgccaacgtagtcagcgaagatgtgctgcgtgagagcgtcggtaagtcggtcgttaaccttattcacggcgtgcgtgatatggcggcgatccgccagctgaaagcgacgcacactgattctgtttcctccgaacaggtcgataacgttcgccggatgttattggcgatggtcgatgattttcgctgcgtagtcatcaaactggcggagcgtattgctcatctgcgcgaagtaaaagatgcgccggaagatgaacgtgtactggcggcaaaagagtgtaccaacatctacgcaccgctggctaaccgtctcggaatcggacaactgaaatgggaactggaagattactgcttccgttacctccatccaaccgaatacaaacgaattgccaaactgctgcatgaacggcgtctcgaccgcgaacactacatcgaagagttcgttggtcatctgcgcgctgagatgaaagctgaaggcgttaaagcggaagtgtatggtcgtccgaaacacatctacagcatctggcgtaaaatgcagaaaaagaacctcgcctttgatgagctgtttgatgtgcgtgcggtacgtattgtcgccgagcgtttacaggattgctatgccgcactggggatagtgcacactcactatcgccacctgccggatgagtttgacgattacgtcgctaacccgaaaccaaacggttatcagtctattcataccgtggttctggggccgggtggaaaaaccgttgagatccaaatccgcaccaaacagatgcatgaagatgcagaattgggtgttgctgcgcactgggaaatataa

SEQ ID NO: 124969 - DNA, 1651 bp, Homo sapiens; identical to SEQ ID NO: 124527

SEQ ID NO: 124970 - DNA, 2124 bp, Homo sapiens
atgattccacagatttcccaggcacccggcgtcgttcaactggtgcttaattttttgccagagctggagcaacaaggttttaccggcgatacggcgacaagttatgccgatcgtctgacaatgtcgaccgacaacagtatttaccaacttctccccgatgcggtggtatttccgcgttcaaccgcagatgtggcgctgatcgcccgtcttgccgcgcaggaacgctattcatcgctgatctttaccccccgcggcggcggcaccggcactaacggtcaggcgctcaaccaggggattattgttgatatgtcccgccatatgaaccgcatcatcgaaattaaccctgaagagggctgggtgcgcgttgagcccggggtgataaaagatcaactcaatcagtacctgaaaccgttcggctacttttttgcgccggaactttcgaccagcaaccgggcaacgctcggtgggatgatcaataccgatgcatccggtcagggatcgctggtctatggcaaaacgtcagatcacgtacttggcgtacgcgcggtgttgttggggggcgatattctcgatacgcaacctttacccgtcgaattggcggaaacgctgggtaaatccaataccacaatcgggcgaatttataacacggtttatcaacgttgccgtcagcaacgccagttaattatcgacaacttccccaaacttaaccgctttcttaccggttacgatctgcgtcatgtctttaacgatgagatgaccgagttcgacctgacgcgcattctgacgggttcagaagggacgctggcctttattaccgaagcgcggctggatattacacgcttgcctaaagtgcgccgtctgaataatcatttgcagcgtccgcctgctgctgtgttatacgccgatgaactggcaaaattaaaacaaaatgataacgcaccttgcccgcccggttggcagttaagtttgcctgcggcccgtgcttttatccttggcgacgaagcgcaaaatatcagccgtaaagtggtgattagcccctccgctgtcgaacgtatgttagtcactcttgctaccggccgcggtttgatgttggtgggggaaccgggtaccgcaaaatctcttctttctgaattactggcaaccgctattagcggcgatgccgggttaaccatccagggcggggcatctaccaccgaagatcaaatcaagtatggctggaactacgccctgcttatcaatcatggtccgtcaacggaagcgctggtccctgccccgctttatcagggaatgcgcgacggcaaaatcgtccgtttcgaagagataacgcccagagtgcccgtgaaagaaagcaatcagcgatggtgctctgacgggttcgagttctgctgtgataacggagagagactgcgtgtcacgttcgcgctggactgctgtgatcgtgaggcactgcactgggcggtcactaccggcggcttcaacagtgaaacagtacaggacgtcatgctgggagcggtggaaacgccgcttcggcaacgatcttccgtcgtctccagtggagtggctgacggataatggttcatgctaccgggctaatgaaacacgccagttcgcccggatgttgggacttgaaccgaagaacacggcggtgcggagtccggagagtaacggaatagcagagagcttcgtgaaaacgataaagcgtgactacatcagtatcatgcccaaaccagacgggttaacggcagcaaagaaccttgcagaggcgttcgagcattataacgaatggcatccgcatagtgcgctgggttatcgctcgccacgggaatatctgcggcagcgggcttgtaatgggcgcgccggagttttatccagcgggactctagagatccccgataccgagctccgattcgaatccatccgctgcccggtgcaaatcatctccgccagtgataatctgctggtgccaacagcatgttccagtgaacttcatgccgccctgcccgatagccagaaaatggtgatgccctatgccggacacgcctgcaacgtgaccgatcccgaaacgtttaatgctctgttactcaacgggcttgccagcctgttacatcaccgtgaagccgccct

SEQ ID NO: 124971 - DNA, 1581 bp, Homo sapiens
atgattaatatgttaaaggatttagtggaaaatgtggaccacatgcacgaacatatacagaatttcagcagagatggaaatgattcaaaaaagaataaattggatacactagacatgaaaaacatgttattatggatgaggaattccttcaattgccttatcagcagactagagatagaagaaagaattagtaaacttgactacagactagtcattggagaacagatgattgatgtcttagggccggagaaacgcagacggcgtaccacacaggaaaagatcgcaattgttcagcagagctttgaaccggggatgacggtctccctcgttgcccggcaacatggtgtagcagccagccagttatttctctggcgtaagcaataccaggaaggaagtcttactgctgtcgccgccggagaacaggttgttcctgcctctgaacttgctgccgccatgaagcagattaaagaactccagcgcctgctcggcaagaaaacgatggaaaatgaactcctcaaagaagccgttgaatatggacgggcaaaaaagtggatagcgcacgcgcccttattgcccggggatggggaacgaaccgatgactggatggatggccgccgcagtcgtcacactgatgatacggatgtgcttctccgtatacaccatgttatcggagagctgccaacgtatggttatcgtcgggtatgggcgctgcttcgcagacaggcagaacttgatggtatgcctgcgatcaatgccaaacgtgtttaccggatcatgcgccagaatgcgctgttgcttgagcgaaaacctgctgtaccgccatcgaaacgggcacatacaggcagagtggccgtgaaagaaagcaatcagcgatggtgctctgacaggttcgagttctgctgtgataacggagagagactgcgtgtcacgttcgcgctggactgctgtgatcgtgaggcactgcactgggcggtcactaccggcggcttcaacagtgaaacagtacaggacgtcatgctgggagcggtggaacgccgcttcggcaacgatcttccgtcgtctccagtggagtggctgacggataatggttcatgctaccgggctaatgaaacacgccagttcgcccggatgttgggacttgaaccgaagaacacggcggtgcggagtccggagagtaacggaatagcagagagcttcgtgaaaacgataaagcgtgactacatcagtatcatgcccaaaccagacgggttaacggcagcaaagaaccttgcagaggcgttcgagcattataacgaatggcatccgcatagtgcgctgggttatcgctcgccacgggaatatctgcggcagcgggcttgtaatgggggcaaatccagttgtgcaccacgcgatgaccgtaaagttcgcgtgatggcagccgattatgaaaatcagctcgacgagttttccctcgatgcgcccattgtcgcacatgaaaactatcaatgggctaactacgttcgtggcgtggtgaaacatctgcaactgcgtaacaacagcttcggcggcgtggacatgagatcagcggcaatgtgccgcagg

SEQ ID NO: 124972 - DNA, 2592 bp, Homo sapiens
atgaaagatgagttggatgtgccacgtgaagagggtagtatagaaccccagaggagtaggtttgtcttcaacaaaccttcagttgtcctgaagacaaacctaattctggagacttcatataatctagaagagacaagcaaactgatgaaaaatagtgaatttttaaggaaagagaccacccttccccataaagaccttccttttgctgcgctggcgttgaccgctgggggcttaaataaaaaacatcgattgtgtgggggtgtaacatcaatgaataacggggcgccgatggtccattctcatgagtcacatgacgaagggaaagagaggaaatcaactgtgacaactgccctcaaatttggcttccttaaaattacagttcaaaaagtttgggaaatccatgcaggcttgaggaacagcaatactgtgacaattacctcagtacagaaagatgaggaaactgagagattaaggaaacgatccctgagagactctgttctgacttccaaatcgggaatagcttatcttgttaaagtgtcagaaggagacttaagaaaagccattacatttcttcaaagcgctactcgattaacaggtggaaaggagatcacagagaaagtgattacagacattgctgggatgattgatgtcttagggccggagaaacgcagacggcgtaccacacaggaaaagatcgcaattgttcagcagagctttgaaccggggatgacggtctccctcgttgcccggcaacatggtgtagcagccagccagttatttctctggcgtaagcaataccaggaaggaagtcttactgctgtcgccgccggagaacaggttgttcctgcctctgaacttgctgccgccatgaagcagattaaagaactccagcgcctgctcggcaagaaaacgatggaaaatgaactcctcaaagaagccgttgaatatggacgggcaaaaaagtggatagcgcacgcgcccttattgcccggggatggggaacgaaccgatgactggatggatggccgccgcagtcgtcacactgatgatacggatgtgcttctccgtatacaccatgttatcggagagctgccaacgtatggttatcgtcgggtatgggcgctgcttcgcagacaggcagaacttgatggtatgcctgcgatcaatgccaaacgtgtttaccggatcatgcgccagaatgcgctgttgcttgagcgaaaacctgctgtaccgccatcgaaacgggcacatacaggcagagtggccgtgaaagaaagcaatcagcgatggtgctctgacggtttcgagttctgctgtgataacggagagagactgcgtgtcacgttcgcgctggactgctgtgatccctgggcgacagagcgagactgtgtctcaaaaaaaaaaaaagaaggagagggagaaggagaagaggaagaggaagaggaggaacaagaagaagaaggaagagaaggagaaggagaggaagaggaagaggaggaagaagaagaagaaggaggagaaggaaaaggagaaggagaagaggaagaagaaggagagggagagggagaggaagaggaagaggaagaagaggaagaagaagaagaagaggaagaagaagaagaagaagaagaagaagaagattattcctcacatcttcctcaacctcaagcctcccagatttgtcctatgcagagtgggcagcatctccctcttgctccaaaatggatcaaaatgtttgttttggatgaagcagatgaaatgttgagccgtggttttaaggatcaaatctatgagattttccaaaaactaaacacaagtattcagggctgtaaattttggaataagaattcctggtttccacgggccatggatatccctgtaattgcagctagtgtgcacatgggagacaaccgtgaaaagactgaagtgcgggaagaagggaggagctgttgtgtttcagtgagcgcccttggcagtggcggtgacagtggctcctgttcagtggcaatggtggagcagctagcaagacatgcaaaacttattggtcctaagggagacatcggtgaaaccggagtacccggggctgaaggtccccgaggctttccgggaatccaaggcaggaaaggagaacctggagaaggtgcctatgtataccgctcagcattcagtgtctttcaaaagccgaggttttcctgtgcgctcggaggagccatagctgccagctgggctggcggcggtgcccccagcccttgtgggcggcgtgcagagctgccctgggggccgggtcccgtgggggtcgcgcagacagtgtgtccggagcgcccccggcgggagcgcaggctgcggggcgagagggaagaggaggcggcggataaggtgatggcgagaagatggaggaagagcagacgaaggaagagaaaggagatggaagagagaatgtcaccagaggagaccgaaggaacaaattttgactttgcaggagaagctgtgggccaggcagaaagaaaaggaccagctttttctgcagctgaagaaagtttccatgaggaagaaaaacggaggcgaaaggagcagagcgacctgaccttctga

SEQ ID NO: 124973 - DNA, 2724 bp, Homo sapiens
ctaccataggcatttggtacaggggtcgttgcagacgggactttccgtcaccttgaggctttggaccccaaatggggctgaagttatacacacgtgtcctccattcctgccaaccatttgagaaactctccgtgggtgatcaaataaggagcctattttctggtaaaacggcgctgatgacatatgggagatacacaagtctgagtcacttaaggcccaagttccatttgaggacagcccttgttgcaggtcgtgcagccattgcggataaaccagctgctcaaaatgcgccagtttttgcagacgggaaggttcgcttagcgcgtcactcaggatggagatatgcgttaaacctgctttttgcagtcgcgttttgacggcgtcgacatctttgtcattaccgtacagcgccaccggagcatcggttttcaggttatgttgcttgatccacgcgttgagctgttcggtgctcattttgtcaagccagctggcagagaggtttaaggcggcaagttcatgaccagaagggccatttaaggtttgtggccagccgttataaaacgcgctggggcgagtatctatcgctttgccattttgttgttgaagctggtcaagtgtaagaggcttcgccagttcagcggcccacgaagaagcgcaagccagccctaaagccattgccagcgcggtcatttgagaaacacgtttcatcgaaaatcccgacattgtagttttgagtgcgccattctgaacgacggggatcgccagggcgcgaacttcgctgaacacccactggcgaaaattatcgcgcagagccacatcaagacggctgaatggctcatccaggagtaacgcttttggttgggcgagaaaggcgcgtaatatagcaacgcgcgctcgctgaacgccagacaagtggcatgatcctgccttaggaaagtcaacaagcgtgaggcacttcgggtagtgcccaaataaggataacaaagtatcgtgatatcgtaatatcgatatggtcggcaagcttgtcaacatttgggtacacgctgctttttctgttttttttcctaggtaagcaacgccattgcggcatcgcgtaacatcggtggcaggcgtaggcgggtttgcagcataacctgtaagacataggtggtgtgggtaggggttatcacatgccaatcggcagtaactactaaaggcgcaattcagggtggtgaagcggggcagtagcgtcaggcggcgcgcagccggggtatagtatgtatccgcgtcaggcgcggccaggcggggtattggggatatcaggggcacggccgtgttcttaggataatccgcaaacagcagcccggctgctggcaaaagcagcagggccgtcgggttcgggcatattaccgccgccgcagccggcagggttgtcgtcgttgtaaaggcagagtggccgtgaaagaaagcaatcagcgatggtgctctgacgggttcgagttctgctgtgataacggagagagactgcgtgtcacgttcgcgctggactgctgtgatcgtgaggcactgcactgggcggtcactaccggcggcttcaacagtgaaacagtacaggacgtcatgctgggagcggtggaacgccgcttcggcaacgatcttccgtcgtctccagtggagtggctgacggataatggttcatgctaccgggctaatgaaacacgccagttcgcccggatgttgggacttgaaccgaagaacacggcggtgcggagtccggagagtaacggaatagcagagagcttcgtgaaaacgataaagcgtgactacatcagtatcatgcccaaaccagacgggttaacggcagcaaagaaccttgcagctcgttttggtgcgtacgattacaggaactgcaaggagagccagtacagcccgccggaaagcagtaccgcagccggaagggtaaacacccaggccatcagaatgctggtcacggttttacgatgtaagccgccaccatctaccaccatcgtccccgcgacagaagaggagatcgttgccacacggcgccagccaatcatcgtaccgatacctaacgccagcgcgaccgccatgatgatccacaccggtgcatactcgatggtgctatgccagacccggcaagcctaccggcatagtgcgattaagataacgttgatgcaggcagtaaaccgtcagcaccagggaaataatcgggaatacagaaaatggcacaatggagctaaacagcgctgcgaaactgggcggcaacgcaagttgttacagccgatggaagcaacccataaattgggcggtgaaaactatgtcctgtggggcggtcgtgaaggttacgaaacgctgttaaatcaccacttgcgtcaggagcgtgaacaactgggccgctttatgcagatggtggttgagcataaacataaaatcggtttccagggcacgttgcttatcgaaccgaaaccgcaagaaccgaccaaacatcaatatgattacgatgccgcgacggtctatggcttcctgaaacagtttggtctggaaaaagagattaaactgaacattgaagctaaccacgcgacgctggcagtgtgcacttaccagatgcactcgttgcagaaagcgcaggatattgcgcgtagcattctggaacgtgacgtacgcatcaacagcaacgaagaactggcactgccgaaagagaagttgcaggaactgcacatctag

SEQ ID NO: 124974 - DNA, 6516 bp, Homo sapiens
  misc_feature (1)...(6516): n = a,t,c or g
atgaaaattaatcgtattgttaatgagggatttatgaaaacgatgctggcagcttatttaccaggaaattcgaccgtcgatctgcgggaagttgcggtgccgacgccggggattaaccaggtactgatcaaaatgaaatcctccgggatttgcggaagcgatgtccactatatctatcatcaacaccgtgccacagcggcggcacccgataaaccgttataccagggctttatcaacggtcatgaaccgtgcgggcagattgtggcgatggggcaaggctgccgccattttaaagagggcgaccgcgtgctggtgtatcacatttctggctgtggtttttgcccgaactgccgtcgcggttttcctatttcttgtactggcgaaggaaaagcggcttacggctggcagcgtgacggcggtcatgccgaatacttgctggcggaagacaaagatctgatcctcctgccggatgcgctgagctacgaagatggtgcgtttatcagttgcggcgttggtacagcgtatgaaggaattttgcgcggcgaagtttccggcagtgataacgtgctggtggtcggtctgggcgcagtcggcatgatggcgatgatgctggcgaaaggtcgcggtgcaaaacggatcatcggcgttgatatgctgccggaacgtcctggcgatggcaaaacatttggccacggtcacttttcccaacacgaacccgatgaacttggaatgatatggccccccgccagttcgtccccactattgattccggatgtgccttctccgtataccccatgtttatcggaaagctgccaacgtatggttatcgtcgggtatgggcgttgcttcgcagacaggcagaacttgatgggtatgcctgcgatcaatgccaaacgtgtttaccggatcatgcgccagaatgcgctgttgcttgagcgaaaacctgctgtaccgccatcgaaacgggcacatacaggcagagtggccgtgaaagaaagcaatcagcgatggtgctctgacgggttcgagttctgctgtgataacggagagagactgcgtgtcacgttcgcgctggactgctgtgatcgtgaggcactgcactgggcggtcactaccggcggcttcaacagtgaaacagtacaggacgtcatgctgggagcggtggaacgccgcttcggcaacgatcttccgtcgtctccagtggagtggctgacggataatggttcatgctaccgggctaatgaaacacgccagttcgcccggatgttgggacttgaaccgaagaacacggcggtgcggagtccggagagtaacggaatagcagagagcttcgtgaaaacgataaagcgtgactacatcagtatcatgcccaaaccagacgggttaacggcagcaaagaaccttgcagaggcgttcgagcattataacgaatggcatccgcatagtgcgctgggttatcgctcgccacgggaatatctgcggcacgggcttgtttccttcataagctccttacaaaagttcatcaatgattttgctttcgaagacggtctgttcagcggctacgacgctgaaaaacgtcaatacgaaaaatcgtcctggaactatcagctcgatgaaaacggctatgcgaaacgcgatgaaacactgactcatccgcgctgtccaaaagccgacttcctgaaagtgtgtgaagtgctggcctccaccagcgcaccggatcgcacaaccaccttcctgtacgcgctgggctggacgcagcacactgtgggtgcgcagaacatccgtactatggcgatgatccagttgctgctcggtaacatgggtatggccggtggcggcgtgaacgcattgcgtggtcactccaacattcagggcttgactgacttaggcctgctctctaccagcctgccaggttatctgacgctgccgtcagaaaaacaggttgatttgcagtcgtatctggaagcgaacacgccgaaagcgacgctggctgatcaaggtgactactggagcaactatccgaagttcttcgttagcctgatgaaatctttctatgagcgatgccgcgcagaaagagaacaactgggggctttgactgcgttgccgaagtgggataaaggctacgacgtcctgcaatacttcgagatgatgaaagagggcaaggtcaatggctatatctgccagggctttaaccctgttgcctcattcccgaacaagaacaaagtgatcggttgtctgtcgaaactgaagttcctcgtcaccatcgacccactgagcactgagacctctaacttctggcagaaccacggtgagctgaacgaattgactcgtcgaagatccagaccgaagtgttccgtctgccatcgacctgcttcgcggaagagaacggttctatcgttaactcaggtcgctggttacagtggcactggaaagatgtatgccgaacagggtggcgcgaacccggaccaggtgctgaacatgacatggaactacgccattccgcatgagccatcttcagaagaagtggcgatggagagcaacggtaaggcgctggccgatattaccgatccggcaaccgagcgcgacttcgacgccattcgccctgtcttcttttctacttctcagcttggccaggctgcgccgtcttttggcggaaccactggcacacttcaggatgcctttgatctggaggcgctaaaggccctcgatatcattgtgacctgtcagggcggcgattataccaacgaaatctatccaaagcttcgtgaaagcggatggcaaggttactggattgacgcagcatcgtctttgcgcatgaaagatgacgccatcatcattcttgaccccgtcaatcaggacgtcattaccgacggattaaataatggcatcaggacttttgttggcggtaactgtaccgccgcttccggcggtggtgcgcgacatatgcgtgagttattaacccagatgggccatctgtatggccatgtggcagatgaactcgcgaccccgtcctctgctattctcgatatcgaacgcaaagtcacaaccttaacccgtagcggtgagctgccggtggataactttggcgtgccgctggcgggtagcctgattccgtggatcgacaaacagctcgataacggtcagagccgcgaagagtggaaagggcaggcggaaaccaacaagatcctcaacacatcttccgtaattccgatgtgtctattccgaccgtggaagaactgctggctgcgcacaatccgtgggcgaaagtcgttccgaacgatcgggaaatcactatgcgtgactaaccccagctgccgttaccggcacgctgaccacgccggacgtgtgcgaaaaaccggccagcaccacgctttggctggatgttgggcggacagtggactggatctgacctatcagaccctgaatgtgaagaatgacctgtcacacttcccggtgccattctttgacccgagcgataaccgcaccaacaccttgccgatggtctttgcgggtgcgccggatgttgggctgcaacaagcctctgccattgtcgcctcgtggtttggttcgcgttctggctggcgtgggcagaacttcccggtactctataaccaactgccggatcgcaatgccattgtctttgcaaccaacgacaaacggccggacttcctgcgcgatcatccggcggtaaaagccccggtgattgagatgattaaccatccgcagaatccttacgtcaaactgctggtggtgtttggtcgtgacgacaaagacctgttgcaggcagcgaaaggtatcgctcagggtaacattctgttccgtggtgaaagcgtggtagtgaatgaagtgaaaccgctgctaccgcgtaagccgtacgatgcgccgaactgngcccacaggagagcaacaatgacaatccataagaaaggtcaggcacactgggaaggcgatatcaaacgcgggaagggaacagtatccaccgagagtggcgtgctgaaccaacagccgtatggatttaacacgcgttttgaaggcgaaaaaggaaccaaccctgaagaactgattggcgcagcgcatgccgcatgtttctcaatggcgctttcattaatgctgggggaagcgggattcacgccaacatcgattgataccaccgccgatgtgtcgctggataaagtggatgccggttttgcgattacgaaaatcgcactgaagagtgaagttgcggtgccgggtattgatgcctctacctttgacggcataatccagaaagcaaaagcaggatgcccggtctctcaggtactgaaagcggaaattacgctggattaccagttgaaatcgtaaagcattgccggatgacgcgtcaggcgcgtgaatgcgtccgtcctcccttattgctaatgattgccggacttcacatccgtgggttgccagcgggcaacgttcgtagaaaaaacagccttgcggcaacgtgcggtttcccggcagatccgttttacgtaatgcccattcttcctccagcggtttatcaatggcggggagggaatccagcaataatcgggtgtatggatgtgcaggtgccgtcagcacctgctgcgcgtcgcccagttctacaatctgcccgagatacatcaccgccacccgatcgctcatatgacgtatcaccgagacattgtgtgaaatcagcacataggtcagcccgtgattttcctgtagcgttaccagtaaattgaggatctgcgcctgaacggagatatccagcgcagaggttggctcatcaagcacaatcacgtcaggctgcgaagagagtgctctggcaatggcgatacgttgccgctgcccgccggagaacgcatgaggcaggcggtgcgggttgccaccggtacaaacatcatccagtgccgcctgcgccagtgccggaatgtcttccttgcgtacaccaacatcacgcaaatgtggcgtggtcgcgctcggaccgtagcatttgcgcgaggtcacatgtgccaccagctcagcgggcgtggcatcctgcaactctgcggtagaagcgttaccggtcgccagacctgcggcttttgccatttccagaatcgttgggtgatctttttcgtgaatatcgacgcccagcgcgccgttataggttttgacaccggttgaccaggcggttgctgatgcagccgagtcggtgacgtagtccggtttgccggtttttttattcagcgcatagtgagtgtattgcccggtaagcggtaaggcatctatacctttaaaaaagccgcccgcaccttcggcataattacgtgcggcagtaatttccgagtcccccatcccatcgccaatcagcaaaataatattttttgcaggtttatcgccgttaaacggcgaacaataaccgcgcagctcttcgccgttgtggctgttcactttttcttcataagtacggaagtagccgttcagtgccggacgaccaaattcgttgttaaacgccgcgccgcccagcgggccttcggtcatgatgtccagcgcggtgacaatgcgctcaggcttaccgaaatcttcttcccacggcatcgatacccagtcggcgttaaaaattttgtggcggcagtgctcggagttcgcctgggcaaacatatacagttcgatgtcgttcgggttacgaccaagctttgtgaaagcatcctgcagatagtcaatttcatcttccgccagagccaagccaagacgcaggttagcgtcgatcagcgcctgacggccctgccccagcaaatcaacgctggtaaccggagtcggttgatggtgggcaaacaactgctctgcatcatctaaagcaaaaaagaccgtttccatcatgcggtcgtgcagttcagcggtaacctgctgccattgttcattggtcagcgtaccggctttatgcggatgccattcgttataatgctcgaacgcctctgcaaggttctttgctgccgttaacccgtctggtttgggcatgatactgatgtagtcacgctttatcgttttcacgaagctctctgctattccgttactctccggactccgcaccgccgtgttcttcggttcaagtcccaacatccgggcgaactggcgtgtttcattagcccggtagcatgaaccattatccgtcagccactccacgctcctcatgagctgcgtctgtatgtgcgtgaactgcgtgaccgtagtcgtactgtcgatgagctgaaccgtactatcgatcagctgtgccgtgaaaacgacatcaacattgcctttaaccagcttgaagtgcatctgcacaacgagaagggcgatgaggtgacggaagtaaaacgcgaccgcttcaatctttttggcggcaaaacgcccatggaacaccgctttgccgccgcccgctggcagacgggggtgaccggatgcccgcaactggaagaggctctggtttcgtttgactgccgtatcagccaggtggtgagcgtcggcacccacgacattctgttttgcgccatcgaagcgattcat

SEQ ID NO: 124975 - DNA, 3520 bp, Homo sapiens
cagatggatcgctggattagccagcaagttccgtttttattgatggttgtgcgtacggcatccccgcgaacaaactgcccggtatcaccgttttctgcatccggtcccccttccgccccggtattaacaacggtatccgttgccactgtaccgggcttgacgacctgccagcccttatcattaatgacggttcctgtggctatcgccccctcatgcatccactgttcgccaataacccagcgcactatgcggatgccattcgttataatgctcgaacgcctctgcaaggttctttgctgccgttaacccgtctggtttgggcatgatactgatgtagtcacgctttatcgttttcacgaagctctctgctattccgttactctccggactccgcaccgccgtgttcttcggttcaagtcccaacatccgggcgaactggcgtgtttcattagcccggtagcatgaaccattatccgtcagccactccactggagacgacggaagatcgttgccgaagcggcgttccaccgctcccagcatgacgtcctgtactgtttcactgttgaagccgccggtagtgaccgcccagtgcagtgcctcacgatcacagcagtccagcgcgaacgtgacacgcagtctctctccgttatcacagcagaactcgaacccgtcagagcaccatcgctgattgctttctttcacggccactctgcctgtatgtgcccgtttcgatggcggtacagcaggttttcgctcaagcaacagcgcattctggcgcatgatccggtaaacacgtttggcattgatcgcaggcataccatcaagttctgcctgtctgcgaagcagcgcccatacccgacgataaccatacgttggcagctctccgataacatggtgtatacggagaagcacatccgtatcatcagtgtgacgactgcggcggccatccatccagtcatcggttcgttccccatccccgggcaataagggcgcgtgcgctatccacttttttgcccgtccatattcaacggcttctttgaggagttcattttccatcgttttcttgccgagcaggcgctggagttctttaatctgcttcatggcggcagcaagttcagaggcaggaacaacctgttctccggcggcgacagcagtaagacttccttcctggtattgcttacgccagagaaataactggctggctgctacaccatgttgccgggcaacgagggagaccgtcatccccggttcaaagctctgctgaacaattgcgatcttttcctgttgtggtacgccgtctgcgtttctccggccctaagacatcaatcatctgttctccaatgactagtctgggccctgcgggaggagggtcagagagcgcaggccccctgtggctcgcagaggttgggggtccaggttgtggactatatccaccaatgaccagtctggtggcaatgtcaccaatgaccagcctggtggcaactccaccaatgaccagacctggggcaactccaccaatgaccagcctggtgacagctccaccaatgaccagacctggagcaagtccaccaatgaccagacctggtgtgcaactccaccaatgaccagcctggggcaactccaccaatgaccagacctggggcaactccaccaataccagacctggggcaactccaccaatgaccaggcctggggacaactccaccaatgaccagcctgggtgcaactccaccaatgaccagcctggggcaactccaccaatgaccagacctggggcaactccaccaatgaccagacctggggacgactccaccaatgaccggcctggggcaagtccaccaatgaccagacctggggcaagtccaccaatgaccagacctgaggcaactccaccaatgaccagacctggggaaactccaacaatgaccagacctggggcaactccaccaatgaccagagctggggcaactccaacaataccaggccatggggacaactccaccaatgaccagcccgatagtatgaagaagatgccagagacaaaagccagaatggtcctctgcgggcggatgtggccgatgttgctgatgacgaaggccgtgaacacgaggaagaggctgaccatggggaagggggtggccgtgcgcactgtcttcagaatattctccgtgttttccgtcaccaaattgatctccggttcaagaaaatattctgaggccacacagcgacctttctcccgacttcccacattagaggtgtttagacttaagagatcgccggcaggtacgtctctgagcgggatatgctcgatgtgccggaccgaagctcgagatgcggtctcattctgggatccgccctggtacgttccatggtcctccgcgtgcagcttacggcaaccctcaggcagccagtggctgactgcggctgaagcaaagacgacagcggcagctggaagggtctgagggctgggtggggttggagggcgcgctctgcagtcgtcccgggcgcggcctggctggctgcggccgctgggcggggcctggtggcggctgcggatgctcagcgacgctgagctaacggggcgcgtctggcgctgccgccgctgggcaccttccagggccgacaactgaggaggcggcgaccccggtggcggcggcggcggccgggggaagcctcggggccggtcatgcggctgcggggcccgcggcccggagcgtccgcccagccctgggatggaggcagccaggtggccaggtgatggtgcccgtttccgagcccacagggctgggatggaggcagccagggtggccagggtgatggtgcccgtttccgaacccacagggccaaggttcagcaggatggcgatggccgctaggatgaagcagatggcgtacaccgccacgcaccactccagggccggctggtgctggtacaggttggggtcgctgatgaacgcgaagatgatgcaggcaacgaaggtctccagcaccttcagcagcccgggtacggtggccatatagccagtgatctcgccgggccgggcccgggtccaggccacttcggtggcgtaagccacacacgcgatgcaggagaagaaggtggcggcgatggcgtggtcccgcgaacggccgtgggacaggaactggacataggtggtggggtagatgatggaggccgagaggcagaagagggccgcatagcaggcgaaggtgatggggaagttgcgccaagacagggggaagcgggcctggagcccgcacagctccacgatgaggatgatcagggtcacggagaagcagaagcaccaggtgaacatggaccagttgcccatggaccccgtccaggcgcccacgctagccaccagcgagaaggccacgcaggtagacaccagctgcagcaggcgaaggagacccaggggctgtgtcagggcccgaggggaccccacgatcatgggggaccccaggcccgaagatgacgtcgtggtggttgtgatggtggtgcgggttaccgtcactggcat

SEQ ID NO: 124976 - DNA, 3192 bp, Homo sapiens
ctaagaccagaagacaaagacttgcttcattttgcgcttaacttcagcgtaaataatgaaaggcacgaccgagccaaaggcgattagcattgtcgccagatagaccttccagtgttcagccgccgggaaccctgcatcagccagttgtccgggcagggcaacaaacgtcgacatcagcaaaatatgcagacacataatgccaaagttgagtttcagcagccgcggttccgccagcactttactgaaactgcctttcaccattccggactcacgattaagtacgtgagtgctactgttgggcacaacccaaatggtcaacgcaatgccggtcgttgccagaatagcgatcatccagaacagcgcgtgcagcccaagtttgtgagtgatgatcgggccaagcaccatcgcaatggcaaaggtaatgccaaagctcacgccgataaacgccatcgctttggtgcggttttgttcgcgcgtgagatcggaaagcagcgccataacggcggcggcaattgctccagagccttgtagcgcccggcccagaataatttcccagatggagtcggaaagcgcagcgataacgctaccggcggcaaacaccggcagcacacggcaattaatggtttgcggacaatgccgtcggaaagcagcccaacggaatcttgaaaacggtcttgctgttccgcttctgcgacagcagagagttgatcctgcaatgatgaggcgatagccggatagctgggtagaggtatacactttggtgccttccttataggttaaagaaacaccttccactaaggttttatcattcaccatagaacccgctgccgcgcctacagctccgccgccaactgcacctgccgtcggtccggaattgctgccagacccgacgttgtggccgataacaccgccagcgactgcgccaataagcgcgccggaagcttgtgcgttccgtttattttgggagttgtctacggcaacttttgcgggaagaatggaaataatattaacgggtttaggttcttggttggtattcagcggtatcaacttcttcgttaccatttgattattgcttccttcccaattctgacggttaccgtcgcgttgttgaccctggatcgctatctgggcacccatttctttaccaacgatatgggtggcaacatgatgatgtacatcaacctgatttgggcctggggccacccggaagtttacatcctgatcctgcctgttttcggtgtgttctccgaaattgcggcaaccttctcgcgtaaacgtctgtttggttatacctcgctggtatgggcaaccgtctgtatcaccgtgctgtcgttcatcgtttggctgcaccacttctttacgatgggtgcgggcgcgaacgtaaacgccttctttggtatcaccacaatgattatcgccatcccgaccggggtgaagatcttcaactggctgttcaccatgtatcagggccgcatcgtgttccattctgcgatgctgtggaccatcggttttatcgtcaccttctcgggggggcgggatgacttgattacctgaatcatccccactgtgcttgacgctatctccctgcgctacctggtacgtttcacgctggtggatgtggcaacaggtgagtgggctacctggtcgccggtgaattatgaatataaagtgcttccaccattgcccgacaagaatgaagccagtacgactgatatgacagagcagcaaatcatgcaacttaagcaaaagactatgcggatgccattcgttataatgctcgaacgcctctgcaaggttctttgctgccgttaacccgtctggtttgggcatgatactgatgtagtcacgctttatcgttttcacgaagctctctgctattccgttactctccggactccgcaccgccgtgttcttcggttcaagtcccaacatccgggcgaactggcgtgtttcattagcccggtagcatgaaccattatccgtcagccactccactggagacgacggaagatcgttgccgaagcggcgttccaccgctcccagcatgacgtcctgtactgtttcactgttgaagccgccggtagtgaccgcccagtgcagtgcctcacgatcacagcagtccagcgcgaacgtgacacgcagtctctctccgttatcacagcagaactcgaacccgtcagagcaccatcgctgattgctttctttcacggccactctgcctgtatgtgcccgtttcgatggcggtacagcaggttttcgctcaagcaacagcgcattctggcgcatgatccggtaaacacgtttggcattgatcgcaggcataccatcaagttctgcctgtctgcgaagcagcgcccatacccgacgataaccatacgttggcagctctccgataacatggtgtatacggagaagcacatccgtatcatcagtgtgacgactgcggcggccatccatccagtcatcggttcgttccccatccccgggcaataagggcgcgtgcgctatccacttttttgcccgtccatattcaacggcttctttgaggagttcattttccatcgttttcttgccgagcaggcgctggagttctttaatctgcttcatggcggcagcaagttcagaggcaggaacaacctgttctccggcggcgacagcagtaagacttccttcctggtattgcttacgccagagaaataactggctggctgctacaccatgttgccgggcaacgagggagaccgtcatccccggttcaaagctctgctgaacaattgcgatcttttcctgtgtggtacgccgtctgcgtttctccggccctaagacatcaatcatctgttctccaatgactagtccactggaagtcttgaaacgtatttcctgagggtaagggaggactgctctacttggatttcccacagcattgttccatttcccctcttcctctttctcctcctcttcctcctctttcccccctcctcctcctccttctccttctttgatggagctccacaccatagccagcatggagacactggcttctttgggcagagatggcagagccaacattctctgaggctcttgggaaatacattgctgtcttcgcagcacttgcaacaagccagaattatagaggatggttggagcagccaatgtccgcagaaatgcgggcctggacaacattgcctccat

SEQ ID NO: 124977 - DNA, 3549 bp, Homo sapiens
atgattgcggcaggcgcgcctgcggattgcgaaccgcaggttcgtcagtcagcaaaagttcagttcggcgactatcaggctaacggcatgatggcagttgctaaaaaactgggtatggcaccgcgacaattagcagagcaggtgctgactcatctggatcttaacggtatcgccagcaaagttgagatcgccggtccaggctttatcaacattttccttgatccggcattcctggctgaacatgttcagcaggcgctggcgtccgatcgtctcggtgttgctacgccagaaaaacagaccattgtggttgactactctgcgccaaacgtggcgaaagagatgcatgtcggtcacctgcgctctaccattattggtgacgcagcagtgcgtactctggagttcctcggtcacaaagtgattcgcgcaaaccacgtcggcgactggggcactcagttcggtatgctgattgcatggctggaaaagcagcagcaggaaaacgccggtgaaatggagctggctgaccttgaaggtttctaccgcgatgcgaaaaagcattacgatgaagatgaagagttcgccgagcgcgcacgtaactacgtggtaaaactgcaaagcggtgacgaatatttccgcgagatgtggcgcaaactggtcgacatcaccatgacgcagaaccagatcacctacgatcgtctcaacgtgacgctgacccgtgatgacgtgatgggcgaaagcctctacaacccgatgctgccaggaattgtggcggatctcaaagccaaaggtctggcagtagaaagcgaaggggcgaccgtcgtattccttgatgagtttaaaaacaaggaaggcgaaccgatgggcgtgatcattcagaagaaagatggcggctatctctacaccaccactgatatcgcctgtgcgaaatatcgttatgaaacactgcatgccgatcgcgtgctgtattacatcgactcccgtcagcatcaacacctgatgcaggcatgggcgatcgtccgtaaagcaggctatgtaccggaatccgtaccgctggaacaccacatgttcggcatgatgctgggtaaagacggcaaaccgttcaaaacccgcgcgggtggtacagtgaaactggccgatctgctggatgaagccctggaacgtgcacgccgtctggtggcagaaagaacccggtattccgcgaagagctggaaaactgtttttagactagtcattggagaacagatgattgatgtcttagggccggagaaacgcagacggcgtaccacacaggaaaagatcgcaattgttcagcagagctttgaaccggggatgacggtctccctcgttgcccggcaacatggtgtagcagccagccagttatttctctggcgtaagcaataccaggaaggaagtcttactgctgtcgccgccggagaacaggttgttcctgcctctgaacttgctgccgccatgaagcagattaaagaactccagcgcctgctcggcaagaaaacgatggaaaatgaactcctcaaagaagccgttgaatatggacgggcaaaaaagtggatagcgcacgcgcccttattgcccggggatggggaacgaaccgatgactggatggatggccgccgcagtcgtcacactgatgatacggatgtgcttctccgtatacaccatgttatcggagagctgccaacgtatggttatcgtcgggtatgggcgctgcttcgcagacaggcagaacttgatggtatgcctgcgatcaatgccaaacgtgtttaccggatcatgcgccagaatgcgctgttgcttgagcgaaaacctgctgtaccgccatcgaaacgggcacatacaggcagagtggccgtgaaagaaagcaatcagcgatggtgctctgacgggttcgagttctgctgtgataacggagagagactgcgtgtcacgttcgcgctggactgctgtgatcgtgaggcactgcactgggcggtcactaccggcggcttcaacagtgaaacagtacaggacgtcatgctgggagccaggcgctggcgaatccgttatttccggcgctggacagcgccttacattgaagtgataacctcagaacagatgatggatgcctactccagcgtcggcatgccaattaactatccgcactggtcattcggtaaaaagtttatcgagactgaacggctgtataagcacggtcagcaaggactggcctatgaaatcgtcattaactctaacccgtgtatcgcttacctgatggaagagaacaccattaccatgcaagcgctggtgatggctcatgcctgctatgggcataactctttcttcaaaaacaattacttattccgtagctggaccgacgccagttcgattgtcgattatctgatttttgcccgtaaatatattaccgagtgcgaagagcttacatccagagattggatattctatctgcgctcgcgcgggatcaatcagcaggatgcccagcagatgatcatttacgccttcgctgccgaactgacggaagcactgcgtgatgaggggcttaaacagcaggtgctggcccgaatcggtcaacggctgccaggaggcctgggacctagtgacccagttcgctatcggaatcaggatgaccatgagctacaaattacacacgggaacaagattctatgtggaattgtgtggaaaccagtgatcctttccgacgacatggtctttaaaaaaaatgatgtcggctacccacaaagaaaccttacttctgcggaaacacacttcgcactcgggaaacagcaggggccgcgcactgctgagcagccagtacgacaatggcagagatggccaacatacgaccaaacacacggagaaacacaaccacgagaccagagcgacaagagccaagaagccagaacgccacgcaacacagagcgacgaaagacggagcaaccgcccgaccgggaagcgcaaaacagaggacacaaaaagaaacaaaaacaacaaaagcggccaaacaagaagaagaagacacgacaagaacacacgaaccgccgagagcaagaaactcagaacgcaaccacgcaaacgaacggcaagaacaagcggccagagaacgaagaaccagcgagaaggtacgcacaaccacaagaacaacaaacaaaagatagaacaaaaaaacacgaaaaacggaaaagaacacagcaaagaaaaaagaaaacaaaaacaaagcagacaaagggaacaacaaagacaaccagagagcgattcaaagcaagccgcacgagaccgatgaaaaaagacgcaacaagcgcgcaaaacaaggagacaacaacaagcatacacagaaaccgagaccgcacacgaaacgacaaggaggaagaaagcaagataggaggaaaacgagaaatagcagagaaaacacaacggacggaagacaccacacacaagaccccaagaagacagcgacgcgaacagaaacccacgcgaaacaacaacgacaacagaatctggtgtcaaaagtgttgtattgagtggtgtttgaaactataa

SEQ ID NO: 124978 - DNA, 1227 bp, Homo sapiens; identical to SEQ ID NO: 124545

SEQ ID NO: 124979 - DNA, 3171 bp, Homo sapiens
ctccagtaatttttctttattaatcgatgaggcaagatttttttcaccgattatgctcaggatatttttgatgacggcacggtatgtgttgagtgatgttttggcgacttcagtttctttcagtgccagaaatttttcagccagttcttttatggttaaatcttgtcgggcctcaccaaatttttccagattgcgtgaggagggaaactgttttgcatagtcgaaaacaccagtttttattgcgtaacaaacagaggagcgtagttcacctgtggatttgcccccgtctggtttgggcatgatactgatgtagtcacgctttatcgttttcacgaagctctctgctattccgttactctccggactccgcaccgccgtgttcttcggttcaagtcccaacatccgggcgaactggcgtgtttcattagctcggtagcatgaaccattatccgtcagccactccagatcacagcagtccagcgcgaacgtgaccacgcagtctctctccgttatcacagcagaactcgaacccgtcagagcaccatcgcttgattgcttttctttcacgggccactctgcctggtatgtgcccggtctcgatggacggtacagcaggtttttcgcttcaggcaacagcgcatctctgggcatcgattccggtaaaacacggtttggcattgattcgcaggccatatcattcacgttctgcctgttctgcgaagcgtcaccatacctcgacgataaccatacgttggcagctctccgataaacatggttgtatacggagaagcacatccgtatcatcagtgtgacgactgcggcggccatccatccagtcatcggttcgtctgagaatgacgtgcaatccccatccccgggcaataagggcgcgtgcgctatccacttttttgcccgtccatattcaacggcttctttgaggagttcattttccatcgttttcttgccgagcaggcgctggagttctttaatctgcttcatggcggcagcaagttcagaggcaggaacaacctgttctccggcggcgacagcagtaagacttccttcctggtattgcttacgccagagaaataactggctggctgctacaccatgttgccgggcaacgagggagaccgtcatccccggttcaaagctctgctgaacaattgcgatcttttcctgtgtggtacgccgtctgcgtttctccggccctaagacatcaatcatctgttctccaatgactagtctgacactgtctgagcgcgaggagatacgagctggtttgtcagccaaaatgagcattcgtgcgatacgtactggcgctgaatcgcagtccttcgacgatctcacgtgaagttcagcgtaatcggggcagacgctattacaagctgttgatgcatgatggtggataaagcattctgtgagtccacggatggtagtctttataaaagcattgcgtacaggataggtaaacctatatctggagtaagtgtctattccagtgagggcaagctgctgccctttccttgatggaagagatccaatataatcaacctgccaccaagtagctggctgatcaccttgtgccctcaggacctgctggtgcctgaccacatatataccatttccacttgatgatggaatattgctgttcatgacccactttatggctaatgggtcagaaagcacccagttcatgataggcagttctggtccccttgtgacttgacccataatcaaacgttcagtttctaccaaagcccagtaacaggccaagagctgtttctcaaaaggagagcagttatctgcagaaaatagggccttgctccaaaatcctggaggcctccactgtgattcacctatggcgggctgccaaaggctccaaacagcatccctgtctgccactgacacctcaagcaccattggatctgctggatcatatggcgcaagcggcagagcagcctggacctgctgcagagccttctcctgttgtagaccccactcaaaactggcagcctttccagtcactcgataaatgcgcaataagtccagtgtgtttgctacttctctgtcactggatccaatcagtatagtgttatcaatgtaatggaccagtgtgatatcttgtggaagggaaaggcgatcaaggtctctctgaagattaaacaccaagctggagagttgatatactcccgaaggtgtgttaatttgctcaagcaatgaaaccacatctggtacagcagctgcaattggagacaccacttggttaagcttacaataatccactgtcattctccaaaatccacctgtcttctgcacaggctgagtagagtcgaacagggatattgtaggaatcattgcccctgcatcttttaaggccttaatggcagcactaatctctgcaatccctccagggatgtgacattgtttttgatttactatttttctaggtagaggcacctctaatggcttccatttggcctttcccaccataacagccctcaccccaccagttggggagccaatgtgggggttctgccagttgctaagtatgtctgtgctaattatgcattctggcactctaggggcccactgggactttagtccagttataggtctagaagcaaacaggggtgttggagatgggtcctgaggagactctacattatctttcctggcaactgcctcaggggaggccatcactgtttcctcaggcagcgcagggtttatcttccatagaggttctgattcagtggtagaagttggggcccaggaatctgcttcttttgggtgatactgatgcaagtggttgtctgggggcttgggcagtatggccattttcacgatattgattcttcctacccatgagcatggaatgttcttccatttgtttgtatcctcttttatttccttgagcagtggtttgtagttctccttgaagaggtccttcacgtcactcgtaagttggattcctaggtattttattctctttgaagcaagtgtgaatgggagttcactcatgatttggctctctgtttgtctgttattggtgtataagaatgcttgtgatttttctacattgattttgtatcctgagactttgctgaagttgcttatcagcttgaggagattttgcgctgagacgattgggttttttagatacacaatcat

SEQ ID NO: 124980 - DNA, 6250 bp, Homo sapiens
atgagtcatcaacttaccttcgccgacagtgaattcagcagtaagcgccgtcagaccagaaaagagattttcttgtcccgcatggagcagattctgccatggcaaaacatggtggaagtcatcgagccgttttaccccaaggctggtaatggccggcgaccttatccgctggaaaccatgctacgcattcactgcatgcagcattggtacaacctgagcgatggcgcgatggaagatgctctgtacgaaatcgcctccatgcgtctgtttgcccggttatccctggatagcgccttgccggaccgcaccaccatcatgaatttccgccacctgctggagcagcatcaactggcccgccaattgttcaagaccatcaatcgctggctggccctaggcgtcatgatgactcaaggcaccttgttcgatgccaccatcattgaggcacccagctctaccaagaacaaagagcagcaacgcgatccggagatgcatcagaccaagaaaggcaatcagtggcactttggcatgaaggcccacattggtgtcgatgccaagagtggcctgacccacagcctggtcaccaccgcggccaacgagcatgacctcaatcagctgggtaatctgcttcatggagagaagcaatttgtctcagcgatgccggctaccaaggagccacagcgcgaggagctggccgaggtggatgtggacctgctgatcgccgagcgtcccggcaaggtaaaaaccttgaagcagaatccgcgcaagaacaaaacggccatcaacatcgaatacatgaaagccagcatccgtgccagggtggagcacccgtttcgcatcatcaagcggcagttcggcttcgtgaaagccagatacaaggggctgctgaaaaacgataaccaactggcgatgttattcaccctggccaacctgtttcgggtggaccaaatgatacagctgccaacgtatgagttatcgtcgggtataggcgctgttcgcagacaggcagaacttgatggtacgcctgcgatcaattccaaacgtgtttaccggatcatgcgccagaatgcgctgttgcttgagcgaaaacctgctgtaccgccatcgaaacgggcacatacaggcagagtggccgtgaaagaaagcaatcagcgatggtgctctgacgggttcgagttctgctgtgataacggagagagactgcgtgtcacgttcgcgctggactgctgtgatcgtgaggcactgcactgggcggtcactaccggcggcttcaacagtgaaacagtacaggacgtcatgctgggagcggtggaacgccgcttcggcaacgatcttccgtcgtctccagtggagtggctgacggataatggttcatgctaccgggctaatgaaacacgccagttcgcccggatgttgggacttgaaccgaagaacacggcggtgcggagtccggagagtaacggaatagcagagagcttcgtgaaaacgataaagcgtgactacatcagtatcatgcccaaaccagacgggttaacggcagcaaagaaccttgcagaggcgttcgagcattataacgaatggcatccgcatagtgcgctgggttatcgctcgccacgggaatatctgcggcagcgggcttgtaatgggttaagtgataacagatgtctggaaatatatgggcaaatccaattaggcacgggtgaactgaatattaccaccggagtagtagttacagcccgtgatacacacattgctctcaatttccaaaagcgccgtaccaccggccttgccacgcagagccgccagcgttgccagaatcgccgtcgggtgatgggcaaaatcgtcatataccgtgacgccattcgcttcaccacgcaactccagacggcgacgagcattaataaacgaacccagcgcgttagcggcatctgccggcgctacaccaacatggcgagccgctgcaatcgccatcaggccattgtgcatattatgttcgcctaccagcgaccatttcacttcgcccactttttcgccatccagcaaaacttcccattcggaagcatcggtggtcagctttttcgcctgccagtgaccctgctcacccaccagctcctgctcgctccagcagcccatcgccatggtctgtttcaggttgatgtcattttccggccagataatacggccctgccccggaacgatacgcaccagatggtggaactgtttctggatcgctttcaggtcgtcaaagatatcggcgtgatcgaactcaaggttgttgaggatcagcgtacgcgggcagtaatgaacaaatttagagcgtttgtcgaaaaaggcgcagtcatactcatccgattcgataaaaaaaaggatatttttctccagtaccgcttccacacacggatttccacgggtcatggcgttgccaataatcaccagatccggctgcggctcgagctggctggcatcgtacccctgaatcagctcaatcccttgcctctcaactctgttccgatgatcaacatcatgaacggtggtgagaacgctgacaacaacgttgatatccaggaattcatgattcagccggttggcgcgaaaactgtgaaagaagccatccgcatgggttctgaagttttccatcacctggcaaaagttctgaaagcgaaaggcatgaacactgctgttggtgacgaaggtggctatgcgccgaacctgggttccaacgctgaagctctggctgttatcgctgaagctgttaaagctgctggttatgaactgggcaaagacatcactttggcgatggactgcgcagcttctgaattctacaaagatggtaaatacgttctggctggcgaaggcaacaaagcgttcacctctgaagaattcactcacttcctggaagaactgaccaaacagtacccgatcgtttctatcgaagacggtctggacgaatctgactgggacggtttcgcataccagaccaaagttctgggcgacaaaatccagctggttggtgacgacctgttcgtaaccaacaccaagatcctgaaagaaggtatcgaaaaaggtatcgctaactccatcctgatcaaattcaaagcacaacatgcaggtttgttacatatgtatacatgtgccatgttgggggtgggggggcaatgctggcggtactgcatgtctcaggcgttcaaagaggaccgattcgcgcaggatcagcgcgtcgcagtgaccaaaaacgtagttcgccagttggttaaattgctcatcctggaacgggccaacactgtgaccaatcataaacagcggctttttcgccataaacgtgcaaagtgcatgttcaaactgcggcacgccatagagatcgacaaaaaacgatccgccgacctggataatggcgtcgaacagcggatcgcccattaccgggcggttgagcagccaggaagaactgaccggatagcggctcatcacatccacttcggcgtgtggattgagaatgttgatggcatcaaggaaaagatcgcaattgttcagcagagctttgaaccggggatgacggtctccctcgttgcccggcaacatggtgtagcagccagccagttatttctctggcgtaagcaataccaggaaggaagtcttactgctgtcgccgccggagaacaggttgttcctgcctctgaacttgctgccgccatgaagcagattaaagaactccagcgcctgctcggcaagaaaacgatggaaaatgaactcctcaaagaagccgttgaatatggacgggcaaaaaagtggatagcgcacgcgcccttattgcccggggatggggaacgaaccgatgactggatggatggccgccgcagtcgtcacactgatgatacggatgtgcttctccgtatacaccatgttatcggagagctgccaacgtatggttatcgtcgggtatgggcgctgcttcgcagacaggcagaacttgatggtatgcctgcgatcaatgccaaacgtgtttaccggatcatgcgcccagaatgcgctgttgcttgagcgaaaacctgctgtaccgccatcgaaacgggcacatacaggcagagtggccgtgaaagaaagcaatcagcgatggccattgttatatcgcctattcgttcgccctcggacattacgttcctgtgtgcgcgttttgcgctacctgatcgaaaacaacaaaatcaacgccgaatacgttaagcattacaccaacgccagcctgctggtgcgtgatgattttgctttcgaagacggtctgttcagcggctacgacgctgaaaaacgtcaacacgtttcccgctacacgccagatgtggttgaaaacatctgtggtacgccaaaagacgcgttcctgaaagtctgcgaatacatcgcagaaaccagtgctcacgataaaactgcctcgttcctgtatgccctcgctggacgcaacactccgttggtgcccattagattgctcatcacctgcgcctctgaagtcggtatctgggattaccagcctgacgaagtggtcgaaaaaggccgcgtcgggccaggcgaactgatggttatcgacacccgcagtgggcgtattctgcactcggcagaaaccgatgacgatctgaaaagccgccatccatataaagagtggatggagaaaaacgtccgccgactggtaccgtttgaagatctgcccgatgaagaagtgggtagccgcgaactggacgacgacacgcttgccagctaccagaaacagtttaactacagcgcggaagagctggactccgtaattcgcgtactgggcgaaaacggtcaggaagcggtcggttcgatgggcgatgataccccattcgccgtgctctccagtcagccgcgcattatttacgactacttccgccagcagtttgcccaggtgactaacccgccaatcgacccgctgcgtgaagcgcatgttatgtcgctcgccaccagtatcggtcgtgaaatgaacgtcttttgcgaagcagagggccaggcgcaccgtttaagctttaaatcgccgattctgctctactccgatttcaaacagctcacgacgatgaaagaggagcactaccgcgcagatacgctggatatcacctttgacgtcactaaaaccacgctcgaagcgacagtcaaagagctgtgcgtcaaagccgaaaaaatggtacgtagcggcaccgtgctgctggtgctctccgaccggaatatcgctaaagatcgcctgccggttccagccccgatggcggttggcgcgatccagacccgtctggtcgatcaaagcctgcgttgcgatgccaacatcatcgtcgaaaccgccagcgcccgcgatccgcaccacttcgccgtgttgctgggcttcggcgcgacggctatttatccataccttgcctatgaaacgctgggccgcctggtagacacctatgccgatgccaaagattatcgtaccgtgatgctcaactaccgtaacgcatcacaaaggctgtacaaatcatgtcacaatggcatctcacatggctttacggctgtcgatcgctatgggcttgaaggcgtcatcaccgatccgcacactggagatcgtcgaccgctaacggaagataccttgcgattgctggaaaaaatcgccccttccgcacataaaattggtgcatcgagcgcgattgaggccctgcatcgccaggtcgtcagcggtctgaatgaagcgcagctaatgcgcgatttcgtcgccgatggcggctcgctgattgggctggtgaaaaagcattatttttatgctgtcgtcggagctacggggcgtcccctttatcaatctgaagtccgatccacaaaaatccctgttaaatcagcaaatatgtacttttacacgcaagctggctcatggccagatgatgctgttgaagttgatgagcaagtgtatattgagttttccggattaccgccgaaaggaaaaatccgtatcgctggagaaaatggttttcctgcatggtctgaaattccaccaccaacacatgaggaacagattgctgcagccgaactgaaaaagcagcaattgattaatcaggccaacgattatatgaacagtaaacaatgggctggtaaagcggctattggtcgtctgaaaggtgaggaactggcgcaatataatttgtggctggattatctggacgcactggagctggtcgatacttccagtgcgccagatattgaatggcctactcctccggcagttcaggccagatga

SEQ ID NO: 124981 - DNA, 2610 bp, Homo sapiens
tcacttctgttcacgctgaacaaacggctgctcccgcaaaacctgtaactgtggaagcgaagaatgaaacctttgccccgcagcatcccgatcaatatctctcctggaaagccacctcggaacagtcagagcgtgttgacgccctggcggaagatccacggctggtgatcctgtgggcggggtatcccttctcgcgcgattacaacaagccgcgtggacatgcttttgctgtgaccgatgtgcgtgaaaccctgcgtaccggtgcgccgaaaaacgctgaagatggtccgctaccgatggcatgcccagtacaacccgctgccccagatattcccgtggcgatcgataacccagcgcactaggcggatgccattcgttataatgctcgaacgcctctgcaaggttctttgctgccgttaacccgtctggtttgggcatgatactgatgtagtcacgctttatcgttttcacgaagctctctgctattccgttactctccggactccgcaccgccgtgttcttcggttcaagtcccaacatccgggcgaactggcgtgtttcattagcccggtagcatgaaccattatccgtcagccactccactggagacgacggaagatcgttgccgaagcggcgttccaccgatcccagcatgacgtcctgtactgtttcactgttgaagccgccggtagtgaccgcccagtgcagtgcctcacgatcacagcagtccagcgcgaacgtgacacgcagtgatctgtccgttatcacagcagaactcgaacccgtcagagcaccatcgctgattgctttcattcacggccactctgcctgtatgtgcccgtttcgatggcggtacagcaggttttcgctcaagcaacagcgcattctggcgcatgatccggtaaacacgtattggcattgatcgcaggcataccatcaagttctgcctgtctgcgaagcagcgcccatacccgacgataaccatacgttggcagctctccgataacatggtgtatacggagaagcacatccgtatcatcagtgtgacgactgcggcggccatccatccagtcatcggttcgttccccatccccgggcaataagggcgcgtgcgctatccacttttttgcccgtccatattcaacggcttctttgaggagttcattttccatcgttttcttgccgagcaggcgctggagttctttaatctgcttcatggcggcagcaagttcagaggcaggaacaacctgttctccggcggcgacagcagtaagacttccttcctggtattgcttacgccagagaaataactggctggctgctacaccatgttgccgggcaacgagggagaccgtcatccccggttcaaagctctgctgaacaattgcgatcttttcctgtgtggtacgccgtctgcgtttctccggccctaagacatcaatcatctgttctccaatgactagtctggaggtgcccatagcttgttctgttaagccaagttcttcactggaaactccgtctttaattataaggtcatcaataatgtcttcatgtatcttagagcactgaaggacagctttgtccataaaataggaaaaagaaaatctctcccctggtgaaacagcaaataagttttctatctgcatggacagcagcttatcacaatgtagatctagcatttcaggcttggggaaatcctgttctatgttttcagcaatgttctgtattgctagcaactgctcgtcaattttctgaagcttagcactgagatgctctatttggtgagctgcatagcttggtgcagggcaagctgcagagacaccttgcagccgtttccacaatagataatcttctgcagagtctgactttgtgctctgtcctttgaatcggaactctggttttggcagacctttgttctgctgtatgtctgatggtgtaggtgaggtgacacttaggctccttcacttctgtaatgcccctgctcctcaagcctttttccccatccagacaagctggagttaccttcttgacctccttaaaattatgtggggggaacagcattagtaactgaagctgcccatataatgtaactctgcagacgatggaactgctagatgaccgctttgctgtttgataacattatcatttgaaggctcttctctcgacaggtaattcctgtagaagatcattagcttcaatgtcaatcacatttatataagtatgtccaaccaagtttgttactgtatgaggtattgagggtgaccaaggtttctctgacatttcactggaaagcttcagatttagatagacatctgggaccaagagctgaggagcagtcaaaggctcatgttctgggtctgtatttgtacttgcatcttgacttcctatagctttcttttttacagaggccatgaaatgcaatccagctgaagtattatcatcttgtagcattttgtcctttccttgtcttacttcaggtggttctattttgacctttagaagttgaaggtgtccagcatcaccttgttcaaataaattatgtgttagtttctgttggctttgtttaaacgcaatgaggttttcaagtgggataagttgtgtttttttgca

SEQ ID NO: 124982 - DNA, 3454 bp, Homo sapiens
atgaaaggcctgatgaattacaaatctcaagggactgccttctccctgggctgctgttttgaaaagaaaaaaacaagaaaatttgaggatactatgcctggagaggtggttgaaaataggtacaatgaacaagggctctgtcatcctgggaccctctatcctaggaaacaagtggaacaaatcaaaagatttatactaactgaagaatataaaactatcagacagaagaatttcccagaaagcagcagcaaagaaaaagaaaatgtaagagaaatctgctgggaatattgtcagcagacagccccttcaaggattgcctcaggttcagaaagcctgcttgctcatggttatgtcccttccctgggagctctaacagtggaaaccacagtcactcaactacaacatttaaatacagtgggaataattggattccgaggtggcaggggccaagtggcagcagtcaactgtcaaaagcgagatatccagccttttaccagggtaactgtgcattggggaaagagaaatgatcagacatttcaagcactagtggacactggccttgagctgacattgattcccggggacccaaaacatcattgtgatcctccagttaaagtaggggcttatggacatcaggtaattaatggagttttagctcagattcaaattacagtaggtccagtgggtccctggactcaccctgtggtcattttcacagtgcctaaatgcataattgacatagacatacttaggtggcagaactcccacactggctccctgactggtaggatgaaggctattatggtgggaagggccaaatggaagccgttagagctgcctctgcctagaaaaacagtaaaccagaaaccatatcacacccctgtagggactgcagaaattagtgccaccatgaaggacttgaaagatgcaggggtggtgattccaaccacaaccctgttcaactctcctatttggtctgtgcagaagacaggtggatcttggagaatgacagtggattattgtatgcttaaccaagttgtgtctgcagttgaagctattgtactagatgtggtttcattgcttgagcaaattaacacatctcctgccatagagtgggtcatgcacagcagcattccatcatcaaatggaagtggtacatacatgatcgggctcaagcaggtcctaaaggcacaacctgcaccaatggcctcatggggagtttcctatgatcagtggacagaggaagagaagactacggcctggttcacagacggttcttcacgatatgctagcaccacccgaaactggacagctgcagcactacagtccctttctaggatatccctgaaggacagctgtgaagggaaatcttcccaccacccgtgtcatggaggcaaggatggaggttatgcatgggctcagcaacatggactttcactcaccaaggttgacctggctatggccactgctgagtgcccaatttgccagcagcagagaccaacactgagccctcgatatggcaccattcctcagggtgatcagccagctacctggtggcaggttgattatatgggacctcttccatcatggaaagggcagagcaccataaatcttagaggaagctctaatttgtcctgctatggaccgtccctcaaccaatcacttgggaaagaagtttccgactggctgtccctgggttacacatctacggttgtggagggattagagggggagagaaggctactagtcattggagaacagatgattgatgtcttagggccggagaaacgcagacggcgtaccacacaggaaaagatcgcaattgttcagcagagctttgaaccggggatgacggtctccctcgttgcccggcaacatggtgtagcagccagccagttatttctctggcgtaagcaataccaggaaggaagtcttactgctgtcgccgccggagaacaggttgttcctgcctctgaacttgctgccgccatgaagcagattaaagaactccagcgcctgctcggcaagaaaacgatggaaaatgaactcctcaaagaagccgttgaatatggacgggcaaaaaagtggatagcgcacgcgcccttattgcccggggatggggaacgaaccgatgactggatgggatggccgcccgcagtcgtcacactgatgatacggatgtgcttctccgtatacaccatgttatcggagagctgccaacgtatggttatcgtcgggtatgggcgctgcttcgcagacaggcagaacttgatggtatgcctgcgatcaatgccaaacgtgtttaccggatcatgcgccagaatgcgctgttgcttgagcgaaaacctgctgtaccgccatcgaaacgggcacatacaggcagagtggccgtgaaagaaagcaatcagcgatggtgctctgacgggttcgagttctgctgtgataacggagagagactgcgtgtcacgttcgcgctggactgctgtgatcgtgaggcactgcactgggcgggccactaccggcggcttcaacagtgaaacagtacaggacgtcatgctgggagcggtggaacgccgcttcggcaacgatcttccgtcgtctccagtggagtggctgacggataatggttcatgctaccgggctaatgaaacacgccagttcgcccggatgttgggacttgaaccgaagaacacggcggtgcggagtccggagagtaacggaatagcagagagcttcgtgaaaacgataaagcgtgactacatcagtatcatgcccaaaccagacgggttaacggcagcaaagaaccttgcagaggcgttcgagcattataacgaatggcatccgcatagtgcgctgggttatcgctcgccacgggaatatctgcggcagcgggcttgtaatggggccagaagaccccctgtctcccagccccgggcagcccctgctgggccccagcttggggctgacggcactcggactttctcgctgtcccccttccccagcctggcatcaggggagagactgatgatgcccccagccgccttcaagggagaggcgggcggcctgctggtgttccccccagccttctatggcgccaagccccccacagcccctgccaccccggcccctggccctgagccactgggcggtcctgagcccgcggatggtggtgggggcggagcggcggggcccggggcagaggaggagcagctggacacggcagagatcgccttccaggtgaaggagcagctgctgaaacacaacatcgggcagcgggtgtttgggcattacgtgctggggctgtcgcagggctcggtcagcgagatcctagcccggcccaagccctggcgcaagctcacggtgaagggcaaggagcccttcatcaagatgaagcagttcctgtcggatgagcagaatgtactggcgctcaggaccatccaagtgcggcagcgag

SEQ ID NO: 124983 - DNA, 3564 bp, Homo sapiens
atgtcctgtatgacaccggcttccgatggcacctttatttccattgacgacgaagaagcgaaacagttccgtgaaagcgtggtcgagtggttgatgaccaaccacccgcacgactgtccggtatgtgaagagggcggtaactgccatcttcaggatatgactgtgatgaccggacacagcttccgtcgctaccgtttcaccaaacgtacccaccgtaatcaggatttggggccattcatctctcacgaaatgaaccgctgcatcgcctgctaccgctgtgtgcgttactacaaagattacgctgacggtacagatctgggcgtttacggtgcgcacgacaacgtctacttcggtcgcccggaagacggcacgctggaaagcgaattttccggtaacctggtcgaaatttgcccgaccggcgtatttaccgacaaaacgcactccgagcgttacaaccgtaaatgggatatgcagtttgcgccgagcatctgccagcaatgttccatcggctgtaacatcagccccggtgaacgttacggcgaactgcgtcgtatcgaaaaccgttacaacggtacggtaaaccactacttcctctgcgaccgtggtcgtttcggttacggttacgtcaacctgaaggatcgtccgcgtcagccagtacagcgtcgtggcgatgatttcattaccctcaacgccgaacaggcaatgcagggcgcggcagatattctgcgtcagtcgaagaaagtgatcggtattggttctccgcgtgccagcgtggaaagcaactttgcgctgcgtgaactggtgggcgaagaaaacttctacaccggtatcgctcacggtgagcaggaacgtctgcaactggcgctgaaagtgctgcgtgaaggcggcatttatactccggctctgcgcgaaatcgaatcttacgatgcggtactggtgctgggcgaagacgttacccagaccggcgcgcgcgtcgcgctggcagtgcgtcaggctgtgaaaggtaaagcgcgcgaaatggcggcagcacagaaagtggctgactggcagattgcggcaatcctcaacatcggtcaaccatccgctgtttgttaccacgttgatgacacccgtctggatgatatcgcggcgtggacttaccgcgcaccggttgaagatcaggcgcgtttaggttttgccatcgcccatgcgctggataactctgcaccagcggttgacggtatcgaacctgagctgcaaagcaaaatcgacgtcatcgtgcaggcactggcagtttttagactagtcattggagaacagatgattgatgtcttagggccggagaaacgcagacggcgtaccacacaggaaaagatcgcaaattgttcagcagagctttgaaccggggatgacggtctccctcgttgcccggcaaccatggtgtagcagccagccagttatttctctggcgtaagcaataccaggaaggaagtcttactgctgtcgccgccggagaacaggttgttcctgcctctgaacttgctgccgccatgaagcagattaaagaactccagcgcctgctcggcaagaaaacgatggaaaatgaactcctcaaagaagccgttgaatatggacgggcaaaaaagtggatagcgcaacgcgcccttattgcccggggaatggggattgcacgtcattctcagacgaaccgatgactggatggatggccgccgcagtcgtcacactgatgatacggatgtgcttctccgtatacaccaggttatcggagagctgcccaaacgtatggttatcgtcgggtatgggcgctgcttcgcagacaggcagaacttgatggtatgcctgcgatcaatgccaaacgctgtttaccggatcatgcgccagaatgcgctgttgcttgagcgaaaacctgctgtaccgcccatcgaaacgggcacatacaggcagagtggccgtgaaagaaagcaatcagcgatggtgctcctgacgggttcgagttctgctgtgataacggagagagactgcgtgtcacgttcgcgctggactgctgtgatcgtgaggcactgcactgggcggtcactaccggcggcttcaacagtgaaccacaacaggacttcgtggtgtgaccgcaggatctccgcttcggcaacgatcttccgtcgtctccagtggagtggctgacggataatggttcatgctaccgggctaatgaaacacgccagttcgcccgggatgttggggacttgaaaccgaaagaacacgggcggttgcggagtccggacgagtaacggaatagcagagagcttcgtgaaaacgataaagcgtgactacatcagtatcatgcccaaaccagacgggttaacggcagcaaagaaccttgcagaggcgttcgagcattataacgaatggcatccgcatagtgcgctgggttatcgctcgccacgggaatatctgcgggagcgggcgttgtaatgggttaagtgataacagatgtctggaaatatagggggcaaatccataaacgccaacagccatagcgtcatttccggtaaagacggccttccaacgcaggcgcgccggagttttatccagcgggccggtaatacaggcgatacgggtatgacctttatcgatcagatattgcgttgctaagtctccgcccagcaacgagttatcctgaataagatcgcagttctgaatagaaagctcagtgccgcggatctctagagtccgcataggccgcttcgcagcaaacatacggtaaagttggcaggaagggagaccctggtaccttgggctcctccataaatcagtagcgggattcagtttctgagccttggcattgtcatcggtcagatcggcaagtgtgatggtattcatcgcggtaaactgcgtcgacatagccatccctgtaacatcaatggcataaggaacggtacacagccggtccccagacgggttgcaatattgccggcgaatgcggcctgaaaagcgtctgaagcggcaaataccccggtggcggacctgcaggcatgccgtgctaagttctgcctgtctgcgaagcagcgccccatacccgacgataaccatacgttgccagctctccgataacatggtgtatacggagaagcacatccgtatcatcagtgtgacgactgcggcggccatccatccagtcatcggttcgtctgagaatgacgtgcaatccccatccccgggcaataagggcgcgtgcgctatccacttttttgcccgtccatattcaacggcttctttgaggagttcattttccatcgttttcttgccgagcaggcgctggagttctttaatctgcttcatggcggcagcaagttcagaggcaggaacaacctgttctccggcggcgacagcagtaagacttccttcctggtattgcttacgccagagaaataactggctggctgctacaccatgttgccgggcaacgagggagaccgtcatccccggttcaaagctctgctgaacaattgcgatcttttcctgtgtggtacgccgtctgcgtttctccggccctaagacatcaatcat

SEQ ID NO: 124984 - DNA, 813 bp, Homo sapiens
  misc_feature (1)...(813): n = a,t,c or g
atggtcannnnnnnnnncattgctgccctgctgaaagataaacaccccgctatgttgctgttggccgcgacgaaacgtggtaaagcgctggcagcacggttaagtgtgcaactgaatgcggcgctggtgaacgacgccacggcggtggatattgtcgatggtcacatttgcgccgaacaccggatgtatggcgggttcgctcaggaaaagatcaacagcccgctggcgatcattacccttgcacccggtgttcaggaaccgtgcaccagtgatacctctcatcagtgcccgacagaaacggtaccttatgtcgtccgcgtcatgaaattctctgtcgcgaacgccgtgcgaacagccgcaagcagcgtggacctgagcaaagcaaaacgtgtggttggcgtcggtcgtggactggcggcgcaggatgacctaaaaatggtccacgaactggcggcggtgctgaatgctgaagtcggctgttcacgtccaatctgccgaaggcgagaactggatggagcgccatgcccagcacaagtcctggaatccactctcatgggccccactgggatctcaggctcacccctgaaccagtcagtcacagtggccactggactggaatgtgctgattggctcagcctgacaggaccctcagctgcaggtctgttggagtttactggaggtccactccagaccctgtttgcctgggtatcagcagcggtggctgcagaacagcggatattggtgaacccgcaaatgctgctgcctgattgttccttgggaagttttgtctcagaggagtacccggccgtgtga

SEQ ID NO: 124985 - DNA, 1366 bp, Homo sapiens
atgctgcggatcctgtgcctggcactctgcagcctgctgactggcacgcgagctgaccctggggcactgctgcggttgggcatggacatcatgaaccgtgaggtccagagcgccatggatgagagtcatatcctggagaagatggcagccgaggcaggcaagaaacagccagggatgaaacctatcaagggcatcaccaatttgaaggtgaaggatgtccagctgcccgtcatcacactgaactttgtacctggagtgggcatcttccaatgtgtgtccacaggcatgaccgtcactggcaagagcttcatgggagggaacatggagatcatcgtggccctgaacatcacagccaccaaccggcttctgcgggatgaggagacaggcctccccgtgttcaagagtgagggctgtgaggtcatcctggtcaatgtgaagactaacctgcctagcaacatgctccccaagatggtcaacaagttcctggacagcaccctgcacaaagtcctccctgggctgatgtgtcccgccatcgatgcagtcctggtgtatgtgaacaggaagtggaccaacctcagtgaccccatgcctgtgggccagatgggcaccgtcaaatatgttctgatgtccgcaccagccaccacagccagctacatccaactggacttcagtcctgtggtgcagcagcaaaagggcaaaaccatcaagcttgctgatgccggggaggccctcacgttccctgaggtgttatgccaaaggctcgccgcagctgctggtcccagccaccttcctctctgcagagcttgcccttctgcagaagtcctttcatgtgaatatccaggatacaatgattggtgagctgcccccacaaaccaccaagaccctggctcgcttcattcctgaagtggctgtagcttatcccaagtcaaagcccttgacgacccagatcaagataaagaagcctcccaaggtcgctatgaagacaggcaagagcctgctgcacctccacagcaccctggagatgttcgcagctcggtggcggcgcaaggctccaatgtccctctttcttctagaagagcacttcaatctgaagggccagcactcactgcatgagaaccagctgcagatggccacttctttggacagattactgagcttgtcccggaagtcctcatcgattggcaacttcaatgagagggaattaactggcttcatcaccagctatctcgaagaagcctacatcccagttgtcaatgatgtgcttcaagtggggctcccactcccggactttctggccatgaattacaacctggctgagctggacatagtagagcttgggggcatcatggaacctgccgacatatga

SEQ ID NO: 124986 - DNA, 545 bp, Homo sapiens
atgctcagcctgctgaccccaagcagtcagagagctcttcgtggctgtgaccagaaccttcttggtgtgatgggcattgtggccacgtgtgttgtggcttatgggcctaagtctcagctctttccctcttgctgcacagggcccccagatgccgacggccctctctacctcccctacaagacgctggtctccacggttgggagcatggtgttcaacgagggcgaggcccagcggctcatcgagatcctgtctgagaaggctggcatcattcaggacacctggcacaaggccactcagaagggtgaccctgtggcgattctgaaacgccagctggaagagaaggaaaaactgctggccacagaacaggaagatgcggctgtcgccaagagcaaactgagggagctcaacaagactgaggttatgaagtcgatcctagatggccttgcagataccaccttccgcaccatcaccactgacctcctgtacgtgggctcaaatgacattcagtacgaagacatcaaaggtgacatggcatccaaattagg

SEQ ID NO: 124987 - DNA, 455 bp, Homo sapiens
ttttttaggtggagaaggcgtcattttccccagagggtggtggggggcagcaatgaggtttgtgtctacaggaagcaggcacaccactccttgaggcagtgagaagtctgctgggcctcacactcagtggcaccaaaacagcaaatgagccacctctgaaactcggcttcattcttgtgcatcagaaggaattgtcccagcaggatgtaggccttattgatacctttggtgaccaaattgatcgcgagctcatggctgatgccatccacccagcagacatccttttctccaatgggttcggagaggaaggctctcagcctgggagacatgtcgtccatctcctttctacagagtcgagctcctcgtgtacgccttcttgctctgaaggacgttttgtaacatttcagaagacactgaactctcccggaagagatgaatccaaaggcactgatttt

SEQ ID NO: 124988 - DNA, 2863 bp, Homo sapiens
gtgccgatggtggtggtgcccccagtgggtgccaagggcaacacaccagccactggcactactcagggcaaaaaggcggaggggactcagaatcaaagcaaaaaggctgaaggagccccaaaccagggcagaaaggcagaaggaaccccaaaccagggcaaaaagacagagggaaccccaaaccaagggaaaaaggcagaaggaaccccaaaccaaggcaaaaaggcatgaaggaaccccaaaccaaggcaaaaaggcggagggggcccataaccagggtaaaaaggttgatacaaccccaaaccaggggaaaaaggtggagggggccccaacccagggcagaaaggccgagggggctcagaaccaggccaaaaaggtagaaggggcccagaaccagggcaaaaaggcagagggggcccagaatcagggcaaaaaggcagagggggcccagaaccagggcaagaaggctgagggtgcccagaatcagggcaagaaggcagaggggggccagaaccagggcaaaaagactgaggaggcccagaagcagggcaagaaagcagagggggcccagatccagggcaagaagaacgagggggctcagacccagggcaagaaagcagagggggcccagaaccagggcaagaagaacgagggggctcagacccagggcaagaaagcagagggggcccagacccagggcaagaaggccgacggggcccagaaccagggcaagaaggccgagggggcccagaaccagggcaagaaggccgagggggcccagaaccagggcaagaaggccgagggggcccagaaccagggcaagaaggccgatggggcccagaaccagggcaagaaggccgagggggcccagaaccagggcaagaaggccgagggggcccagaaccagggcacgaaggccgagggggcccagaaccagggcaagaaggccgagggggcccagaaccagggcaagaaggccgagggggcccagaaccagggcaagaaggccgagggggcccagaaccagggcaagaaggccgagggggcccagaaccagggcaagaaggccgagggggcccagaaccagggcaagaaggccgagggggcccagaaccagggcaagaaggccgagggggcccagaaccagggcaagaaggccgagggggcccagaaccagggcaagaaggccgagggggcccagaaccagggcaagaaggccgagggggcccagaaccagggcaagaaggccgagggtgctcagaaccagggcaaaaaagtagaaggggcccagaaccagggcaagaaggctgagggggcccagaaccagggcaagaaggccgagggggctcagaaccagggcaaaaaggccgagggagcccagaaccagggccaaaaaggagagggagcccagaatcagggtaaaaagacagaaggggctcagggcaaaaaggcagaaaggagtcccaaccaaggcaaaaaaaggagagggagctcccatccagggcaaaaaggcagattcggttgctaatcagggcacaaaggtagagggtattacaaaccaggggaaaaaagcagaagggtcccccagtgaaggcaaaaaggcagaagggtcccccaaccaaggcaaaaaggcagacgcagctgccaatcagggtaaaaagacagagtcagcttttgttcagggcaaaaatacagatgtggcccagagcccagaggcaccaaagcaagaggctcctgccaagaagaagtctggttcaaagaaaaaaggtgagcctgggcccccagatgccgacggccctctctacctcccctacaagacgctggtctccacggttgggagcatggtgttcaacgagggcgaggcccagcggctcatcgagatcctgtctgagaaggctggcatcattcaggacacctggcacaaggccactcagaagggtgaccctgtggcgattctgaaacgccagctggaagagaaggaaaaactgctggccacagaacaggaagatgcggctgtcgccaagagcaaactgagggagctcaacgaggagatggcagcagaaaaggccaaagcagcagccggggaggccaaagtgaaaaagcagctggtggcccgggagcaggagatcacggctgtgcaggcacgcatgcaggccagctaccgggagcacgtgaaggaggtgcagcagctgcagggcaagatccggactcttcaggagcagctggagaatggccccaacacgcagctggcccgcctgcagcagggagaactccatcctgcgggatgccttgaaccaggccacgagccaggtggagagcaacctccccagcctggccctggtccagctggccagtgagggggcgcgtggactccgtgggctgctgcccacaggcctacagggcgtcaaggcggagctgcacagcaagttacagtcctccgaggcggaggtgcgcagcaaatgcgaggagctgagtggcctccacgggcagctccaggaggccagggcggagaactcccagctcacagagagaatccgttccattgaggccctgctggaggcgggccaggccgcgggatgcccaggacgtccaggccagccaggcggaggctgaccagcagcagactcgttccagatccaaggtgactgagacaaactgccagctgccactggcttatcaggagcacctggcgtcccacagggagagtgaggaggccctgcagaagcgcctggacgaggtcagccgggagctgtgccacacgcagagcagccacgccagcctccgggcggatgccgagaaggcccaggagcaacagcagcagatggccggcatagaaattgaatctgaaatggctgatgaataa

SEQ ID NO: 124989 - DNA, 1674 bp, Homo sapiens
tcatgagtccacagatggtagtcttggcagaagtattgcgtgcaagataggcaaacccatatctggagtaaatactgttccagtgaggatagacctctgccctttccatgatggaggagattcaatataatcaacctgccacaaggtagctggctgatcatcccaaggaatggtgccatattgagggctcagtgttggtctctgctgctggcaaattggactatggccactttgctcatgagcccattgagtgatgacaggggtgagtggggaaagaggctgagtcgtgtccacaaaatgagttatcctacccacttgattattaaaatcctcctctgctgaggtcaatcgttggtgagcactcacatgagatacaaatatcttcacagtttttgaccactcagtgaagtccatccacatacctcttccccaaatttctttgtcatcaattttccaatcatgctccttccaagtccctgaccatccagccaaaccattggctacggcccatgaataagtatataattgcacatctggccatttctccttccatgcaaagtgcataactaggtgcactacatggagttctgtccactgggaagatttcccttcactgctgctctttagggatgtcctggaaagaggctgtagtggtgcagctgtccacaataagtccggtgtgtttgctactttttgctcactgaatccaatcagcataatgccatcaatgtcatggactagtgtgatatcttccagaagcctagcagtcagggagccattgtgggggttctgctgactgctaagtatgttcttgccaattatgcattctagcaccggggaaatggccatgggatgagactggggaccagctgaatccactccataagcttctactttaactggagaaccacagtgatattttgggtcccctggaatcaatgtcagctcaaaggcagtgcccagtagtccctgaaatgtctgatcatttccctttccccagtgcacagttaccctggtaaaaggccagaggtctccttctctcctatcaacagcggccagccccccaactatgaaatgctcaaggaggagcacgaggtggctgtgctgggggtggcctacaaccctgctcccccgacgtccaccgtgatccacatccgcaacgagacctccgtgcccgaccatgttgtctggtccctgttcaacactctcttcatgaacccctgctgcctgggcttcatagcattcgcttactccgtgaagtctaggcacaggaagatggttggcgacctgactggcgcccaggcctatgcctccaccgccaagtgcctgaacatctgggccctgattttgggcatcctcatgaccattctgctcatcatcatcccagtgttgatcttccaagcctcccttcttcctttcttctcctttttcttttcctatttctccctgctctccagctcctgtttctctctttttctcttgttttctttttctttttttcatttttccctttgttccaaaggctggagttgtgggggtggggcgagtgggaccaccattccactgagtcctaggggtggaactgctgccccagtgggcactctcgtttctctctgtgatgacaatgccacttgctaatggctgcttcttggcatcctctccctcagtgtgcat

SEQ ID NO: 124990 - DNA, 675 bp, Homo sapiens
tgagggtagcgaccatcgtggatatctgggagaagagcatttcaggcaagaagaacagccaaaacctcttcgtgaacccctgctgcctgggcttcatagcatttgcttattccgtgaagtctagggacaggaagatggttggtgacctgactggggcccaggcgtatgcctccaccgccaagtgcctgaacatctgagccctgattgtggacatcctcatgaccattctgctcatcatcatccgggtgttgatcttccaagcctatcgatagatcaggaggcatcatccaggccaggagctcgggccctgcaggatggagcttgggcctcagttttcccatctgtgcaatgggaacaacagggttggtgagggggttggaggtgggctgggtacagtgcctgccccctgtgcggtaggacctgcagcggatcaaaagcctgtcccaggagacctgtgcctgagatgctgggcgggtcatgcttcctgcagctgctgccaactgcgtcccagactgggcgcggggatcctggcttctctgacatgacgcaaaagccgtgtcaagagggcagaagagtttaagggtcaccagccggcaggggctggtgggggcagcttctgtggtcacgcaggactgctgggtcaaatgaagggcacagatggcaagagatctccaa

SEQ ID NO: 124991 - DNA, 732 bp, Homo sapiens
ggatatgcccaccaactcccggttcgacgacttcgtctggggaaagggagggctcactgagaaccatcccggtaacccgaccgccgctggtcttcgctggacaccatgaatcacactggccaaaccttcttctctcctgtcaacagtggccagccccccaactatgagatgctcaaggaggagcacgaggtggctgtgctgggggcgccccacaaccctgctcccccgacgtccaccgtgatccacatccgcagcgagacctccgtgcccgaccatgtcgtctggtccctgttcaacaccctcttcatgaacccctgctgcctgggcttcatagcattcgcctactccgtgaagtctagggacaggaagatggttggcgacgtgaccggggcccaggcctatgcctccaccgccaagtgcctgaacatctgggccctgattctgggcatcctcatgaccattctgctcatcgtcatcccagtgctgatcttccaggcctatggatagatcaggaggcatcactgaggccaggagctctgcccatgacctgtatcccacgtactccaacttccattcctcgccctgcccccagaggccaggagctctgcccttgacctgtattccacttactccaccttccattcctcgccctgtccccacagccgagtcctgcatcagccctttatcctcacacgcttttctacaatggcattcaataaagtgtatatgttt

SEQ ID NO: 124992 - DNA, 1195 bp, Homo sapiens
ttgccaaatgattggggcttcagagcagccggcagggatttgtccactttgtcagatgaggcgccaaggtcagggttgtaagggaagtcccagtcctcaaggaaaatggcttccagttggctccgcaggccgcccttcccattttgcgtgggttcacattthattgtaacttggaagcccacccttctatcctactcctggagctgtcgtccccamagggctcagagadttagccttgctccacagcaaacagcccagaggccccacctgggcaaaagcaaacaaaacagdtwacgttcctttaccggcaggtggcagatgctctgcccaggcctgcggaagccagctccggtctgtgtgttaattccttcccaggaacttccggcccaccagctccattccagcctccactcggctcagctccgcggcttccthcgagccaggggtgggtcctgcatcgccatctgctgggccgcgcggcacggccggttttcctggagccaagaagaagtcggaggcttgcagggcttgaaggcctcttcaccgtgccctccagggagcctagctggccgaagtattcctgctggaacttctggaagtcttcctcggtgaacgacggtgccctcagccttcttcttcttggtcttggccacaggccggtcacaggccttgcggccccggttctggcgcaaaatctggcgagggtgcgggaccgagggcccatcatttcaagagcagaggaggcccgcaaaggtcacagggtggtctcgacactctcgcttccggtactcgtctgtgggtagcaggcagggagcaccatttcagattcactccccctggaaccattctcagtccctgatgcttctctccccactagggccgtagtccacgaggaccaggacggtggcgtgttctgtcaccttcgtatgtccagggccccgctccgcgcctggcacacagtaggtctagcaataccgggcgaacgcttcaagccctgcctcaagcgccacctccgtcttccggggccgtttcaccggagcccctctcggcttggcctgacctggagggtcccggggggctgtaggggaagagagaggaagagacccaggtcagagggcgcgcagcgttcccatgccactggggtccgcccacgagcctcacactacttccgacctggcagtccctgtcgtctcgg

SEQ ID NO: 124993 - DNA, 5881 bp, Homo sapiens
caaaacatagagtaccccggcagccggcaagaggaagagagagtggcttccacatccccaatatcctagaggcggctgagccggaggcggtcgcacaaagcgggccccgggggccgttccagccgcggccgaccatagagatgcggctcccgccggctctgggtctggagataggaaagctgaggcccagagaagcgaagcgactgtgtctgtccaagaccacgcgccctcctgcccggaagataagcgtatttcttctctggtgcccacctgtctcctacctcaccctgccctcccgcaggtgaaggttcttaatcttgacggctcagcgtcctccttggctccccccggaggccatgtatggtcaagcttgaagattccccagaacaacgctaatattcacatttaagaagccaaaacacacaagtcggtggtgatgacagacccccttttggactcacagccagccagtagcaccggggagatggatggactgtgccctgagctattgctgatccccccgcctctctctaaccgtggaatcctggggcctgtccagagcccctgtccttcccgggaccctgcacctatacctactgagccaggctgcctgctggtagaggccacagcaactgaagagggaccagggaacatggagatcattgtggagacagtagctggaaccctgaccccaggtgctcctggagagaccccagctcccaaactgcctccaggagagagagaaccttcacaggaagcaggtacacccttgcctgggcaggagacagctgaagaggagaatgtagagaaagaagagaagagtgacacccagaaggactcccaaaaggctgtggataaaggccaaggggctcagcggctggaaggggatgtggtctctggcaccgagtccctcttcaagacccatatgtgtccagagtgtaagcgctgctttaagaagcggactcatctggtggagcacctgcatctccacttcccagaccccagcctccagtgccctaactgccagaagttcttcaccagtaagagcaagctcaagacccatctgctgcgggagctgggtgaaaaggcccaccactgcccactgtgccactacagtgcggtggagaggaatgcactcaaccgccacatggccagcatgcatgaagatatttccaacttctactcagacacctatgcctgtcctgtctgccgtgaggaattccgcctcagccaggccctaaaggagcacctcaagagccacacggcagcagccgcagcagagccattaccccttcgctgctttcaggagggctgcagctatgcagcacccgaccgcaaggccttcattaagcacctgaaggagacccatggggtgcgggctgtggagtgccgccatcactcatgtcccatgctctttgccacagccgaagccatggaggcccaccacaagagtcactacgccttccactgcccccactgtgattttgcttgttccaataagcacctattccgtaaacacaagaagcagggccaccctggcagtgaagagctgcgctgcaccttctgcccctttgccaccttcaacccagtggcttaccaggatcatgtaggcaagatgcatgctcatgaaaagatccaccagtgtcctgagtgcaactttgccactgcccacaagagggtgctcatccgacacatgcttctacatacgggtgagaagccccacaagtgtgagctgtgtgacttcacatgccgagacgtgagctacctatccaagcacatgctgacccactccaacaccaaggattacatgtgcactgaatgtggctatgtcaccaagtggaagcactacctccgtgtgcacatgcgaaaacatgcaggggacctcaggtatcagtgcaaccagtgctcctatcgctgtcaccgggctgatcagctgagcagccacaagctgcggcatcagggcaagtctctgatgtgtgaggtgtgtgccttcgcctgcaagcggaagtatgagctgcagaagcacatggcttcccagcaccaccctggcacaccgtccccactctacccttgccactactgcagttaccagagccgccacaagcaggctgtgctgagccatgagaactgcaagcatacccgcctccgtgagttccactgtgccctctgtgactaccgcaccttcagcaacaccacactcttgttccataaacgcaaggcccatggctatgtacctggagaccaggcctggcagctccgctatgcaagccaggagccagaaggggccatgcagggcccaacacccccaccagattcagagccctcaaaccagctgtcagcccgacctgaggggccaggtcacgaacctgggactgtggtggaccccagcttggaccaggccctgccagagatgagtgaggaggtcaacactggaagacaggagggcagtgaggctccccatgggggtgacctgggtggcagtcccagcccagcagaggtggaggagggcagctgcacactacacctagaggccctgggagtagagctggagtctgtgactgagccaccccttgaggaggtcactgaaacagcccctatggagttcaggcccctgggactggaagggccagatggactggaaggaccagagctatctagctttgaaggtattgggacttctgacttgggtgctgaagaaaatccccttctggaaaagccagtgtctgagccctccacaaatcctccatccttagaggaggctcctaacaactgggtaggaaccttcaagacaactccacctgctgagacagcacccttgcccccattacctgagtcagagtcattactcaaggccctaaggagacaggacaaagaacaagcagaggcattggtgctagaggggcgggtgcagatggtagtgatccagggagaggggcgagccttccgctgcccacactgcccttttatcactcgccgggagaaggccctgaatctgcactccaggactgggtgccaaggccgccgagagcccctgctgtgccccgagtgtggggctagcttcaagcaacaacgcggcctcagcacccacctgctgaagaagtgccctgttctactcagaaagaacaagggcttgcccagaccagattcacccatccctctgcaacctgtgctcccaggtacccaggcctcagaggacacagaaagtgggaagcccccacctgcatcacaagaagcagagctactgcttccaaaagatgctcctttggagcttcccagggagccagaagaaacagaagagcctcttgccacagtctctggttccccagtccctcctgcaggaaactccttgcccacagaggcccctaagaagcactgctttgacccagtccctcctgcaggaaactcctcacccacggaggcccctaagaagcaccaccttgacccagtccctcctgcaggaaactcctcacccacagaggccctgaagaagcaccgctttgagcagggcaagtttcactgcaactcctgcccattcctttgttcccggctctcctctattacctctcacgtggctgaaggctgcagggggggacgtggcgggggaggaaaacgagggaccccccagacccagcctgatgtgtccccgttgagcaatggggactctgctcccccgaagaatgggagtacagagtccagctctggtgatggggatacagttctggttcaaaagcagaagggggctcgcttctcctgccctacatgtccctttagctgccagcaggaacgggctctgaggactcaccagatccggggctgccccctcgaggagtctggagagctgcactgcagcctctgcccattcactgctcctgctgccactgccttaaggctccaccagaagcggaggcaccccactgcagccccagcccgtgggccccggccccatctacagtgtggggactgtggcttcacctgtaaacagagccgttgcatgcagcagcaccggcggctcaagcacgagggggtgaagccccatcagtgccccttctgtgacttttcgaccaccagacggtaccggttagaggctcaccagtcccgacacacaggcattggccgcatcccctgcagctcttgcccccagacgtttggtaccaactcgaaactgcgcttgcaccggttaagggtacatgacaaaacacctacccacttctgtccactttgtgactatagtggctaccttcgccatgacatcactcgtcatgtcaacagctgccaccaaggcaccccagcctttgcctgctcccagtgtgaagcccagttcagctcagagacagcacttaagcagcatgctctgcgccgacaccccgagcctgcacagcctgcccctggctctcctgcagagaccactgagggccccctgcactgttcccgctgtgggttgctgtgccccagccctgccagcttacgaggacacacccgtaaacagcacccacggcttgagtgtggggcctgccaggaggccttccctagccgactggctctggatgagcaccggaggcagcagcatttcagccaccgctgtcagctctgtgactttgctgcccgggagcgggtgggcctggtaaagcactacctggaacagcatgaggagacttcagcagccgtggcagcctcagatggggatggggatgctggccagcccccgctacactgccccttttgtgacttcacatgccgccatcagctggtactagatcaccatgtgaaagggcatgggggcactcgtctctacaagtgcaccgattgtgcttacagcaccaagaaccgacagaagatcacctggcacagccgcatccacactggggaaaagccttaccactgtcacctctgcccctatgcctgtgctgatccctctcgtctcaagtaccacatgcggatccacaaggaggaacggaagtacctgtgccctgagtgtggctacaagtgcaagtgggtcaaccagctgaaataccacatgaccaagcatacaggactgaagccataccagtgtcccgagtgtgagtactgcaccaaccgggctgatgcactgcgtgtgcaccaggagacccggcatcgagaagcacgggctttcatgtgtgagcagtgtggcaaggccttcaagacgcgcttcctgctgcgcacccaccttcgcaagcacagtgaggccaaaccctatgtgtgcaaatgtgtgccaccgtgctttccgctgggctgctggcctgcgccatcatgcccttaaccccaaccgaccgccaccccttcttttgccgcctctgcaactacaaggccaagcaaaagttccaggtggtcaagcacgtacgcaggcaccaccctgaccaagccgacccaaaccagggtgtgggcaaaccaccccccacccccacgagtgcacctgcatgatgtgcagctggaggatcccagccctcctgctcctgccgctccccacactggacctgagggctgaaagcctgccccacctcctgtataggaagagggtatggtctgagatgtgcagactgggaccagcgctagcctgaggagctcagagcctaaggaaagactggcttttggggtacaagggtgactagaaccttcctgggactctggctatagtactttgaaattatcacccatataaaagagggacatggactataacgttgatttcttattgctgtacattgcgtttttaacctgcaagttctcagtttcttcaccatcactccatcaaagtccctggctataagatctggattttacccactccatcttctctttccttcttactgtgtcaattcctattttctttcagaatcttctaaaaacagttgtatctaaccgc

SEQ ID NO: 124994 - DNA, 1707 bp, Homo sapiens
ttcccgggtcgacgatttcgttcaggaggcacagctcacagacacaggaaacacaggactgctattctgctctcctgcccacggtgatctggtgccagctggtggaacagtgggtgatggcgtccctgctgcaagaccagctgaccactgatcaggacttgctgctgatgcaggaaggcatgccgatgcgcaaggtgaggtccaaaagctggaagaagctaagatacttcagacttcagaatgacggcatgacagtctggcatgcacggcaggccaggggcagtgccaagcccagcttctcaatctctgatgtggagacaatacgtaatggccatgattccgagttgctgcgtaccctggcagaggagctccccctggagcagggcttcaccattgtcttccatggccgccgctccaacctggacctgatggccaacagtgttgaggaggcccagatatggatgcgagggctccagctgttggtggatcttgtcaccagcatggaccatcaggagcgcctggaccagtatcggcaggatggagtcagggtgggggtgagggatcacgctatccctgaaggagccagatgcaacaggtttaggaaagagaccactgagggccccctgcactgttcccgctgtgggttgctgtgccccagccctgccagcttacgaggacacacccgtaaacagcacccacggcttgagtgtggggcctgccaggaggccttccctagccgactggctctggatgagcaccggaggcagcagcatttcagccaccgctgtcagctctgtgactttgctgcccgggagcgggtgggcctggtaaagcactacctggaacagcatgaggagacttcagcagccgtggcagcctcagatggggatggggatgctggccagcccccgctacactgccccttttgtgacttcacatgccgccatcagctggtactagatcaccatgtgaaagggcatgggggcactcgtctctacaagtgcaccgattgtgcttacagcaccaagaaccgacagaagatcacctggcacagccgcatccacactggggaaaagccttaccactgtcacctctgcccctatgcctgtgctgatccctctcgtctcaagtaccacatgcggatccacaaggaggaacggaagtacctgtgccctgagtgtggctacaagtgcaagtgggtcaaccagctgaaataccacatgaccaagcatacaggactgaagccataccagtgtcccgagtgtgagtactgcaccaaccccggctgatgcactgcgtgtgcaccaggagacccggcatcgagaagcacgggctttcatgtgtgagcagtgtggcaaggccttcaagacgcgcttcctgctgcgcacccaccttcgcaagcacagtgaggccaaaccctatgtgtgcaatgtgtgccaccgtgctttccgctgggctgctggcctgcgccatcatgccctcacccacaccgaccgccaccccttcttttgccgcctctgcaactacaaggccaagcaaaagttccaggtggtcaagcacgtacgcaggcaccaccctgaccaagccgacccaaaccagggtgtgggcaaagaccccaccacccccacagtgcacctgcatgatgtgcagctggaggatcccagccctcctgctcctgccgctccccacactggacctgagggctga

SEQ ID NO: 124995 - DNA, 1092 bp, Homo sapiens
atgtccattttgctgacctcaatcgcgagacagtcgagagataagcgtacacgccttggacacaaacaacggattctggccggcctcgggtctaaccatccgatccgtcgtaatctgcaaggtctgcgtcgtttcgccctggtagaccggcagctcgtcgtccaaaatgtagtcacccgctggtgccggatggtgtaccagagtgctgcaaatgtgttcatccagcatcgaccaatttcccacgacgaacgagtacagcagcgcggcacagccatcacaatgatggttcaacaagcacaatgggccgaacgtggcaaatctgggctatctggtgtcgcaatcgggcctgccgtggataccagcgcattgcaggcgcagcttcgtgaaacattgccaccacatatggtaccggtggttctgctgcaacttccacagttaccacttagcgccaacggcaagctggatcgcaaagccttaccgttgcctgaactgaaggcacaagcgccagggcgtgcgccgaaagcgggcagtgaaacgattatcgccgcggcattctcgtcgttgctggggtgtgacgtgcaggatgccgatgctgatttcttcgcgcttggcggtcattcgctactggcaatgaaactggcagcgcagttaagtcggcaggttgcccgccaggtgacgccggggcaagtgatggtcgcgtcaactgtcgccaaactggcaacgattattgatgctgaagaagacagcacccggcgtatgggattcgaaaccattctgccgttgcgtgaaggtaatggcccgacgctgttttgtttccatcctgcgtccggttttgcctggcagttcagcgtgctctcgcgttatctcgatccacaatggtcgattatcggcattcagtcaccgcgccccaatggccccatgcagacggcggcaaacctggatgaagtctgcgaagcgcatctggcaacgttacttgaacaacaaccgcatggcccttattacctgctggggtattcccttggcggtacgctggcgcagggtattgcggcgcgactgcgtgcccgtggcgaacaggtggcatttcttggctga

SEQ ID NO: 124996 - DNA, 944 bp, Homo sapiens
atgcgcacaatcctgacgatagatatccagctccgctatccacggcgaccaggcgcgttcgggactcataccttcctgaagtgtgcgttcagcaacaaacagcgtcgctttaccgtcaaacgttttgcgtttctggcggccaggtatccagcaagccaagaaatgccacctgttcgccacgggcacgcagtcgcggcggcaataccctgcggcaacgtacccgccaatgggaataccccagccaggtataaggggcaatgcgggttgtgttcaagtacgttgcaagatgcgcttcgagacttcatccaggttgcccatacctgcgaaatccccctgatgcccgcctgcttcggtctggccgatgacaaactgtggcgttggttgaatgaaaaactaccttgttcactgatgcttttgccaacgctgccgccttccgtgctgggcattcgtctgcaaaaccagttacagcggaagattgtgctttttggtggcgtgtggatgccgggcgatgaagtgaaaaaagtgacctgtaaaaatggcgtagtgaacgaaatctggacccgcaatcacgccgatattccgctacgtccacgtttcgcggttctcgccagcggcagtttctttagtggcggactggtagcggaacgtaacggcattcgagagccgattctcggccttgatgtgctacaaaccgccacgcggggtgaatggtataagggagatttttttgcgccgcaaccgtggcagcagttcggtgtaaccactgatgagacgctacgcccgtcacaggcagggcaaaccattgaaaacctgtttgccatctgtttcgatgctgggcggatttgatcccatcgcccagggatgcggcggcggtgtttgtgccgtcagtgctttacatgccgctcaacagattgcccaacgcgcaggaggccaacaatgaatga

SEQ ID NO: 124997 - DNA, 479 bp, Homo sapiens
  misc_feature (1)...(479): n = a,t,c or g
gaggnnntttgtttgtagacatagtccagagcggtggaattcgtcagagacctcagggccccagatcaaggaggacggcaaggtggtgactgtgcatctggagaaggtttgtacatgcattcaattcatcaaatacttgaacacctgctctgtgcctggtactgttcttgttctaagtgctggaaagagaacagtgaacaaaacataggaaaatatgtgccctcaggaagccttcattctcaacctcactgcctttacagagagatcaataagatggagtggtggagccgcttggtgtccagtgaccctgagatcaacaccaagaagattaaccctgagaattccaagctgtcagacctggacagtgagactcgcagcatggtggaaaagatgatgtatgaccagcgacagaagtccatggggctgccaacttcagacgaacagaagaaacaggagattctgaagaagttcatggatca

SEQ ID NO: 124998 - DNA, 773 bp, Homo sapiens
ggcaccgtctcgtacctctggatccagtgtaggcctgcaagggtcttatgtgctggatgtggatgggagagagtttggttgtgaaagggttaaggggtgattcctggtgcacagagcaggccacctcccaccctctggttgttctcttcacagatcaataagatggagtggtggagccgcttggtgtccagtgaccctgagatcaacaccaagaagattaaccctgagaattccaaggtgagccctggctggttgggggagcttcagcaggaaggtgaggggcctcgttgtttccagagcttcaccgattcctgtcactgcctgccctcagctgtcagacctggacagtgagactcgcagcatggtggaaaagatgatgtatgaccagcgacagaagtccatggggctgccaacttcagacgaacagaagaaacaggagattctgaagaagtgagcaattcaaagacggggttgggggaccgtgggtgcctgggggcttatacttcggtgacagcagtgagtggatcactgcgctgcctcaggagctgccctgccccctttccagccatgtttatggctttatggctttggcttgcctactcttgtcatttgctgaggtcatcttgagggcaaggccggctcatggtgcatgataggagggaaggggtaacaggcggtcattgccacctacaggaaaacaatgccagtgttggtgcctcagcttccagcctcggaactcaaatgcgtctcagataccctgggccctgctcctg

SEQ ID NO: 124999 - DNA, 1491 bp, Homo sapiens
ggcgcgacccgcaggagcgtagagagcgcgggactagagtgcagagctccgggacgtggatcggagccggcgcgatgggcggagagcaggaggaggagcggttcgacggcatgttgctggccatggctcatcagcacgagggcggcgtgcaggagcttgtgaacaccttcttcagcttccttcgacgcaaaacagactttttcattggaggagaagaagggatggcagagaagcttatcacacagactttcagccaccacaatcagctggcacagaagacccggcgggagaagatagcccggcaggaggccgagcggcgggaaaaggcggagcgggcggccagactggccaaggaagccaagtcagagacctcagggccccagatcaaggagctaactgatgaaaaagcagagaagctgcagctagagattgaccagaaaaaggatgcagagaatcctgaggcccagctcaagaacggcagccttgactccccagggaagcaggatactgaggaagatgaggaggaagatgagaaggacaaaggaaaactgaagcccaacctaggcaacggggcagaccttgcccaataacgcttgaacccagacccctgtcgggagctggacctggcggtcccttttctgtgtgaacttccggctgaaagggaaggacatggtggtggacatccagcgcggcagcacctcggggtggggctcaaggggcagccagcgatcattgatggggagctctacaatgaagtgaaggtggaggagagcttcgtggctcattgaggacggccaaggtggtgactgtgcatctggagaagatcaataagatggagtggtggagccgcttggtgtcccagtgaccctgagatcaacaccaagaaagattaaccctgagaattccaagctgtcagacctggacagtgagactcgctagcatggtggaaaagatgatggtatgaccaggcgacagaagtccatggggctgccaacttcagacgaacagaagaaaacaggagattctgaaagaagttcatgggatcaacatccggagatgggattttttccaaaggctaaatttccaactaacccctgtttttttcctccctgaaactctttggggcttagcttgcaaccaccccaactttctttccccactcttctcttgggacttgtgggcctcagggcttggggcagccattgggaacttggcccaggcacacagttcccggggcattcaggagaaaggctgggtcttgggacctttgtcctccccagtggccttacttgttacacattaaaacgattttccccagcttctttcggggtcttcttcttgcttctgccttttctttggggcacagccttcttacagcttgctgctgggaactgggagtttggcttctagcccagattctgccatgtgacctagggcacatccttgcccctctctgggcctcagtttctcattacttaaagattaaaacaa

SEQ ID NO: 125000 - DNA, 426 bp, Homo sapiens
tttgctaggcagcggcagtggcggcggcagcggcggctggagcctctgattgggtttcggagtccggtactggagccaatcagcgcgggcagcgaaccgggggagcgaggcacggagtgtacctcacagccttctaggatctccagagtggacaggaatctcacttggagggaccatggagcagtatacagcaaacagcaatagttcgacagagcagattgttgtccaggcaggacagattcagcagcaggtccaagggcagccattaatggtgcaggtcagtggaggccagctaatcacatcaactggccaacccatcatggtccaggctgtccctggtggacaaggtcaaaccatcatgcaagtacctgtttctggaacacagggtttgcagcaaatacaggtgggcccacctcggcagaaacc

SEQ ID NO: 125001 - DNA, 1023 bp, Homo sapiens
caggtatggaagcaaaactgctttaaacattacagcaatgaaactgataacagcaccactcaattggttggtctacagaccctccaggtagtggtaccctctctgattctctgtgagcactgcatgaacttctcctctcctcatgtctggtgctgtttggtccaggctgtccctggtggacaaggtcaaaccatcatgcaagtacctgtttctggaacacagggtttgcagcaagtgagtaatatttaaaaatattgagcagtatatcagaggagaggtttcaaagaatagattattacaacctatcagacccagcagatcatcatccagcagccccagacggctgtcactgctggccagactcaggtaattccactagctctgtcacacaggagcaaaactgatttggaagagtcagataactgagtcagatatttcccagttaatgcagatggcaccattctccagcaaggtaagtgtacccataagcttccctaggactttttggggcaacttttttgtcccttagacaactgacatctttccagcagtgggcaagggactgtcactgtgacactaccagtggcaggcaatgtggtcaattcaggagggatggtcatggtaagaaaatgtatttttcagctttgtctttgaaattttcttgaacatgcaacttgatgcctcctaaaatttgagcctctctacgtgaatgccaaacaataccaccgtattcttaagaggaggcaagcccgagctaaactagaggcagaagggaaaattccaaaggagagaagggtatgtataacattgggaaggatataggaaaggagaatagcagggttctacttttgaaattatcttttatatccaaaggaaaaggatagtccccatatgcaggtaggaagacatatacattttattcttctctttattaccttgtattgacttgagttgaagccttcagcagtgagctgatcaaggtcatgtttctcactgttccaggaaattgatcaactcttccaa

SEQ ID NO: 125002 - DNA, 460 bp, Homo sapiens
tgaaaagtattgaggcctcataagctgaacctgacacaataaatttaaaagggaaactaatttggaaatcagaaaaccatctaaggaatttgggaattaggcttctgctgccctctctgctactgacggtcaaggcctcctcattgtattctgtcctccatatctctgctgattcccattttgtctatttccatttaccccactactgcttgctcaggtcactctccttcactgtcggtgtttgttcaaattcctcagacccatccacttcccatctaaacttccctccccttttctcgctcgttggctctacctccctcctctctgttttctcctcactctcctgccccacctcgacatccacagcgaggcaatgaagaagcccctgccaaggaagagcccgcttctcagtgggacaccgggaaggtagacacccaacagtcaccgctagtgggaggcg

SEQ ID NO: 125003 - DNA, 2454 bp, Homo sapiens
atgaagtttcatgacagaggccaaatgcagcccaaacccagcccagcagaggctgtcaactcagcgccccagcgagagccggaaggttccatcctcagagctgcagaccctctcgtgtgggctgcaaaggccatgtctgcatcccgggcgaccgcagcttggccctgtggccgcctcgccttgggtgtggagaatgaacctcgagtgcgctggattcacaggggattttggtttctaattttccacatgaagggtctctacccctcagcagtcagggctgaaaacaggaaggattttactcaaccatggacgccgccggctcaaggtgtcccaaagcgaggggcgtttcctggaagttgggtggaagcagcgcggacccacggcacaccgaacgcactccaacagaacccgacgcagacacgcgctttcaaccggcggagacactggcagggccagaaacgcgcgcagcgggggcgggaggtcgccacgcagttcccttcctgcggcgtcctccacacccggggtctgctggtctccgcggatgtcacaggctcggcaaccgccctcctgtcggcggggagtcccgcgacgcccggaaatgctccgaagcctgtcgcccagctgccagatctgcgtctgtgtccggttccgtcactgagggcagccctgggattcggcagacgccagtcctccctgagatgcttccccatccttccctccgccaggccctacgtctccgcaaaccccacgcttcggggtggccgcctcagacaggaccctgagtccgagactggggtaggggacctgcccgatcctgtaacaaccctcgtgcttctgcacaatcgcctcccactagcggtgactgttgggtgtttaccttcccggtgtcccactgagaagcgggctcttccttggcaggggcttcttcattgcctcgctgtggatgtcgaggattccatgaccttcgaggatatcattgtagacttcactcaagaagagtgggccctgctggacacatcccagagaaagctgtttcaagatgtgatgttggagaacatcagtcatctggtctctattggcaaacagctctgcaaatcagttgtgctttcccaattggagcaagtagagaaactttcaacacaaagaataagcttactgcaaggtagagaagttggcattaaacatcaagagataccattcattcaacatatctatcagaagggcacgtccaccatcagcacaatgagatctcatactcaagaggatccttttctatgcaatgacttaggagaagatttcactcaacatatagcattgactcaaaatgtgattacctacatgagaacgaaacactttgtaagcaaaaagtttgggaaaatcttcagtgactggttatcctttaatcaacacaaggaaattcacaccaaatgtaaatcatatggaagtcatctatttgattatgcctttatccaaaactctgcccttagaccacacagtgtgactcacactagagagataacattggaatgtcgtgtgtgtgggaaaacctttagcaaaaattctaatcttaggcgacatgagatgattcacactggagagaaaccacacggatgtcatctatgtgggaaagcctttactcattgctctgatcttcgaaaacatgagagaactcacactggagagaagccatatggatgtcatctatgtgggaaagccttcagtaaaagttctaaccttagacgacatgagatgattcacactagagaaaaagcacagatatgccatctatgtgggaaagccttcactcattgctctgaccttagaaaacatgagagaactcacttaggagataaaccatatggatgtctcctatgtgggaaggctttcagtaaatgttcttaccttagacaacatgaaagaactcacaatggagagaaaccatatgaatgtcatctatgtggaaaagccttctctcattgttctcaccttagacaacatgagcgaagtcacaatggagagaaaccacatggatgtcatctatgtgggaaagcattcactgaatcttctgtgcttaaacgacatgagagaattcacactggagagaaaccatatgagtgccatgtatgtgggaaagccttcactgaatcttctgacctcagacgacatgagagaactcacactggagaaaaaccatatgaatgccatctatgcggaaaagccttcaatcactcttctgtccttagacgacatgagagaactcacactggagagaaaccatatgaatgcaatatatgtggtaaagccttcaatagaagttacaactttagacttcatagaagagttcacactggagagaaaccatatgtatgtcctctatgtgggaaagcctttagtaaattttttaaccttagacaacatgagagaactcacactaaaaaagcaatgaatatgtaa

SEQ ID NO: 125004 - DNA, 1699 bp, Homo sapiens
tagtcacaaggactgtgactaaggctcagtccctgaggagtgccttggcatgggctgctttaggctgtaaacacccagttttatccactttatgtgaagaaagccaacaaggggcatggagtgagttccgcaggttttagcggctgcggcggctggtgctcagtggggatgatggagggaaggcgcctccctctgcgggccccgaggtctgtgcgggaatcagctctgcagctgtgtccagggggagccgtagaccacacacggcaggctcacagctctgttccatgagaactttatacacaaaagcagacgggctgggcttggcctctggatcataatctgctgacccctccctcctctctgttttctcctcactctcctgccccacctcgacatccacagcgaggcaatgaagaagcccctgccaaggaagagcccgcttctcagtgggacaccgggaaggtagacacccaacagtcaccgctagtgggaggcgattgtgcagaagcacgagggttgttacaggatcgggcaggtcccctaccccagtctcggactcagggtcctgtctgaggcggccaccccgaagcgtggggtttgcggagacgtagggccgacctcccgcccccgctgcgcgcgtttctggccctgccagtgtctccgccggttgaaagcgcgtgtctgcgtcgggttctgttggagtgcgttcgatgcgccgtgggtccgcgctgcttccacccaacttccagcagcaaacatccaggaacccagaaaccatcagcacaggtgcctgctgagtcccatagacccaataatggcccaccaggaccaaccaggaagcaagtgtggagctgggagtgagggagctgggtgtggagatcagggggaagactgtcatctgaccagtgccccacagcaggaccacgagcagggccaaggtgtctccaaggtgctgaggagctgagcgctcagccagcccacggccacgatggtgtgccgccgaagccacgcggcttacttcacagccaggatccgggatcaggctatgtcccatgcagccatgctgcttccatgttttttcagggatttccaacacagattttcctgagtaccctggattaatctccttttggataggtccatgggggccctgctgctttttccccttagcccatggctctctgggctgatggcagggcccggcacaaggtaggaactgagtgtgagtgcgggatgcacccaggtctgaaatgctcaggaaggacccttggttctcagacgatgcttgcaacaacgccatgcgattcgcccacttgaatttgaataagaacgggctcaggtcagtgattatcgctagtgccttatcaacgccctgtggcttttcagcattagtccccatatcctcgtccgttgtggcactgagagcagctaactgttgccctcgttggttcccagttggcttccgtgactggtcagggtcaggtccactgccaacaggctggtgttgaatcccttcctgcctcaagcccctctcccacgtggtccagtcaccattctccacagagactaccctaaaacccagcgactctcgtgtgcctgcagaatggcacagcccgttctcatagcagcactcctgtttaatcagagggatgttaacgaccaagtcatatttgctcgatttgtgttcaatatatttcat

SEQ ID NO: 125005 - DNA, 992 bp, Homo sapiens
ccatgaaagacttctgaatccaggaagagaaactgactgggcaacatgttattcagagacagcgtcttgctctgttgcttaggctacagtacagtgacatgatcatggttcactgtagcctcaaactcctgggctcaagtggttctctcacttcagtctcccaagtagctgggactacagacatgtgccaccatgtccagaaacaggaccttgccctgtcactcaggatggagttcagtggtcctatcatggctcattatagcctcaaactcccaggctcaagcaatcctaccatgtcagccttcccagtagctgggactacaggtgggaacatccagttgcaggaaaacaagcttaacacgcccactgattctacattatggaagttgggtggaagcagcgcggacccacggcgcaccgaacgcactccaacagaacccgacgcagacacgcgctttcaaccggcggagacactggcagggccaaaaacgcgcgcagcgggggcgggaggtcggccctacgtctccgcaaaccccacgcttcggggtggccgcctcagacaggaccctgagtccgagactggggtaggggacgtgcccgatcctgtaacaaccctcgtgcttctgcacaatcgcctcccactagcggtgactgttgggtgtctaccttcccggtgtcccactgagaagcgggctcttccttggcaggggcttcttcattgcctcgctgtggatgtcgaggtggggcaggagagtgaggagaaaacagagaggagggaggggtcagcaaattatgatccagaggccaagcccagcccgtctgcttttgtgtataaagttctcatggaacacagctgtgagcctgccgtgtgtggtctacggctccccctggacacagctgcagagctgattcccgcacagacctcggggcccgcagagggaggcgccttccctccatcatccccactgagcaccagccgccgcagccgctaa

SEQ ID NO: 125006 - DNA, 2079 bp, Homo sapiens
atggcctgcaatgaatacaaacaactccaaaaggaagacgcactaaaccatgtcacaggcagaagcggacaatcgtcacaccacgccaaagcaccccaaggagcaatagaggcaaagacaccagatcaaaacagcgagatgaaacaacagaataaacaacgcgcgcccaagacaccaacaaagagggcgcaacacaagacagaaccgaaacagccagaagaacacagagcaacatggagaaagaaaagccaaaccaacacaatcgcaaaagaaaggaccgagacagcagaaaagacaaaggacacgagagagagaccaaaaacacggaaagaaacagaacgaaaaggagagaaaaaagaaaagacaacaaacacaacgaggcgaaatcgcagagacagacaagaaagaaaaaagagacaaaagaaacagcgacaaggaaaagagaagagccttcaaacagctgctccatgcatcctttccagatttcatggttgcattcagtgggagataacggtagacgggatcagctactgtgccaaggatttcacctgtattatctcatgtgtttcccacagtaatcctatcaactcaggtgttgttatcctcatttttcagatgaggaaacagccctgtcaatcagcaggactggcggtggcactgattagatatgactgccgaagccgatcccttcagaagagaccaatgctaaaggaaagttacatcaatcgtacactgcccgcgttttccgcgacgcctccagatcttgatggtctttccctagcaccaagcaagaagtacgaccggccgctgttcatcaactctgatgtccgagggaagcaccaccggccgtattactggagaccatcgaaattatccgaaggcaaacccctaaaaaggggggaaaaaaaagaaagcccctcgccgaatgtcttgcccaccaaaggaagtccaagagaaccgcgtgaaggacctcgggccgcgcaatcttgccctaaatcgagacctttaaagagaagaattaataagggcggaaaagaacgcgctttgggagctaccttcatcgcagatcacccaagtcaaagctccagagacctcgatgctcttagtgtgtaccagatggagaactatagtcacgtcatagctcctgaatactcgaggatatcgggtgcctgtgttcgtctttttatggggtgtcatggagctcgaagctatgggttttaccaaaacggggaaataagtggccccaaccaagggtggtggtccaaggcccaaaatggcccaaccaaggcccagggccaacttattgttcaaaaatactttccccttaaagagaaacccagaatgtgtgctacgtctcgggtgtgggtgtgggtgctactattgtcctcttcctcttccgattgtttgtcttctggccacgtcccgccccttgtgggcccctccgtcgtctatgtggtgggtctccacatggcctcttcgttgtcctctcccgtggcattcttgcttgcccgtgtctttttatacgcgctttacacagggactttaggtatacatctctccacacttgatagcggaccccatgggcccaaacccccccatcacagtcaagtcgtcaaagaaacgtctcgcgtgtctcacgaactcgtgcattcgggcactaccataactgtgcgatgcgcttatttgtcctcacgaagtaggagaaaacactcctatttacgaagcccctctatcgccttgccacatacgcccgttcactacccaccatgtgtccacctaagccagcgacattcctcctcccactttagccgcattaaaacctctcatgaggtaatattccgttatagtacacccactacgcagctctcttatgcgatgcgcttaagagtttcgaccatggggagaatctctaaactggggtacgacaaccaagtgttatgtcccataaaagcagtggaacgatcagagactctggcagagatcatacgacgactcaaggttgactactatggcatattgtcccgacatgcacaacatgagcgaatgacagtccgggcgtctcaatgcgaaactaagtga

SEQ ID NO: 125007 - DNA, 369 bp, Homo sapiens
ggacattgaccccactggactgcagtcacaggggagtcccaaggggcaggatccacctctgatgttcagtgaagactaccagaaaagtctgctagagcagtaccatctgggtctggatcaaaaactcagaaaatacgtggttggagagctcatctggaattttgccgatttcatgactaaccagtgtcagcccaagactaccccgtcggtcattctgttcctgccgtcctgtgaggagccccaagccaacaaggccacactggtgtgtctcatgaataactttatccgggaatcttgatggtgacctggaaggcagatggtaccctcatcacccagagcgtggagaagaccacgccctccaaacagagt

SEQ ID NO: 125008 - DNA, 492 bp, Homo sapiens
  misc_feature (1)...(492): n = a,t,c or g
ttcggcacagggccctccgcatctcccaggacttctttccggcatcagtgtggacattgaccccactggactgcagtcacagtggactcccaaggggcaggtcagcccaagactaccccgtcggtcattctgttcctgccgtcctgtgaggagccccaagccaacaaggccacactggtgtgtctcatgaataactttatcccgggaatcttgatggtgacctggaaggcagatggtaccctcatcacccagagcgtggagaagaccacgcctccaaacagagcaacaacaagtacgtggccagcagctacctgagcctgacgcccgagcangtggaggtcccgcagaagctacagctgccaggttatgcaagaagggagcaccgtggagaagtcagtggcccctgcagaatgttcataggttccagcccccacnccaccacangggcctggagttgcangattccaggggaggggtctctctctgcatcca

SEQ ID NO: 125009 - DNA, 944 bp, Homo sapiens
ggccacatggactggggtgcaatgggacagctgctgccagcgagagggaccagggcaccactctctagggagcccacactgcaagtcaggccacaaggacctctgaccctgagggccgatgaggccagggacaggccaggggggccttgaggcccctggtgagccaggccccaacctcaggcagcgctggcccctgctgctgctgggtctggccgtggtaacccatggcctgctgcgcccaacagctgcatcgcagagcagggccctgggccctggagcccctggaggaagcagccggtccagcctgaggagccggtggggcaggttcctgctccagcgcggctcctggactggccccaggtgctggccccgggggtttcaatccaagcataactcagtgacgcatgtgtttggcagcgggacccagctcaccgttttaagtcagccccaagacttaccccgtcggtcattctgttcctgccgtcctgtgaggagccccatagccaacaaggcccacactggtgtgtctcatgaatgacttttatccgggaatcttgacggtgacctggaaggcagatggtacccccatcacccacgagcgtggagaagaccacgccctccaaacagagcaacaacaagtacgtggccagcagcttaccttgagcctgacgcccgagcagtggaggtcccgcagaagctacagctgccaggttatgcaagaagggagcaccgtggagaagtcgagtggcccctgcagaatgttcataggttcccagcccccaccccaacgcacaggggcctggagctgcaggatcccaggggaggggtctctctctgcatcccaagccattcagcccttctcgctgtacccagtaaaccctcaataaataccctctttgtcaaccaaaaaaaaaaaaaaaaaaaaaaaaaagtcgtatcgatgt

SEQ ID NO: 125010 - DNA, 779 bp, Homo sapiens
gggtccgctgcagggcaggttcagcagcaacagcagcggcgacaccagcagggaaaagtgacagtgaaatacgatcgtaaggagcttcggaagcggctggtgctggaggaatggatcgtggagcagctgggtcagctctacggctgcgaggaagaagaaatgccagaggtagaaattgacattgatgatcttcttgatgcagacagtgatgaagagagagcttcaaaattacaggaagctcttgtagactgctacaaaccaacagaggaatttatcaaagagctgctttctcggataagaggcatgagggaaaactgagcccctccgccgaagaagagtgtatgattctggaacagggtgaaactctcccagagacgaagaaagagtcctgggatttgtacttcatgaagacttttgtgaaagaataggtgtccttatgaacaacgtttttgtttttttttttttcttttttggtgtgaaggtgggggggtctattagacatttattcaagagcgttctttttttggttttaaaggttttggtaaagggaatatttaaataccaaaaatatcttgactttagccacagcctacccagggtttatcaagggagggggaccctcagggaagggcccccccaggttgcgtttcctgcagggactcaaatgttaattcccttatgatcccggaaaaatagtttttttacaagaagttgggcaaaatttttttcctaaagttggacattggactcaattggcaaatttttcaacctggtatttt

SEQ ID NO: 125011 - DNA, 518 bp, Homo sapiens
ggaccatgaataatatgagaggacagattttgctcttgttcctcttgatttggctttggaacagatatgggcaattagtgggatcgtctgaaaagcacaagattgcaagtcagttggaactgattcaatctcaattccactactgtgtgaccttggacaagttgcttaacttctctgagcctgtccatgtaaaacaagagcaactgctttcagtgtgtagtgagaaggaagtaacagaggtgaaggtgctggcacttgtaaatcatgttggcagcaagtgttgcttcctaattttttgttctggcccaagttgacccaagttttcagtctcccaagtcttttctgactaaccaatggttcaaagtctgcttattttccactgcatccatttgagagcaggagttgggtccttctcattgctctgttcttagtttctataacaacacctggtgctgggaggtgttcataaagttctgttcaatttatccgaacctctgtgaccagtccacgaaacacgt

SEQ ID NO: 125012 - DNA, 1383 bp, Homo sapiens
tcagacccaaacagctgtgttaatatcaaatcctgagggtgagtgctccagggccttggggcagcttgtggggggattctcccctcgcctgtgctccccggtgcctgggaaggggaaatgtccagagcccttggaaaggctccgcttcttgaccttctgtgagcggccggttcgggactcagggaccatgggtgtcacccagcctggcttctccttcagcagccggtcacggtcaggccgcacactacgcaagaacttcttaaagatgtttgctgtcagggcaaacctgcggcccagctcctggggctggcctttctctcctttgggttcacgtgcccccccagtctcacccttctccccacccttctccagttctggcaagtctagccaattgcccaccaggtctgcaaaaacgttgtcccctaacaccagaggctgtcgattccggccccgggacatcaacgtggaggtccagtcatccggttccactcgctctggcccctgctgagcacagctttgatgtggctgtgtcctgggcaagggggctaaatcccttccacagacactcctatgggatggaaacttggtgctgctgccaagagaaggttgactggagggggaacagactgtgggcctggcaggacctctgccaccctcccaacaagggtgctcgcactgggtcctgggaccttcagggctgcctggcacaggaccccctccagagatctccagctgttccagtgctgtctgcacctggaggagcttcagttcttgcagtgcacccatcatgcagttcatctgatcctgtaagccatcacccacctccttcatggacatcagctcctgtttgaggcgacggagatagcagtccatttccctgctctccatcgtcatgcgcccatttgtcgggttcggttcaaacagagagggcccgggtgaaaccccggccccactggaaactgcgctccgggccggctccccgcccctgcgcccgtagcgctcgcagcgcggagctgagcctgcgctccgagcccgggactcagagtcgcttccccagcggctagccgcgcgcggtcggtgctgggtcagcaaaaccagccccgtgccctctgcacagaagcagaatggtgcagacatctctgtcctcctcagcacgcgctgtgaccccacgcccagggctgcaccttctctcagggactgtggagcccagagcatctgtaacaccgcgatgatgatcctcttctctcccctgcaaggcaggtgcagagtgcggaggcagtcccttgggtattcatcagggagggtctccgtccaggtctgctcgccatccttctccatcctggcttctggctgggtttggccagtgggggtcctggcaagagc

SEQ ID NO: 125013 - DNA, 402 bp, Homo sapiens
ggaggatgcgccggaccggggggatcgtcagtatttaaacagatcacatcatgcgtgagtacaagctagtggtccttggttcaggaggcgttgggaagtctgctctgacagttcagtttgttcagggaatttttgttgaaaaatatgacccaacgatagaagattcctacagaaagcaagttgaagtcgattgccaacagtgtatgctcgaaatcctggatactgcagggacagagcaatttacagcaatgagggatttgtatatgaagaacggccaaggttttgcactagtatattctattacaggtcagtccacgtttaacgacttacaggacctgagggaacagattttacggggttaaaggacacgggaagatgtttccaatgattttggttggcaat

SEQ ID NO: 125014 - DNA, 3532 bp, Homo sapiens
cctaactgtaactgattaatataatacaagaagaattttgacatttccttgctttcagtaaaatgtgaaacttgtacacacatgcttacaagtagttccttatgatgttaaaatttgatctgtagatctctttttttgatagattttaatttgtgagcaggttttgtcatctgagtaggttttacagctcagtccacgtttaacgacttacaggacctgagggaacagattttacgggttaaggacacggaagatgtaagtattttttctctctgtaagatgttatgccatctctctgtggccaaataaaaaagtgcctgttttcagaatttagcaagacagtggtgtaactgtgcctttttagaatcttctgcaaagtcaaagatcaatgttaatgaggtaacctacaactgctgggcagcacaaacaagtgcctttttagtttgctttaagttaacagccagacttcttgcccttagcatcactaatgtctccagttgcacaggttggggagttcaacgcagccaccaggatcaagggaactctaagcatgcagcctcctcagtttggaaagtaggatttggaatagtgagactaggcactgggacctgcctgtcttccttggagaggggatacatgtgcatggagaaagagatgtttgatccttatactcccagcagggtcctgaagcccaggtcagaagctttggaattatttgggcccttgaaatcactgacataaagtctaactgggatatgaattttaaagggatcgaggaagaaagggaaaaacgtggaggatagggtaaaggtgacttcctctggaatggaaattgggacccacttgggattgagtagacgtgggaattgcctgagccaggtcatggtgggtggaggcgagttgggaacaagattgggtgggggtgtagagctcacaggagctggtttttggcagtgtttctggtatgtccctgtaaagggccagtcatcttgaaggacatgcccagaggggcatataggtgaataggttctgcttcacagattcctcccaccccatcaggagggaatggatttttaggaggacagccacagcacctttccatgaataatatgagaggacagattttgctcttgttcctcttgatttggctttggaacagatatggacaattagtgggatcgtctgaaaagcacaagattgcaagtcagttggaactgattcaatctcaattccactacctgtgtgaccttgaccaagttgcttaacttctctgagcctgtccatgtaaaacaagagcaactgctttcagtgtgtagtgagaaggaagtaacagaggtgaaaggtgctggcacttgtaaatcatgttggcagcaagtgttgcttcctaattttttgttctggcccaagggtgggaaggaatcctgcctctaattgcagctgtcacaccccatcaggctgagggacaatcagtgggaggcgctttctgggggaaaggaacttggagttgggctttcgagagccataccgcccaccctccctcctccccaggggcccagcactgggacctggccctttcaggctcagtcaactttctgtctctaggattcagacccaaacagctgtgttaatatcaaatcctgagggtgagtgctccagggccttggggcagcttgtggggggattctcccctcgcctgtgctccccggtgcctgggaaggggaaatgtccagagcccttggaaaggctccgcttcttgaccttctgtgagcggccggttcgggactcagggaccatgggtgtcacccagcctggcttctccttcagcagccggtcacggtcaggccgcacactacgcaagaacttcttaaagatgtttgctgtcagggcgaacctgcggcccagctcctggggctggcctttctctcctttgggttcacgtgcccccccagtctcacccttctccccacccttctccagttctggcaagtctagccaattgcccaccaattccggccccgggacatcaacgtggaggtccagtcatccggttccactcgctctggcccctgctgagcacagctttgatgtggctgtgtcctgggcaagggggctaaatcccttccacagacactcctatgggatggaaacttggtgctgctgccaagagaaggttgactggagggggaacagactgtgggcctggcaggacctctgccaccctcccaacaagggtgctcgcactgggtcctgggaccttcagggctgcctggcacaggaccccctccagagatctccagctgttccagtgctgtctgcacctggaggagcttcagttcttgcagtgcacccatcatgcagttcatctgatcctgtaagccatcacccacctccttcatggacatctgcaggggagagagaaagcatggggcctatgagccacaggcctggggtttcctgcaattgctgttcatatctgactggtcagaagggagacaaggaggccaggaaccctctcaggcttctgggtcaaatcctccccctgccaaccctggccctgggggggatgggagattccagccaggctctcaatgagccagcagaagcagcactaaaggacagtggaggactgactgcccttgagggcaaggaggcctttgctggggcgtggagattgcccacgctctgtgcactttccccaagacaggcaagaagaaatggtggttccaggccctgacagccctgggatttgccagagttttcaccagttgaatggggggcagtggcaggcacacacctcctgtcatctccgtggctctccaatgcccagactcaaatccaaactatttggtcatgcagtcaagatcctccaggacagaattccaactttcagttccaggaatatccctactccctgagacgtaccccccatgctcctgttagaaatcttctgtgatatttaatatactcttccctgtagtcctgccactggaaacgctgtcacagaatctggagagccataagctggccctttctagatccaggcctgctgttgtgtggcctgagtgcccctggctctgtaaagtaagaagaaagaggagagcagaaaagtgagactgagaagagtcgactccaagagagacaaactaaaaggacaaaaagagacgagggcaaagacacaacagagagcctagtggaaggagagatgggcaaagcagagatggggctgtatgtgcataacatttgcctgaattccggtgggtgaaggaataagaaaggtggcaggtggcgtgggggcgggggcagtggtatatgaagccagtgagcagccccctccctgctggcagacaagcccaggcagacagccggccaagcctgcccccgcagccgcgccagctctgccaagcccggcagagctgggggcccagggtggtacccgcttccctcgagcgagcagtcccgctgacctcgtgcccgcgcagggatcaggacccagcaccctcctcctccccgcgctccaggtcgccccgcgcag

SEQ ID NO: 125015 - DNA, 1998 bp, Homo sapiens
tcacatactccctgctccctggtgatcagaagtgtctggtttgcttggctgcccatttgcctcttgagtgggcagccctgggcttgggcccctccctccggccctcagtgttggctctgcagaagctctggggttcccttcaagtgcacgaggggttaggctgctgtccctgagtcctccattctgtactggggggctggctaggacctggggctgtggcctctcagggggcagcctctccatggcaggcatccctgccttgggctgccctcccccagacccctgaccaccccctgggtcctgtcccccaccagagccccagctcctgtctgtgggggagccatcacggtgttcgtgcagtccatagcgcttctcaatgtgtgtcacccggaacctgcccacagagaacacagtggtctcccctgtccgggggcggctttttccttccttggagcgtccctgacggacaagtggaggcctcttgctgcggctgcaatggaggcaaggggctgcagagcccaggtgcactgtgtgatgatgggagggggctccgtcctgcaggctggaggtggcatccacactggacagctgcactgtcccttctccttcactgtcccccagcatctccttcaaggcctcagcattggcttcattctggatgatgcagcgaacaatcctctctactgtgtcctcattcatgtcatcgtcctcagatgaagggctctcgcgttccccaaccggcctcccctcgctgtctccccgggggacctcctgagctccctcagcttgttttttctctattccctctggcgtctctgctttttccgttagttttcccttgttcttgtccttgttgcgcttcttgtccccttcagtgtattgttcgacgtcttcttgctctgtctcctgcttgtgtgagtggttgtggttccggggtatgtttgatattttcgtttcctttgtgtgatcttttgctctttcctcctccgttgtctggtttcccgagtcctgctctaccctatgctgatagctgaaataccacgtgtgcagggcaggggagggccctcgtggccagggcttgggggcaggctcctcaaagagctctcccgtctcctcacattcctcaaagtcagaaagctcagcatcctcagcggttggagagaggtccctctgggacagccgagcctcactgagccgccgctcctgctccacctcatcctgggcctgggtcatggctggcttcagccagcgctccacatctaagccagccccctgcagcagggccagccgggcagcccccttcacctggctcacctgtgcccggcggatgctctctcgcacttcctgtaacctctgttctatgcttggagcctcccgctctgaagcctgctgccgcctctgctccagtcgttgcagtacattgagaagcgctatggactgcacgaacaccgtgatggctcccccacagacaggagctggggctctgactatctcatactcccaagacactcggtgtccagcttcaggctctgcacactgcttgcagatgaccacccccaaattgacagcagcccaatctgggcgggaggacccacagtccgcacactgccggttggcccgattagaccagatcttctcagccacctcgtagtcagacagggtctcggttactgcttcctgcagagcggccgcccagctctgaagcagcgatggggtgtgaagcaggtcaaagcttcgactcttggtctcccggacgctgcagccctgcagttcgatgaagcagatcccgatgcccagagagaaggcttggtcagcctgctcccctctgctggttggtttcaggacatatgagacatcgctgtcaaccttcaccgtataagtctctttcatcttgcttcgcccatagtcgccatatgtttgcaagtgagctgccagcgcaacatcgcaagcgcggcgaccaataggtgattgcttactgcgattaatcagcttcatcat

SEQ ID NO: 125016 - DNA, 820 bp, Homo sapiens
accgcgctgcaggaattcggcacgaggtcaggcatccctgccttgggctgccctcccccagacccctgaccaccccctgggtcctgtcccccaccagagccccagctcctgtctgtgggggagccatcacggtgttcgtgcagtccatagcgcttctcagatgtgatgtcacccggaacctgggaggggagggaacactggggtttaggaccacaactcagaggctgcttggccctcccctctgaccagggacatcctgagtttggtaggcatttccctctggcctaaggtaggggaggccttctcagattgtggggcacattgtgtagcctgacttctgccggagctcccagtccaggaggaaagagccaaggcccacgttttgggatcaggtgcctgatcactgggccccctaccttcagcccccctttccctggagcacctgccccacctgcccacagagaacacagtggtctcccctgtccgggggcggctttttcccttccttggagcgttccctgacggacaagtggaggcctcttgctgcggctgcaattggaggcaaggggctgcagagcccaagttgcactgtgtgatgatgggagggggctccgtcctgcaggctggaggtggcatccacactggacagcagggaggaggggagtgagggtaacatttccatttcccttcatgttttgtttcttacgttctttcagcatgctccttaaaaccccagaagccccaatttccccaagccccattttttcttgtctttatctaataaactcaatacttaagatgttaaaaaaaaaaaaaaaaa

SEQ ID NO: 125017 - DNA, 461 bp, Homo sapiens; identical to SEQ ID NO: 115486

SEQ ID NO: 125018 - DNA, 2137 bp, Homo sapiens
  misc_feature (1)...(2137): n = a,t,c or g
cggccgctgcttctttcaactttatgttgggagctgcgcgccgcgctcagttactggagagctggccgcgcgccgccgcctcccgcacgcttgcacgcgggcccggcttcggggttttgggttcttactccaagcggcggggaggagggggagccccggacacacttgtggggaggaggaggaagaagaggaggagggaggaagaaaaaagactgaggaggacaggggcggggggcgggaggctttgccaccttcagcccccccgcgaacgccccaaggttgcacacatctttgaccaactcatcagcaaggtggatttttctttgtgtttaaagaaaaaaaatgtccctattgtctgtaaaagatgattttgcagttcaancccggcttgaagctggaccgaattgagactattgggctggtgctcccgccaagcatgtttgccactacttcaaaattgaagaggaagccccagaaaagggaaaaacttaccagaacggagatgtgtttggcgatgaagtataggattcaaaccagtggaagaggtccaaatacatgaaaaatggggcagaagaagagcagaaaataggcagccaggggaccaaggaaaacttggaaaaaagtgcccagctcaaatgtaagactttaaaactaataaagaggttccgggattagttcatcaacccagaagcaaacatgcacatctctgaaagccaacaagaattcttcagaatgctggatgaaaaaattgaaaagggtcgggattactgttcggaagaagaggatatcacatagcaccaattttaccactcaaaccaggagctactactgtgtaaataggttacaccccagttgaaatctttgcaaaggtcggttctattcagcgaacagcactatagcaaaagaagatcgttccatattgtacgccccattaaattacagtgtttcttaatgaacttgcaaaggaatattgctaaaaacaaacaaaaaaaactgttatcgaactttctttgttgctgctaagttaaaacttgttgcaacttttcacttctcttgtgtccaggtatgcagcaaaattctgcaatttcaccttaaagatactgttgggttttacagatggctctccaacctattttcctataaggatgagggtagtggtgaactcagataacaaacgttctcttctaaactggttctgcttctaagacaagcatctcctgccctctctccttcctccccatctctcgcacgcagtctagagatggacctgagccttgcttcctcactggcagtgttgagctttggagatgggatggttgctatgccaagccttgtttctctgctcagaagaagtagagaagctattatcaattaaaagcatgctgtgatgtgactcctgggaagtgacgtaggagtgagtggcaggttgtttgatttaataggtatcttaatcaagaattaagcttgcaacattggctttgcttcagatgcagatgggaagtgttgatccacaatcattttgaatccctcttcctcacttttttttctaaggaaattaaacattttactgtttttatggatccttgtcttctcccattcatccagctcagtgttttaagatgatcctgggtgcagaagttgagccctcctttgcattgacactgataattagcctatagggctccctacccttccattaagaatctaccaagcattagcaaggctgaaagtggtttaaaaggtgaggggacatcctatgactttttaggaaggcctgaaaccaccttgttacctttcattttgttagcaaataaaccatcctattttgtaactcacaccccttcaaaatgctacatgagccttgccacttcctttttctcttacttccagcacactagacatagcaaaagtgtttgcctactcaaaaacataatacttttatgctgatgatgggtatttgggagatgtgaaagccaaaagcccctgggagtgggtgggggaatgttgacttgagtgttccagcaggagtttatttttccatactattatggaagagaatgacctcttctccaaagacaggaagtgatatttttaaccaaatattgtcacaagtaaatagcaatcaaaaggaaaaaaa

SEQ ID NO: 125019 - DNA, 1026 bp, Homo sapiens
taattcccacgagctggagagaaaccctacacatgtgaagaaagtggcagagcttttaaccaatcctgaacccttactacacatatgacaattcatgctggatagaaaccttacaaatgtgaagaatgtggcaaagctttttaccgattctcataccttactaaacatatgataattcatactggagagacattctacaaatgtgaagaatgtggcagaggctttaattggtcctcgacccttactaaacataatagaattcatactggagagaaaccctacaaatgtgaacaatgtggcaaagctcttaatgagtcctcaaaccttactgcacataagataattcatactggagagaaaccctacaaatgtgaagaatgtggcaaagcctttaaccggtccccaaaacttactgcacataaggtaattcattctggagagaaaccctacaaatgtgaagaatgtggcaaagcttttagccagtcatcaatccttactacacataagagaattcacactggagagaaaccctacaaatgtgaagaatgtggcaaagcttttaaccgatcctcaaatcttactaaacataagataattcatacaggagagaaatcttacaaatgtgaagaatgtggaatctgccgcacgccgaaaatggcggtgttcagccaatgccaccaggtactcaagatcacgaatattcattatccatcctccatcgccacgatagttcatggcgatagagcacaatcgcacgtcgatatatgcacacttggcgacaaggcgagcggtgctatcatcggtactgccttttatacaacgcagtgtgagcaacgagcctacaacgagacggcggtctcgcggtacactatctctcggccgccatcacatcatggaggagattcagaaacaactgagttttcgccagccattgggcgctgtaatggagtacataagtcatggggatccaacaggtgctcggaccgctggagatctaaacccctcttggcccgttctgtttcttaa

SEQ ID NO: 125020 - DNA, 359 bp, Homo sapiens
ggcacgagggagggggctgggggagcccccgaggagatgcctgtggacaggatcctggaggcagagcttgctgtggaacaaaacagtgaccagggcgttgagggtcctgggggaaccgggggtagcggcagcaacgagagtgttggggtcaatccactctccttcgtgatgggggttgggggaggcagtctaggtctgttctacatcccctccccctcctttcccctcataaccttcctaacactacttgggactggaggtgctgccaaacaaggtctttcaaacatctgaggtggatgtgatagctccttctgtctccactccccaaacaacccactggcagaaccataggcatgtcc

SEQ ID NO: 125021 - DNA, 2672 bp, Homo sapiens
atgtcttgggccgctcgcccgcccttcctccctcagcggcatgccgcagggcagtgtgggccggtgggggtgcgaaaagaaatgcattgtggggtcgcgtcccggtggcggcggcgacggccctggctggatcccgcagcggcggcggcggcggcggtggcaggcggagaacaacaaaccccggagccggagccaggggaggctggacgggacgggatgggcgacagcgggcggggtgagtgccccagcagaagggcaggcgagccagtgaccgctttatctgcgacccctcccccacctccctttccagtcatcagttcttccatggggtcccctggtctgccccctccagctcccccaggattctccgggcctgtcagcagcccccaggtgagaggttgtgaccaacttactgcctggccactttcattttcttgttttccttgtaaccccgtcttaggggtccggggcctgcactgtccaccccctccaggtggccctggggctggcaaacggctatgtgcaatctgcggggacagaagctcaggtatgtggctcagaggatgaacagagagggagagtctgggccatgtatcatcacctgtgggataagaccttacatactcttgccgggacaacaaagactgcacagtggacaagcgccagcggaaccgctgtcagtactgccgctatcagaagtgcctggccactggcatgaagagggagggtaaggacccgccctgcccaggcgtcttagaccacatgcccttctcccttatcccactcagaccccccgaggagatgcctgtggacaggatcctggaggcagagcttgctgtggaacagaagagtgaccagggcgttgagggtcctgggggaaccgggggtagcggcagcagcgtgagtgttggggtcaatccactctccttcgtgatgggggttgggggaggcagtctaggtctgtgggcgaagaggatcccacacttttcctccttgcctctggatgatcaggtcatattgctgcgggcaggtcagtgaccttggatccctttgacttcttgacatttgacccctctttgacttcccgatcttttccttgccacaggtcttcacgtgcaccgcaactcagcccattcagcaggagtaggagccatctttgatcggtcagtggccctcggctaggctggcatgtagatagagggggtggggctataggctggtccgtgcctgagggcaatcattctgtttaatccaggtaagaggaggattacctttgtctctcaaggccaaggcaaccttggagcctcctcttctccgatggagacctactgcaaacagaagtaccctgagcagcagggacggtgagatggggctggggggcactgaggctcccttgggggtggggagtgctatgaggatgtgtttctgtttttcttcaagctcattggtgacacccccatcgacaccttcctcatggagatgcttgaggctccccatcaactggcctgagctcagacccagacgtggtgcttctcacactggaggagcacacatccaagagggactccaagccctggggcagggtggggggccatgttcccagaaccttgatggggtgagaagtacagggcagaaccaagaacataaaccctccaagggatcttcttgattatcccaagtttggaagggaccccagatacctgtgaggactggatgtctctcttcggtggccttgagtctctgaatttgtcgggttctcccatgatttggggtgatttctcaccctctgtccttcccccagcacaaagcactggccttgcctccaggaccttgcttccttctcatcttgcctcaatttgcttcccatctgaagagtggaaatggggaactcccccagaggtgggatactggggggcaggcctcccaagctgatggacatgagagtagggccctggacaggcctttcctcctcttcaaacctgggcagatggggggcctcttctgggaagaggggaggggccctgttcactgtccagagtctcttttttaacactttcacctcctttttgcagttcagacttgaaatataaaaaaaggtggtggtggtggtgaaggggctggtggagatgtaggaaccgatctgctatttttaatttcctgtgaggatagagacttgcagttagactcaaagaagtactgtactttccccaggttgactaagaaatgccagtggtgaaggtggggtgtttggggaaaaggcagggccctgaaaatggcctgtcccctagggatcttccaagcaactagccttccccagcttcccagccagcccccccccatctcttccctgtctaacttggggaagggcccctgggctgtgaaggacaagggccccccacaggggaattggtttcacgagtgtagtccccggaggcccttccccttttacagctcttcctccaagcccctgggcacataagcataaggcttgggggacacaaggatcctggcctgagaattgaggggaggcggccaagcccgcccaggtggggtgctggggctgcatgatttttggccctgcgtcccttctctttggggctcctttcccctctcatacataaaatcgctttcaaattaaaatcgctgttttttggaaaaaaaaaaaaaaaaaa

SEQ ID NO: 125022 - DNA, 5239 bp, Homo sapiens
cgagtagggcagagaacagaagaccttgtctgctatggaggctggagaccgtaaccctttcaggccctgtgtaaactgggtcatgaagagcctctgcatggtaggcatgtggctggagaagctccgtttttttgtccagattcggtaacatctgttaggcctcttatcccatccactagctgccaaatatggattcagctgctctgtgctggatgaaaatccgtccaggagtcttttatatctgaggcgcttgtagcttttagccattggaagaagttcagaggaacaccgtcggtatcttagcttctgagtcttcatggctggggccagtttggaggcaaggatggacagcttgtttagtaaggctgattctttggtagtcttcctaaaattcaggctcctcaagggatggcacggtgtagacatctgctttggtatgtgactaaccaagctcttggtaggtgctgtttcaggttctaatcgtgtaggtgcagacagagtacacaaactgagaagtctgtgcgcttttgtggggatgggattggaagaactctttaaaaaggcagaacttctgattttacctatttttctcccaacaatgatttgctcctgataggaaactttcttacaagttcgatggggctgcttctttaagggaagaactcctttcttcgcaaaggcaccatgtatttgatcacacccagcagaggaggggtcttgtgctttccgaggggcaccaagaaggcaaggacttgtgcatgactcagtgtccttccttaatggatgatgtaacctttcctccttctggtcttctaacttctgagtctgtgccacaatgctgtccttggccagctttgctagggtgatttcattgatcatggtggactcatctttgtcagccttcggttggttctgattttgtgcatcatctaacaacagactagatgatatgcactgttgcgatatcgtatgtgctttttgttgacgtatatatttctcttctttctgcaacatgtagtccaaaacctcagggctctgctgtttttcagcatgattaagtatcccccggcatttaaaatgggtctgagagatgttgctcacgggatcgccatcgccagtttctctggtaaccaactcctcagattgctccccaacagttaagtaacccagtcgtcccctctgatgctcttcggtttcttctcctttcactttaatatctgttttcactgtcaaaggcaaatgtctgtcagaggaattctcgtgagggtgacaagctttgcaagcattcttttccacacaggtacatacgctgtctctgtcactagaattactccaatctcttgatactatttccttcatctcaggaaggactgtgcagtcctttacattttcacaaagcatttcaccatcttttggtttacaaagatttttcaggtcagtttcttcactgttaacattagtttctgaattttcttgagaaggcattatttcaatggatttcaggcttcttagggaaacagagctttcatcatggcaagacatcgactcttttgaggaaattccaaaggtactttctttgccaaactcagagtttggttctagtcttgatccttcagtcatttcttgtgtttctctgagagatgttcctttatcttgctgtccataatggctatcatttaaagacaaatttactctgcccaatattcttttatttggttcatgatctgcaacagactccatctcatgggcacaagagtctggacacttttccatttcacagtcttttaaagatctgcatacgttttcttcacatgatttttttattttgagaaagtccactgtagaagcagcagtaactgggaaatctgaatcctgaccagttgttcctgtatgtgcagcatccagttctctccgagacaaggtactcctggagtcctcttgaaatgccagtttctcttgccttgcaccacaatccagtagattagatgccttcacgtccagcacaccttctgcaagcttattactacagtccgtgtagacgatgtctaccataccttctgtggactcatcacaaccagacatcttgacaaaggctcctttcaaattgcatttctttggactaccacaaggtagtgagttattactgcctgagctgaccagcagatccttttggttgtggtttacctccccgtgaggctcggtgacagtctctctctggtcactacttagcatctccttggctgactgaccttcacttttgcattcatctggtctgttttggttactctgacagtcaaggacttcatctgccttctgatcgagtgtttcaactgattttacatttttaaaactggagaacataacagtaggagactggtccaacactttttcaggacctggaatgtttacagtctggtttagttcttgtatagcatgatcagagatgttatacttacaaaatacagtttctttggatacatcctgctcctttccttccagcccttcctcactgagtttgatgctactggaggtgtgaatggttttgtttgaaattccactatttaacaagcctgctaccattttgtttctgatcttatctcctggaaggctgccattcgtttctttcccatcaagttccctttcctgtgatgtgtaactcactttacagctgcttttttccacagagtgtcctgttccttggcagcagtgatcacggtgctgaaatgcattttcatattttgttatcaaagagttatcaacttgcaggctgattttgctggacttgaaagcagcagaagcagaacacatgttttcctgggatacattttttcttacacgatgacagctagagatatcctgagattgaacgctgtgacattctatgacagagaccacttgaggaaagccagctgcttctctcttatttgagcgcagcctggaatgtagagcttttgttcctgaatcagccatttccttttttctctctaggcttactggtttgatgtttaaggtgggacagtttgaagaggcaccacaggtttggttacctggtggagagatgtcttttatttttgtctgaatgggaatggtttgtatatcagcaatgacatctgctctaccctctaatggagggtgatggctctgatgggcatctctgcctgttgctaaaggcatctctttgtttaaatgcagtagagagtcagttggcaaatttgcatgttcttgagaattaagggacacttgttgatttaaaacacattcactttctactttgtttacaaccagttcattggtacaagaaagttcattcatctcacaggctatgctctgttcatctaaaagtggaatatcatcatgtgaggtctgtataactttttctgactcaggtctgtaatcaaattctggggatggtagcaacagagcagtaccttgcttgggttttaatacctcacttacaggacttatttgatcctctggcattaaactcacaatggattttctttcaaacagaaaatcattacatgatgcttcatttaactgggtgttgccttccagatttctctggatgctgactaaggagttacagtctttagtgtaaaaagatttacttaatatattgggctctacaggggttgtctgtcctgcctcttcaatctgcatcaaggaggaaaaactgctttcttcagagtgtccaccaggatggctcatattagtaaaagtttctttatggtcctcagggtttgtcaagttaccttgaacgtgtacagtaattttcaaatcatttttatttaacattacttctgtggcttcagtaaaagaattgggcattaaagaactagagttccctgtatggagactgtcttgaatgcagttattgtggatattttcctttggagaaacaacaggctctttttcaccagaacaacgaccactaatctccttttctggttccctggcattaaaaagaaaaggtccacctctttcactcctaggaatcaaaagccgttcctcattttcttctctagaagccaagttcttcccttgatcatcccccctataaaaataagaactgtctgtcttttcagcagatctctttagcaaaccaccaccttcaaaaccacagttttctaaggatattgttctggattctggaccagacaagtctgatgtgaaacatgaaacttcagaattttctttcaaagggcttgtggctgtgggactatcatgtgtagaactgggttgttcattatggtggccatgaagctgttggtgattgtcatctgcttcacagaccaggtttggtttacacaactcttccttcccattgtccacattagaaatggcactgtttcctggtaatgacaaccaaggacaactttttaattcttcacattctttttctttaggagttgcttctgttaatacagggtccacaaaggttaaaggttctggggtaactaatgtgctggtttctgaaacctcatcactggtcatgattttgtctacttcttggaattcaccgcatccagctgagagatctttactcacattgccatttttgtgtccttcattattatccgtcttagtcccattgaccttcataccttgtacttcggcggattttagcagagtttcagctgtaatctgtacatttccttctttgctccttagaaaatcttcagggaggtccacatgtgaaagttctttgctggactgcatcaggagatcctcctgactcgggctagtcttttcttcagcagctgtggaatgttgatgtggatcttcctttgctccctcagagggttctcttataattcctgcctggccccctggatctctgaagacctttggctccatgctctcgcttctttttgccctatccaagatcccagatgccacagaacctcctgctgtggagtccactagcccacatcgcccaggctcactcccatgatccaaggtctcataggtttcttcacaacaactctccacatgagtcctctgcagctccaagggcaatgccctattctgacttaaaagagagcttgaggctccaggttttacatctggaatcacacttggctcagggtcagcatgaagctctctggagacacttactgggagttcagagtataattcctgtaccacggcagacatggaggaatcaagtggaactggctgagtctctactccagatgacagcattaggacagatgcagattatggagtcaagacgaaa

SEQ ID NO: 125023 - DNA, 1089 bp, Homo sapiens
tcaccgcatagctttcatagcacgcttgcctgataggcggagggtattcgtacgattcaaggaactgaaaatatattctgtaaagtagtctggggaaggcaagtttccttgtcccagacaaacaccctggagggacaaagtaatgatcatggctgccaactgaggaagcgtactttcattagcaccttcactgctcactattccagattttttctgcagcgttttggtttccatacactggctttgagaagtgtcaaagtactgcctggtgaaagccaagatatcttctgtctcattctgtgaaaggaaagaggaatcttcatcctgcctgaggctcagtaggctgtgtaggtaaaatttatactctttattactcatgttgagctttgaagaacagatctcttcctgatgaataatgtaatagagaaggagaagagaaactctctggaccacttcttctctaagctgatcttcaaaatttcctccagctattagtaatagtgcatctggttcaaagcactgaccccattctatttcactaaccagattgcaatctccttgcattccgtttctcctccgtgggcacccagttttctccaacaatgttttgatgaggcttcttgagtggttgtggggtgggtggtcaccagcagagagaacctgtagcaggtctgccggttggcctgaactcccacggcttctgctatcctgggctgagggtttgtctgtctcagtagaaaaaacacggctgagtagaagaaacaatggcacccaggatactgagagctttgtccggaagcacatttccacgcttcctccaccttgagtctgtcttggatggaggtgagtgtgttgccgtttatggggtaaacttgtaaccaaaggaatttcgggaaggtctgcagcttcactcctgaagccagcaagaccatgaacccaccagaaggaacaaacaactccagacgtgctgcctttaagagctataacactcaccgcgaaggtctgcagcttcactcctgaagtcagcgagaccacgaacccaccagaaggaagaaactccggacatatctgaacatcgcaagggtccat

SEQ ID NO: 125024 - DNA, 525 bp, Homo sapiens
tcaggatactccccactgggttccaccattccagaaaaagctgtgttcattggacagccagtctaatctctcctcttcctcctggaagtcacaagtactctcccctacttcccttaaactcacccacatttcatgaagatctgcagcttcactcctgaagccagggagaccaggaacccaccagaaggaaccagcaactccagacatgctgcctttaagagctgtaacactcactgcgaaggtctgcagcttcactcctgaggccagcgagagggaaggatgagactttttattctctttgatggagaagcagagatttcctgttgagtgtttaggtgggtgtttaagttcaatttccaccaaaagcagagcccaagtgagggaccatcgtggagcatgaaagtccaagatcaaggtgtgggcagggctggttcctcccaaagcctctctcatgggcttgtagatgccatcttctccatatgttctcatgtggtcatccctctgtgtgcatgtgtgtgtcctcat

SEQ ID NO: 125025 - DNA, 1767 bp, Homo sapiens; identical to SEQ ID NO: 114672

SEQ ID NO: 125026 - DNA, 779 bp, Homo sapiens
cgaagacccaggacccagccaaagcccccaacacccctgacattctcgagatcgagttcaaaaaaggggtccctgtgaaggtgaccaacgtcaaggatggcaccacccaccagacctccttggagctcttcatgtacctgaacgaagtcgcacgcgcagcatggcgtgggccgaattgacctcggggacaaccgcttgcattggaatgaaaggccgaggtatctactacaccccaacaggcaccatcctttaccatgctcatttacacatcgaggccttcaccatggaccgggaagtgcgcacaatcatacaaggcctgggcttgaaatttgctgagctggtgtataccggtttctggcacagccctgagtgtgaattatgccgccactgcatcgccaagtcccaggagcgagtggaagggaaagtgcaggtgtccgtcctcaagggccaggtgtacatcctcggccgggagtccccactgtctctctacaatgaggagctggtgagcatgaacgtgcagggtgattatgagccaactgatgccaccgggttcatcaacatcaattccctcaggctgaaggaatatcatcgtctccagagcaaggtcactgccaaatagacccgtgtacaatgaggagctggggcctcctcaatttgcagatcccccaagtacaggcgctaattgttgtgataatttgtaattgtgacttgttctccccggctggcagcgtagtggggctgccaggccccaacttttgtccctggtcccctgaaacccg

SEQ ID NO: 125027 - DNA, 1128 bp, Homo sapiens
atgttcctctgtcccccaaatcctgtggctctgacgatgatgttaaaagactactttttagagcagttttcattttaccgatacatcgatcagagagtacggagcttcccacattgcctcccgcaccccatagcaggcagaggcaccagccaggcgccatcctttacaagctgtttcagcaaaatgtccctggaggaggccatgagaaccgtcaagaagttcatggactcaggaggacgtcgaggacttggacgcagggtcttctctgctccccgtcacacagagggtggcacacccgatgggaactctcatttatcaccaaaccaaaagatggagaaactgacagagaagggctgcaagcagctacggcagggcgggctgtgtgtaagagtcagtgacagaactgtacgcagcgtgcaagagacaactgccatcactgccaccttgaagggcagcctgggcacatactgtcgagggacaaggaacttgctgacagcagaaggcttcatgccacatgcttcggtctgtatacagtccaaatccggcaaagtggcacgcaacactgtccaggggttcactgcacatggcaaagctgtcctagaggggcctggaggttcaggcagggaggtggaggcgactacatgtggacgcaggttaaaggacaaggattctgaacatgccggggctgggtcccggcaccatcagagccaagtcaccggctccctcggggaggagagagctgtgagggctgagtcaccgggggaggggccggctgaattcctccgcaggatccaaggggctgtgcagacacgggccgtgactgctgggtcctccgtggagaaaatcaataccaagttggagacctgtgactgtgacgcatcagaggaggaggtgctaggtggagacaacgtggagactgagggcagatgttggaacagtttggagggctcagaagaagagaggaaaatgagggaaagtgtggaactttctagagacttggtgaatggctttgaccaaaatgctgataatgatatggacaataaagtgcaggctgaggtggtctcagacagagatgaagaacttgttgggaactggagcaaaggtgactcttgtcatgttatgttttag

SEQ ID NO: 125028 - DNA, 1921 bp, Homo sapiens
ttacaggaggccaaacgctgccttgtgagtgtggcattcctgggcacatttgccatatagcatcactgcataataacgtccaacaggagcatattgccaagacacattctctgtggctagtacttcagtcagtgaattggcattcgaaagcgtgtcgtcattagtacagacgtcagcgggtgaatgagaaagcaaagaacccgtggctgcacccctggccaagcctcttggagcccagggctgcccaggaactttgtggagcatttaggggtgtttcagtcaagttggaaacaggctggggagggatggatttgttgtgaccaggcactgtcaccacggcagcccccccggagccgtgccgggagcataaagccaccagggccgctgcgttgccactgccttgcacccccgggagcagccctcggcccgcggcaaatgccgaatgccggtgctgggaacggaagtgggaaatgacggggggtgcaggggagcggccctgactgggactgtacggggacgcatgggggtgcgggcactggaaagctgctatgggctggtctgagcctcttccctctttccgggaaatctgaggcccaccagcagcgggcagcaggtcatgggtatggtcgcggacttggaggcccaggaaggccaccaaggagcaggaagggccgtgtcctgggatcagagtgttcaccaagtcacgtcggtttgtggcggcaggagcccagcgtgccaggcacctgattatatctgcaaagacccttttttcaaataaggtcatctttacaggttctgggacacagacagatctttcctcagtctccacgttgtctccacctagcacctcctcctctgatgcgtcacagtcacaggtctccaacttggtattgattttctccacggaggacccagcagtcacggcccgtgtctgcacagccccttggatcctgcggaggaattcagccggcccctcccccggtgactcagccctcacagctctctcctccccgagggagccggtgacttggctctgatggtgccgggacccagccccggcatgttcagaatccttgtcctttaacctgcgtccacatgtagtcgcctccacctccctgcctgaacctccaggcccggtgtccacagtccttgagagcaaaggtggtcccagcagtggagcagagggcaagggtggggcatgtagagtctccagggagccactgttggttagagagggagcccgaagtgggctccggaccccagcagggacagcgtccccttccagcgggggcagccgattgatgtctcggggcattttggcagacccacctagacctgggggacagcctgatttcctgcagccatgacctacaagggtggcagctctctcaggcttgagtaaccaggacacagacctgggccatttaatgcgcaggcagccccaagtcccggcagggccagaagcagagacggcggcctctaggacagctttgccatgtgcagtgaacccctggacagtgttgcgtgccactttgccggatttggactgtatacagaccgaagcatgtggcatgaagccttctgctgtcagcaagttccttgtccctcgacagtatgtgcccaggctgcccttcaaggtggcagtgatggcagttgtctcttgcacgctgcgtacagttctgtcactgactcttacacacagcccgccctgccgtagctgcttgcagcccttctctgtcagtttctccatcttttggtttggtgataaatgagagttcccatcgggtgtgccaccctctgtgtgacggggagcagagaagaccctgcgtccaagtcctctcgccatgtgcagggcagtgggcgagtcccagccagcatgggcatcccgcatttctctgcttctgcagccctgactgaccat

SEQ ID NO: 125029 - DNA, 1008 bp, Homo sapiens
atgcggacgcagtgtctgctggggctgcgcacgttcgtggccttcgccgccaagctctggagcttcttcatttaccttctgcggaggcagatccgcacggtaattcagtaccaaactgttcgatatgatatcctccccttatctcctgtgtcccggaatcggctagcccaggtgaagaggaagatcctggtgctggatctggatgagacacttattcactcccaccatgatggggtcctgaggcccacagtccggcctggtacgcctcctgacttcatcctcaaggtggtaatagacaaacatcctgtccggttttttgtacataagaggccccatgtggatttcttcctggaagtgagacatttgatgttgatggaaggcctgaaggactatgccattgcctttctgaaagataactgtatgtctaaaggaatcatcaccttgtatggcatcgccctctcccccaatctatttcaggtgagccagtggtacgagctggtggtgtttacagcaagcatggagatctatggctctgctgtggcagataaactggacaatagcagaagcattcttaagaggagatattacagacagcactgcactttggagttgggcagctacatcaaggacctctctgtggtccacagtgacctctccagcattgtgatcctggataactccccaggggcttacaggagccatccagacaatgccatccccatcaaatcctggttcagtgaccccagcgacacagcccttctcaacctgctcccaatgctggatgccctcaggttcaccgctgatgttcgttccgtgctgagccgaaaccttcaccaacatcggctctgactgggacacaggcggaagcctaggagagccgaatcagtgtttgtgaagaggcaggactggccagagtgacagacatacggtgatccaggaggctcaaagagaagccaagtcagctttgttgtgatttgattttttttaaaaaactcttgtacaaaactg

SEQ ID NO: 125030 - DNA, 1246 bp, Homo sapiens
  misc_feature (1)...(1246): n = a,t,c or g
gtggaattcggcggagctgggccgcgggggccccggggccggcggtgccggggtcatcgggatgatgcggacgcagtgtctgctggggctgcgcacgttcgtggccttcgccgccaagctctggagcttcttcatttaccttctgcggaggcagatccgcacggtaattcagtaccaaactgttcgatatgatatcctccccttatctcctgtgtcccggaatcggctagcccaggtgaagaggaagatcctggtgctggatctggatgagacacttattcactcccaccatgatggggtcctgaggcccacagtccggcctggtacgcctcctgacttcatcctcaaggtggtaatagacaaacatcctgtccggtttttttgtacataagaggccccatgtggatttcttcctggaagtggtgagccagtggtacgagctggtggtgtttacagcaagcatggagatctatggtctctgctgtggcagattaaactggacaatagcagaagcattcttaagaggagatattacagacagcactgcactttggagttggggcagctacatcaaggaccctctcttgtggtccacagtgacctctccaggaattgtgatcctgggataactccccaggggccttacaggagccatccagggtacgggggaaggtgacaatgccatccccatcaaatcctgggtttcagtgaccccaagccgacacagcccttctcaacctgctcccaatgctggatgccctcaggttcaccgctgatgttcgttcccgtgctgagccgaaaccttcaccaacatcggctctgggtgacagcttgcttcccccttccaccctgagttggggtggggggggaaaagggagggcgagcccttgggaatgccgtctgatgccctgtccaattgtgaggactgccttgggcaagggtctgcccctncccaaccctctctggccttgggagccctacactccacttgggagtctggatggacacatgggccaggggctttgaagcagcctcacttttaactttgtgttcacactccatggaaaccccagactgggacacaggcggaagcctaggagagccgaatcagtgtttgtgaagaggcaggactggccagagtgacagacatacggtgatccaggaggctcaaaaagaagccaagtcagctttgttgtgatttgattttttttaaaaaactcttgtacaaaactgaaaaaaaaaaaaa

SEQ ID NO: 125031 - DNA, 405 bp, Homo sapiens
cctccttgggatttctgaatataaagagcttttctcctgtgtttaatagatcaatggtttctgcccctacaatgggtacaggggccagttcgccaatgggctccagtgacaggtgtgtccaccttccttttccagagaatatcatcctctctctgagagggaaacatgtcttctttaatatgctctgctttctcttgcgggcccgcagcatcttttttaatcctctgcttatcagatctcctcgcagttagccatataaggcttgccaccagctatggtgtttcctccgcctgcccacgtcggcatgctccagctccgccatcgctctcaggtgcgtggtccacatgtctctcggtggccgaatccagcagggccagcatctgaggctgtgaaactgtggacaga

SEQ ID NO: 125032 - DNA, 744 bp, Homo sapiens
atgatgtcctttgattccatgtctcacatccaggtcatgctgttgcaagaggtcccaagttcttatcctgcgtccaagaagaatgaagcacgcagacaagtggaggtggccctggaacaccaaggaagggcctgggagagctgctgttgttcctatgagcccagctgtgggcacactgcgctgacacaatgtcatggccctcatgccgaggatgacttggaggagccaatcctgacaactgaccctgttgccagggactgcccactggaccttctgatggatgggaaaactggcgccatcatctcttctctcctgcattcaaactgcttacctgcacctttctgccaatgcagtcatgcagtcaagtggcagctgaaaacggtgcacagctgctgtcccctgggagaagtgcaaccccagcgaaggtgtgtgatagccacagccaaggaaaaaggcattggggtgaagcatcattgcaacatccacagtgacaatgtcaacagcatcatcacagcaacagtagcagcacatcagcagcaacaactgccacaaaatggcaacaacagcggtatcaaaaataatcagaacagtagtgaaaacactgtcaccaacaacagcaaaaacatcagcaaccacataatctgcagaaacagcagcaaaaatagcaagagcagtagcagcagcagcagtaacaataacaaaaacagcagcaacaccatcaacagcaataacaaggctaggtag

SEQ ID NO: 125033 - DNA, 672 bp, Homo sapiens
atgatgtcctttgattccatgtctcacatccaggtcatgctgttgcaagaggtcccaagttcttatcctgcgtccaagaagaatgaagcacgcagacaagtggaggtggccctggaacaccaaggaagggcctgggagagctgctgttgttcctatgagcccagctgtgggcacactgcgctgacacaatgtcatggccctcatgacgaggatgacttggaggagccaatcctgacaactgaccctgttgccagggacttaacaatgccaacagcagcatcacaacatctacagaaacagtgtctagagcatcatcactacttccatagttacaacatcaacagcgatataacagtatcaagaaacaacatcagcagcatcatcacaacacctgtacatcattgcaacatccacagtgacaatgtcaacagcatcatcacagcaacagtagcagcacatcagcagcaacaactgccacaaaatggcaacaacagcggtatcaaaaataatcagaacagtagtgaaaacactgtcaccaacaacagcaaaaacatcagcaaccacataatctgcagaaacagcagcaaaaatagcaagagcagtagcagcagcagcagtaacaataacaaaaacagcagcaacaccatcaacagcaataacaaggctaggtag

SEQ ID NO: 125034 - DNA, 4407 bp, Homo sapiens
tcatcgaatccccagggccttttccaccaggtcttcagaggcctgttcctcacagaggtgaattttgtcttcgatgcacttcttcagaagctctcccttgcttttactcttggaccgtgactttctcaccttggactgttgctgcagctcaggggcagccacggcctggtccagcttcacgaactctgcttctcgccacgcagtctgaaattgctgcagcagaactcgggcccggatcttggggagggccaagctcctgtccatctgagcaaagcagccatggacctcctgcctcatcctgagcagctcctcttcagacagggagaagactgaggagcagagcttcatgaagatcaggtgctcccagcgtcgcagctctgcctgctcctctgtcacggcctcaggagcgtcatccttcagtctctgcctcacgctctggacaccctcctggtccctgtccctctcctccccctccagctgctcggcccgtgcagccatctccttgccgtgctcctccaggatctgctgcaggaagagccagggcaccccacgcttgagcagctcctgggtcatggctgagttctgcaggcgccgcagctcgtcggtggccttttcaaacagcgaaagggtcagggtcctgagatcgtccagggcggcctggtccagacgctcctgcagctcctccagggtggcaccgtgctcctccatcaggctcctcttctggtgcaggtactggccggcatcctcaaccgttcggaaggcctcgccgacggacgcctgctccctacgctgctccctgtgcttttgtagcaactctcgtcttctcttagttattaatttttggtggagctttttcttttcctgctttaagtcattgtccaacttctgcttgattgaaaagacttctgtctgagcccgctccaatagcatttccatttggtcttcatccaggtaccctgctctctcgtgcttctgaatgaggtgagtcagctgggctgcagcggtgctcagaaggccctgcacacgggtctctgatgactggaggttctggaccagatattccctgtggccaaatcttttacttagatgatacctcttactagcctggaaaaagtccattaactcttctacattctcctgtattttagaataattttgcagcagcattttagctgcctctggtttcaattcccctttgaaaatagcactttttatctgggtaaaaaagatactgtgcagttcatttctctggaaaacagccagctgtctgtgagctttggcaaagtcttcttcttgttgcaaagcgagagacttcctcaagtgctcctgttccaggccatggagggtccgcagaaggttgctgcactctacagcagacctctcaccagcacgtttcagcaactcttctgcttcctccattgccatcatctctctctggtactggttttccatcttctttcttgtttccaggtcacattcagctgtcaatgccaccatcttccgatcgtactcctcttgtatttcattttccagcaatagaaactgctttttgaaaacagcactcatttttctctctacttggggtgagaggtggccactgctggtgagatttttcagcagaagggcaatgatatccttgctgatttgtgttcgacaagcctccagatctgcatctgcccgattcagggttgcaatctccaacctctgctttctcttgcgggcccacagcatcttttctaatcctctgcttatcagatctcctcgcagtttgccatctaaggcttgccaccagctctggtgtttcctccgcctgcccacgtcggcctgctccgctccgccatcgctctcagctgcgtggtccacatgtctctcggtggccgaatccagcagggccagcagctgaggctgtgaggctgtgggcagtaccacactcaggagccggcgaagcgtggccccgggcaccatggccatcctcgccaggtacgatgccagtctcagctctttctcctcctcctcacattctgtgaggccattaggcaccaggcgagcagtgcaggctctggaaacaacagaagtgtccctaaaccagtggacaattgaagacactgtgctatacccatgccacaggataccactctcccctgcagctagcaaggcccacgggtcagctctcaggttgcgagggaaacctgctgcagggacttggaggcatttgcttccttgatgagaaagaacgggcatggtggcagttctttgacctcttccctccttgctctgaaagttattgcagctggaactgtgagaaggaaagacaccagaagcacaggaagcccatcgcaggatgcgtataaaacccgatcggtagcagacagtcaggtacatgactgcataaggctccgtgcacagcctcagggctcttctcacctggctgcacagggttgcaaaggtgtctgcctccatgttttccaacaagtcttctagcacgacactgttctgttgttcctctctcaaacactgctgatgttgctccagtaatgtctggctcttgctcagggcttggtgcaggacagtagagacctgcctttcagaatccacctccccaggttcgttcagaatcccgggcccatcggccacccactgctgccagctcgccagggcctgctgctgctgggctgcctcctgctgcaccagctggtcctccagcttcctctccaactcctggagctccctcacagcgccttcgtaggtgggtgttacttgcagaaacttcttgctaaaagcctggaatccttccgaggtcctgtttcccacagagtcccaaatggtgagaccagcaatgctgtccagcaagagcagctccgagaggttggctgacgaggttgtcttggtgttgttaacaagcagccatatgcgggctgtctgtgcttcactcgacccagacacgctgagcccaggggcctgcactggaactgtcacagccgctgggaagtctgcgctgcaggtgccagccatgaggctcaggagccagggactgcccgcggcatttttcccaccatggggaaaggatgtaactgcctgtgaaagatgctcaccagaggaaagcagggcggctgcagtcttaaagtgacagcattccactttgggccaaatcatacagggcaagtcctgccctttctttgcatttccaagggtttcctccaatctttggtgggcaatggcagtgcaggccagcagcccaggggcatcactgtgggggtggctggagttttgctgatgttttctgaattccacactgtgccttatagcctcaaattttctctgcaggcgactttccaccaagaacaccattgtgtagaggcacctactgtgccaggcactgttggaggcatttgtacaaacacaatttcgagacagtttagaggcaatgttggtagcatccagaaagagtcctaagctcatttcttctaaggcttgaagcatgctcccagggtcctcggaagacagaatgtctatcatttggtcgttaagggaaaggtcctcattcacgccatcagctgaggtgaacggcaagggttccagcttgctctcatactgccaaaccttcaggagaattgcggaaataataattgattgggccttcttgtgaattccacgtgctttaacaattcttgtccctgtgccaggtattattttcagtgctttctttgtgttatcatgaagccgatgtctggtgagcatgtttcccttcagacactgatagcgaaccatgaggaagagggcagcccaggtcagcacaagggagaggaggaaggcaatgaagaaccctgctgcgtggaggccgtggtgcggcagaacggtattttgattttcgctgaagcctccatgaggttgcctgctggcccacagtggatttgggaagtcccactgcttcctagcactgctgccataacatctgtagggcatggatcggggatttgctacctctgagggcctcagtttccccaactgtgaaatgagagtaataacaacgttcacttcataggatggttgttgaggtaaatggatcaagggctgtaaagtactcagcacagtgcctggcactgtgagggctccataaatgtcagctgttgtcgtcagcagtattattaagtccctggcaacagggtcagttgtcaggattggctcctccaagtcatcctcgtcatgagggccatgacattgtgtcagcgcagtgtgcccacagctgggctcataggaacaacagcagctctcccaggcccttccttggtgttccagggccacctccacttgtctgcgtgcttcattcttcttggacgcaggataagaacttgggacctcttgcaacagcatgacctggatgtgagacatggaatcaaaggacatcat

SEQ ID NO: 125035 - DNA, 5232 bp, Homo sapiens
atgtcggcgggcggccgtgacgaggagcggcggaagctggccgacatcatccaccactggaacgccaaccggctggacctgttcgagatcagccagccgaccgaggatttggagttccatggagtgatgagattttattttcaagataaagctgctggaaactttgcaacaaaatgtattcgggtctctagtactgccaccactcaagatgtaatcgaaacgctcgcggagaaatttcgacctgatatgcgaatgctgtcctctcccaagtattcactctatgaagtgcatgtcagcggagaaagaagattggatatagatgagaaacctctagttgtacaactgaattggaacaaagatgatcgggaaggcagatttgttcttaagaatgagaatgacgccattcctcctaaggctcaaagtaatggacctgaaaagcaggaaaaagaaggggttatccagaacttcaagagaactctctcaaagaaagaaaagaaggaaaaaaagaagagagaaaaagaggcattgcgacaggcatctgataaagatgatagacctttccaaggggaggatgttgaaaattctcgactggctgctgaggtttacaaagacatgccggaaaccagctttactcgaaccatttctaatcctgaggtggttatgaaacgacggaggcagcaaaaattggaaaagagaatgcaggaatttcggagctcagatgggcggcctgattcaggtggaacattgagaatttatgcagatagtttaaaaccaaatattccctacaagacaatcctgctgtctactacagatcctgcagactttgctgtggctgaagctttagagaagtatggtctggaaaaagaaaaccctaaggattactgcatcgcccgggttatgcttcctcctggagcccagcattctgatgaaaagggtgctaaagaaattattcttgatgatgatgagtgtcctttacaaatcttcagggaatggccaagtgacaaagggattttagtctttcagttgaagaggaggccaccagaccacatcccaaagaaaaccaagaaacacttggaaggcaagacacccaagggaaaggagagagctgacgggtctggctatggctccacccttcctccggagaagctgccctatttagtagagttaagcccagatggttctgactctagagataagccaaagctttaccgccttcagttaagtgttactgaagttgggacagaaaagttggatgacaactctatccagttgtttggcccaggaattcagccccatcactgtgaccttaccaacatggatggagtggtcactgtgacgcccagaagtatggacgcagaaacctacgtggaaggccagcgcatctcagaaaccaccatgctgcagagtggcatgaaagtgcagtttggggcgtcccatgtatttaagtttgtggaccccagtcaggatcatgctcttgcaaaaagatctgtggatggaggcctgatggttaagggcccaagacataaacctggaattgttcaggagacaacttttgatttgggaggagatattcatagtgggacagcattaccgacaagcaagagcaccactaggctggacagcgacagagtgtcgtctgcctctagcacagccgagcggggaatggtgaagccgatgatcagagtagaacagcagccagattatcgcaggcaagaaagcagaacacaggatgcttctgggcctgagctgatactacctgcaagcattgaattcagggaaagttctgaagattcatttttgtctgccattataaattatactaatagctctacagtccactttaagttgtcccctacatatgtattatatatggcatgccggtatgtattgtccaaccagtacagacctgacatcagccctacagagcgcacacataaagtcattgcagtcgtcaacaagatggtgagcatgatggagggtgtcatccagaaacagaagaatattgcaggggcacttgccttctggatggcaaatgcatctgaacttctcaacttcattaagcaagaccgagaccttagtcggatcacactggatgctcaagatgttttagcacatttggttcaaatggcatttaaatacttggttcactgtcttcaatcagaacttaataattacatgccagcctttctagatgaccctgaagagaacagtctgcaacgaccaaaaatagatgatgtgctgcacacgctcacaggagccatgtccttgctacgacgctgcagagtcaatgccgccctgaccatccagctcttctctcagctcttccacttcatcaatatgtggctgttcaatagattggtgaccgacccagattcggggctgtgctcccattactggggtgcgattatccgtcagcagttgggccatattgaagcctgggctgagaagcaggggctggaactggctgcggactgtcatctgagcaggatcgtgcaggcaacgactttgcttaccatggataagtatgcacctgatgacattccaaatataaacagcacctgctttaagttaaattcattacaacttcaagccttattacagaactatcactgtgcacctgatgagccttttatcccaacggatcttatagaaaatgtagtgactgtggctgaaaacactgccgatgagctggcccgcagtgatggaagggaagtgcagttggaggaggatcctgatctgcagctgccgtttcttttgccagaagatggttattcttgtgatgttgtcagaaacattccaaatggtttacaagaatttttagaccctctgtgccagagaggattttgcaggttaattcctcacacacgttcaccaggtacttggacaatatattttgaaggtgcagattatgaaagtcaccttctgcgtgagaacacagagctggctcagcctctgaggaaagaacctgaaataatcactgtgaccctaaaaaagcagaatggaatgggccttagcattgttgcagcaaagggtgctggtcaagataaactaggaatctatgtgaagtcggttgtgaaaggaggtgctgcagatgatggacgtctagctgcaggtgatcagctcctcagtgtggatggacgaagtctggttggactctctcaggaaagggcggcagaactcatgacaagaacaagctctgtggtgacactggaagtagcaaagcagggtgccatctaccacggtctggccacccttctcaatcagccatcccccatgatgcagagaatttcagatcgtcgtggctcaggtaaaccccgaccaaagagtgaaggctttgagctctataataattcaactcaaaatgggtctcctgagagtcctcagctgccttgggcagaatatagtgaaccaaagaaattgcctggtgatgacagactgatgaaaaatagagctgatcaccgttccagccccaacgtagcaaatcagcctcctagtcctggagggaaaagtgcatatgcctctggaacaacagcgaagataacatctgtctctactggaaacctctgcactgaggagcagacgcctccgcctagacctgaagcctaccccatccccactcagacgtacaccagagagtattttaccttcccagcttccaaatcccaggatcggatggctcctcctcagaaccagtggccaaattatgaggaaaagccacatatgcacacagatagtaatcattccagtattgcaattcagcgtgttacacgttcccaagaagaacttcgagaagataaagcttaccaacttgagcggcatcgaatagaggcagctatggaccgaaagtctgatagtgatatgtggataaatcagagctcctcactggactccagtacctctagccaggagcatctgaaccattcctctaagtcggtcacccctgcttccacactgaccaaaagtggccctggccgttggaaaacaccagcagccataccggccacccctgtggccgtctcccagccaatccgaacagacctgcctccgccacccccgccacctccagtccactatgccggtgatttcgatggaatgtccatggatttgcctctcccaccacccccttccgccaaccagatagggctgccgtctgcgcaggtggctgctgctgaacggagaaagagagaagaacatcagcgttggtatgagaaggagaaggcccgcctggaggaggagcgggagaggaagcggagagagcaggagaggaagttgggccagatgcgcactcagtccttaaaccctgctccgttttctcccctgactgcacagcagatgaagcccgaaaagccttccacactccagcggccacaggaaacagtcattcgggagctgcagcctcagcagcagccccgcacgatcgagcgcagagacttgcagtacattacagtcagcaaagaggagctttcctcgggggacagtctgtcccccgacccgtggaagcgggacgccaaggagaagctggagaagcagcagcagatgcacatcgtggacatgctgagcaaggagatccaggagctccagagcaaaccggaccgcagcgccgaggagagcgaccggctgcgcaagctcatgctggagtggcagttccagaagagactccaggagtcgaagcagaaggacgaagatgacgaggaggaggaggacgatgatgtggacaccatgctgatcatgcagcgcctggaggctgaacgaagagcgaggttgcaggacgaggagcggaggcggcagcagcagttagaagagatgcgcaagcgggaagcggaagaccgagcgaggcaagaggaagagcgccggcggcaggaggaggagcgaacaaaacgagacgctgaagaaaagaggcgacaggaagaagggtattacagccgcctggaagccgagaggcgcagacagcacgacgaggcggcgcgcaggttgctggagcccgaggcgcccggaccaaactcttacccaggatctactggagcagctgttggagcccatgacgcctgtcgggatgcaaaagagaagcgctctaaaagccaagatgcagattcacctggaagttctggggcccctgaaaacttgacattcaaggaacgccagcgtcttttttcacaaggtcaagatgtatccaataaagtgaaagcttctcgtaaattaacagaactggagaatgaactgaacacaaagtga

SEQ ID NO: 125036 - DNA, 7047 bp, Homo sapiens
atgtcggcgggcggccgtgacgaggagcggcggaagctggccgacatcatccaccactggaacgccaaccggctggacctgttcgagatcagccagccgaccgaggcccaccgcgggccccggcgtcccccgcagcccccgtccccctgccgcggtgtatcccggggtcgcgcgggccgagcgggggctggcggggcgcggcagtcacttgttcccctctccggccgctcacctggtggctcacctgggccgccgcccccacccccgcgagcgcggcgcggccccggcctcatccccggcggcgcggggggcgcggcggcgcgcggggccggcgccctccacctgcagcccggttgtggctcgcggcgccccttcgccgtggccgggatggagcctgtgacgcgcgctgtgcttcgggttcataaacttgcaggctgccagctgggaggggaaagtcagtatcacaaagttcgggaggatttggagttccatggagtgatgagattttattttcaagataaagctgctggaaactttgcaacaaaatgtattcgggtctctagtactgccaccactcaagatgtaatcgaaacgctcgcggagaaatttcgacctgatatgcgaatgctgtcctctcccaagtattcactctatgaagtgcatgtcagcggagaagaaagaagattggatatagatgagaaacctctagttgtacaactgaattggaacaaagatgatcgggaaggcagatttgttcttaagaatgagaatgacgccattcctcctaagaaggctcaaagtaatggacctgaaaagcaggaaaaagaaggggttatccagaacttcaagagaactctctcaaagaaagaaaagaaggaaaaaaagaagagagaaaaagaggcattgcgacaggcatctgataaagatgatagacctttccaaggggaggatgttgaaaattctcgactggctgctgaggtttacaaagacatgccggaaaccagctttactcgaaccatttctaatcctgaggtggttatgaaacgacggaggcagcaaaaattggaaaagagaatgcaggaatttcggagctcagatgggcggcctgattcaggtggaacattgagaatttatgcagatagtttaaaaccaaatattccctacaagacaatcctgctgtctactacagatcctgcagactttgctgtggctgaagctttagagaagtatggtctggaaaaagaaaaccctaaggattactgcatcgcccgggttatgcttcctcctggagcccagcattctgatgaaaagggtgctaaagaaattattcttgatgatgatgagtgtcctttacaaatcttcagggaatggccaagtgacaaagggattttagtctttcagttgaagaggaggccaccagaccacatcccaaagaaaaccaagaaacacttggaaggcaagacacccaagggaaaggagagagctgacgggtctggctatggctccacccttcctccggagaagctgccctatttagtagagttaagcccagggagaaggaatcactttgcctactacaactatcacacttacgaagatggttctgactctagagataagccaaagctttaccgccttcagttaagtgttactgaagttgggacagaaaagttggatgacaactctatccagttgtttggcccaggaattcagccccatcactgtgaccttaccaacatggatggagtggtcactgtgacgcccagaagtatggacgcagaaacctacgtggaaggccagcgcatctcagaaaccaccatgctgcagagtggcatgaaagtgcagtttggggcgtcccatgtatttaagtttgtggaccccagtcaggatcatgctcttgcaaaaagatctgtggatggaggcctgatggttaagggcccaagacataaacctggaattgttcaggagacaacttttgatttgggaggagatattcatagtgggacagcattaccgacaagcaagagcaccactaggctggacagcgacagagtgtcgtctgcctctagcacagccgagcggggaatggtgaagccgatgatcagagtagaacagcagccagattatcgcaggcaagaaagcagacctgacatcagccctacagagcgcacacataaagtcattgcagtcgtcaacaagatggtgagcatgatggagggtgtcatccaggaagtagaccaggttgaccagaaacagaagaatattgcaggggcacttgccttctggatggcaaatgcatctgaacttctcaacttcattaagcaagaccgagaccttagtcggatcacactggatgctcaagatgttttagcacatttggttcaaatggcatttaaatacttggttcactgtcttcaatcagaacttaataattacatgccagcctttctagatgaccctgaagagaacagtctgcaacgaccaaaaatagatgatgtgctgcacacgctcacaggagccatgtccttgctacgacgctgcagagtcaatgccgccctgaccatccagctcttctctcagctcttccacttcatcaatatgtggctgttcaatagattggtgaccgacccagattcggggctgtgctcccattactggggtgcgattatccgtcagcagttgggccatattgaagcctgggctgagaagcaggggctggaactggctgcggactgtcatctgagcaggatcgtgcaggcaacgactttgcttaccatggataagtatgcacctgatgacattccaaatataaacagcacctgctttaagttaaattcattacaacttcaagccttattacagaactatcactgtgcacctgatgagccttttatcccaacggatcttatagaaaatgtagtgactgtggctgaaaacactgccgatgagctggcccgcagtgatggaagggaagtgcagttggaggaggatcctgatctgcagctgccgtttcttttgccagaagatggttattcttgtgatgttgtcagaaacattccaaatggtttacaagaatttttagaccctctgtgccagagaggattttgcaggttaattcctcacacacgttcaccaggtacttggacaatatattttgaaggtgcagattatgaaagtcaccttctgcgtgagaacacagagctggcaagtattttgagggctcagcctctgaggaaagaacctgaaataatcactgtgaccctaaaaaagcagaatggaatgggccttagcattgttgcagcaaaggtcactcacacagcaagtcttccctgggcggcagaactcatgacaagaacaagctctgtggtgacactggaagtagcaaagcagggtgccatctaccacggtctggccacccttctcaatcagccatcccccatgatgcagagaaatcgtcgtggctcaggtaaaccccgaccaaagagtgaaggctttgagctctataataattcaactcaaaatgggtctcctgagagtcctcagctgccttgggcagaatatagtgaaccaaagaaattgcctggtgatgacagactgatgaaaaatagagctgatcaccgttccagccccaacgagcagacgcctccgcctagacctgaagcctaccccatccccactcagacgtacaccagagagtattttaccttcccagcttccaaatcccaggatcggatggctcctcctcagaaccagtggccaaattatgaggaaaagccacatatgcacacagatagtaatcattccagtattgcaattcagcgtgttacacgttcccaagaagaacttcgagaagataaagcttaccaacttgagcggcatcgaatagaggcagctatggaccgaaagtctgatagtgatatgtggataaatcagagctcctcactggactccagtacctctagccaggagcatctgaaccattcctctaagtcggtcacccctgcttccacactgaccaaaagtggccctggccgttggaaaacaccagcagccataccggccacccctgtggccgtctcccagccaatccgaacagacctgcctccgccacccccgccacctccagtccactatgccggtgatttcgatggaatgtccatggatttgcctctcccaccacccccttccgccaaccagatagggctgccgtctgcgcaggtggctgctgctgaacggagaaagagagaagaacatcagcgttggtatgagaaggagaaggcccgcctggaggaggagcgggagaggaagcggagagagcaggagaggaagttgggccagatgcgcactcagtccttaaaccctgctccgttttctcccctgactgcacagcagatgaagcccgaaaagccttccacactccagcggccacaggaaacagtcattcgggagctgcagcctcagcagcagccccgcacgatcgagcgcagagacttgcagtacattacagtcagcaaagaggagctttcctcgggggacagtctgtcccccgacccgtggaagcgggacgccaaggagaagctggagaagcagcagcagatgcacatcgtggacatgctgagcaaggagatccaggagctccagagcaaaccggaccgcagcgccgaggagagcgaccggctgcgcaagctcatgctggagtggcagttccagaagagactccaggagtcgaagcagaaggacgaagatgacgaggaggaggaggacgatgatgtggacaccatgctgatcatgcagcgcctggaggctgaacgaagagcgagggacgaggagcggaggcggcagcagcagttagaagagatgcgcaagcgggaagcggaagaccgagcgaggcaagaggaagagcgccggcggcaggaggaggagcgaacaaaacgagacgctgaagaaaagaggcgacaggaagaagggtattacagccgcctggaagccgagaggcgcagacagcacgacgaggcggcgcgcaggttgctggagcccgaggcgcccggtctgtgccgccctccgcttccccgggactacgagcccccgtccccgtcccccgcgcccggcgcccctcctcccccgcctcagcgaaacgcctcctacctcaaaacacaggtcctctcccccgactcgctgttcactgccaagtttgttgcatacaatgaggaggaggaggaggaggactgcagcctagcaggaccaaactcttacccaggatctactggagcagctgttggagcccatgacgcctgtcgggatgcaaaagagaagcgctctaaaagccaagatgcagattcacctggaagttctggggcccctgaaaacttgacattcaaggaacgccagcgtcttttttcacaaggtcaagatgtatccaataaagtgaaagcttctcgtaaattaacagaactggagaatgaactgaacacaaagtcctgctcctgggactcagccgtgcgcctctgggaagggccggtccaggacgtccgcaagttgcgggagaacctggcgggagggacagatgccagcatttctcaccccagcacccagttgaagaggctaaattcctggttgcgtgctccctatgagaatctaatgcctgatgacctgaggtggaagagtttcatcccaaaaccaccctacccccagcctgtggacaaactgtcttccacgaaaccagcccctgatgggaaaaagcacagccgtgcagcccaggacggcagttccttgccgagggcccgtgtgtttgtgtctggtgtgcgctgtgttccgaggatgaaagtgatggccgatgaacagaactctcgtgttgtcggccaaagaagacaagatagcagaactggaaacggaaaacgctgtccttcttctgaaattggcacaggacagcggggagcacagaaggcctgcgccggttccctccagtccgtccacgaggcacaggtccgtccccaaaggccccgcttctcaacgccaccacatcgagggttaagcttccgcgtgaattttggaggtggctcattcaaaccacagcagccaccatcaccacaagccaggtgcccggtgtctccatcacctcgaaggccccacaagccaggcactgaagacacaggcggcaacaccgaggcccagagagcacccccagcgcaatccggcctccctgtacccacgcaggcccgctcccccgtctttctgttgcccacggccaaatcccccaaagcccagggcagccccacgttgagcgcagaccatcctggcgccatggattttcttagaactgccgttccacgccgggtgagtccccggggctctggaaccgtggattttctgggatttgccgttccacgccgggtgagtccccggggctctggaaccgcggattttctgggatttgccgttccacgccgggtgagtccccggggctctggaaccgtggattttctcggaattgccgttccacgcccggactcgggcctgggcttagctccccggaggcaccgcaggcagcgcgcgaccccgagctcacacgcgggcatcgccgagtcacacgtgggcatcccgggcctcacacgcagcccctcttccaggacgttctgcctccccgcacctggccgggaccctcaggctcagccctggggatgcctcccccgacggctcctgtggctccgtgccccgcgcgcccctggatcacctggagttgtccccaccgtgttccctgctgcatacaagggaaagatggaaaagagtcgcagtgaggccacgcggatttccaccctgtacaacaaacagcagtgtctgcagagaaacacacgctcagccttgagccagctgggtcatgtcattcagaaacttaaccaggatatacaggcgtttcattcttcttctcgggtgctcttaagagattatcaggatgagtatcaggaccgtgtttctgaaatagtgaccgcggtgcaaagaacacagcagagtgccgagaccctgctagctgacaccaaattccacaggtga

SEQ ID NO: 125037 - DNA, 3231 bp, Homo sapiens
atgggtggacagacacagagagatgtaggggtgagggtggaaaccatccacaggagagatgtgtggacagacacagagggatgtaggggtgagggtggaagccatccacaggagacatgtggacagacacagagggatgtaggtgtgagggtggaaaccatccacaggagagatgtgtggacagacacagagggatgtaggggtgagggtggaagccatccacaggagacgtgtggacagacacagagggatgtagggggtgctggtcaagataaactaggaatctatgtgaagtcggttgtgaaaggaggtgctgcagatgtggtcagtatcattttgaaagaagtacattttcagtgtgtcatatattcagcaaatgatgatggacgtctagctgcaggtgatcagctcctcagtgtggatggacgaagtctggttggactctctcaggaaagggcggcagaactcatgacaagaacaagctctgtggtgacactggaagtagcaaagcagggtgccatctaccacggtctggccacccttctcaatcagccatcccccatgatgcagagaaaacaattcttatggaattttaatgataatcagggtgttgaaaataaaatcttaagagatactgaatatgctttgattccagtttcagatcgtcgtggctcaggtaaaccccgaccaaagagtgaaggctttgagctctataataattcaactcaaaatgggtctcctgagagtcctcagctgccttgggcagaatatagtgaaccaaagaaattgcctggtgatgacagactgatgaaaaatagagctgatcaccgttccagccccaacgtagcaaatcagcctcctagtcctggagggaaaagtgcatatgcctctggaacaacagcgaagataacatctgtctctactggaaacctctgcactgaggagcagacgcctccgcctagacctgaagcctaccccatccccactcagacgtacaccagagagtattttaccttcccagcttccaaatcccaggatcggatggctcctcctcagaaccagtggccaaattatgaggaaaagccacatatgcacacagatagtaatcattccagtattgcaattcagggaaatgagacagacacaacagacacagcatggtcagtgctgtgggagaagaggccccagcaggggatggagcttctcagtcttggacgagaacctgggcacagctgtatgcacggaagggccttccaggaggagggaaaggcacagagatgtgtagtagttcagcaggaaccctggcgtgttacacgttcccaagaagaacttcgagaagataaagcttaccaacttgagcggcatcgaatagaggcagctatggaccgaaagtctgatagtgatatgtggataaatcagagctcctcactggactccagtacctctagccaggagcatctgaaccattcctctaagtcggtcacccctgcttccacactgaccaaaagtggccctggccgttggaaaacaccagcagccataccggccacccctgtggccgtctcccagccaatccgaacagacctgcctccgccacccccgccacctccagtccactatgccggtgatttcgatggaatgtccatggatttgcctctcccaccacccccttccgccaaccagatagggctgccgtctgcgcaggtggctgctgctgaacggagaaagagagaagaacatcagcgttggtatgagaaggagaaggcccgcctggaggaggagcgggagaggaagcggagagagcaggagaggaagttgggccagatgcgcactcagtccttaaaccctgctccgttttctcccctgactgcacagcagatgaagcccgaaaagccttccacactccagcggccacaggaaacagtcattcgggagctgcagcctcagcagcagccccgcacgatcgagcgcagagacttgcagtacattacagtcagcaaagaggagctttcctcgggggacagtctgtcccccgacccgtggaagcgggacgccaaggagaagctggagaagcagcagcagatgcacatcgtggacatgctgagcaaggagatccaggagctccagagcaaaccggaccgcagcgccgaggagagcgaccggctgcgcaagctcatgctggagtggcagttccagaagagactccaggagtcgaagcagaaggacgaagatgacgaggaggaggaggacgatgatgtggacaccatgctgatcatgcagcgcctggaggctgaacgaagagcgagggcatgtttgtctcttctgggtagcgccacctccatgggaacagtgacctttgtccaagtttctagaagagttctggagtgtggtaggcagtcgagtgagtgggatcggattccaggccaaggtcccaagctctcgaagtttttcttgacccctgaaatccttgctgaacgtttccatcctttgctctggcccctggtgcaggaagcctgtggggagctgtggctggttctgtcaactcaagggcaaggcgtcaccgacggcttccttgacgaggagcggaggcggcagcagcagttagaagagatgcgcaagcgggaagcggaagaccgagcgaggcaagaggaagagcgccggcggcaggaggaggagcgaacaaaacgagacgctgaagaaaagaggcgacaggaagaagggtattacagccgcctggaagccgagaggcgcagacagcacgacgaggcggcgcgcaggttgctggagcccgaggcgcccggtctgtgccgccctccgcttccccgggactacgagcccccgtccccgtcccccgcgcccggcgcccctcctcccccgcctcagcgaaacgcctcctacctcaaaacacaggtcctctcccccgactcgctgttcactgccaagtttgttgcatacaatgaggaggaggaggaggaggactgcagcctagcaggaccaaactcttacccaggatctactggagcagctgttggagcccatgacgcctgtcgggatgcaaaagagaagcgctctaaaagccaagatgcagattcacctggaagttctggggcccctgaaaacttgacattcaaggaacgccagcgtcttttttcacaaggtcaagatgtatccaataaagtgaaagcttctcgtaaattaacagaactggagaatgaactgaacacaaagtga

SEQ ID NO: 125038 - DNA, 1052 bp, Homo sapiens
gcgcgatagacactatcaggtggagaaccccagcgcctggaggctgaacgaagagcgaggttgcaggacgaggagcggaggcggcagcagcagttagaatagatgcgcaagcgggaagcggaagaccgagcgaggcaagaggaagagcgccggcggcaggaggaggagcgaacaaaacgagacgctgaagaaaaggttatggtcctttaagggcagctagaattttaccaagttagcctgaacgtaatcgattggctggggcagagcgggctggaagttctgtttttttcttaagaagcacgaggcagagcagggcctggctcccccagctttgtgattggacctgtaactttaccccatctggcccacctacctctcttctggactgtctccagatccccttatctgtcaagatttggctccttcaaacttctgaactcttgggcgtgtgtagcagtgagcctctttgcaaagggttcggtacctcgggcactcatctttactgaacatggcccagcttgtcattgtgaaggtgacattggctcagtgattgcttaaatggcatgtggaccgtgggaagcagtaggagcgtagtaagacagttggctgccattcaacatttcaaatagatggtttactcaaatcactcacttctggttgatggtaaagagagcagatggcttagaaaacatgatacaggaaaatttagtatgtaatccagtaaatatcctaagttatttattttcatgtgtgtgtgtgtgtttaaatcaagtaacccttttaattgaattttaaaatgacagcgaattttgacattctgagaaatggggattttgagatgtttctctccatatctccctttgtcctgtgggtgtggccgacgccctctggatgaagaggctgtagccgttgagctccctgtgggggcctgtttcatcccgaggggactgcgtgttgctctgtgtggtttgagagaagctgctcttctctgttacttcccttctatgaaggtagaagctttcagtgttacaacttctgatggcggaaaattt

SEQ ID NO: 125039 - DNA, 461 bp, Homo sapiens
cccggaggctgttgccatgggctgcaatcagtacacgtttcccctccttgatctggggaactatttcttcattccagaagggcagagctctgtcaatagtatccttcagactctcacaggagggtagctgatcttctgtgaggtctgcatacctgcgatccttactgatgttgctgtagaaaggatggtcgggctccatcggaggtggtgggacatcataggagcgcctccagatcttcacctgggcctcaccatgctttgcagcagtttctgctttattgagaccggttagacccccatagtgccgctcattgaggcgccaagtcctcaccactggcagccacatgtgatcaatggcatctagcactgtccagagggtccggatcgctctcttctgcactgaggtgaagcactcgtcgaactcataagggcttgcatgattctcagcgtcatggctcaga

SEQ ID NO: 125040 - DNA, 434 bp, Homo sapiens
ctgtccttttctgtggaatcacacaagctcattacacctacaacaatctgtcggtggaatcaagaagtcgaaccaagcagctctttgaggtgttacatttcctggcagagaacttcatcttctcctacatgggcctggcactgtttaccttccagaagcacgttttcagccccattttcatcatcggagcttttgttgccatcttcctgggcagagccgcgcacatctacccgctctccttcttcctcaacttgggcagaaggcataagattggctggaattttcaacacatgatgatgttttcaggcctcaggggagcaatggcatttgcgttggccatccgtgacacggcatcctatgctcgccagatgatgttcacgaccacccttctcattgtgttcttcactgtctggatcattggaggaggcacgaat

SEQ ID NO: 125041 - DNA, 1536 bp, Homo sapiens
gtcggcggtgctgctggtccccgggcagaggaggcgtgggcggctccgggaccacggagcctggtgacgcggcgctcccctgcccgggtcgggttgcccaggcgccgccgcggcggctgctgctgctgctgccgctgctgctgggtaggggacttcgagtaacggccgaggcctcggcctcctcctctggggcggcggtcgagaacagcagcgccatggaggagctcgtcactgagaaggaggcggaagagagccaccggccagacagtgtgagcctgctcaccttcatcctgctgctcacgctggccatcctcaccatatggctcttcaagtactgccgggtgcactttctgcatgagaccgggctggccatgatctgtgggctcatcgttggggtgatcctgaggtatggtacccctggcaccaggggccgtgacaaattactcaattgcactcaagaagatcaggccttcagcactttagtagtggatgtcagcggtaaattcttcgaatacaccctgaaaagagaaatcagccctggcaagatcaacagcgtaaagcagaatgacatgctagggaagtcagttggcatttttctaggtatatttagtggctgttttaccatgggagctgtgactggtgttgtgactgctttagtgaccaagtttaccaaactggactgctttcccctgctggagacggcgctcttcttcctcatgtcctggagcacgtttctcttggcagaagcttgcggatttacaggcgttgtagctgtccttttctgtggaatcacacaagctcattacaccttcaacaatctgtcggtggaatcaagaagtcgaagcaagcagctctttgaggcagagaacttcatcttctcctgcatgatcctggcgctatttaccttccagaagcacgttttcagccctgttttcatcattggagcttttgttgctgtcttcctgggcagagccgcccatatctacccgctctctttcttcctcagcttgggcagaaggcataagattggctggaattttcaacacacgatgatgttttcaggcctcaggggagcaatggcatttgcgttggccatctgtgacacggcatcctatgctcgccagatgacgttccccaccacgcctttcatcgtgttcttcaccatctggatcattggaggaggcacgacacccatgttgtcatggcttaatatcagagttagcatcaaggagccctccaaagaggaccacaacgaacaccaccgacagtacttcagagttggtgttgaccctgatcaagatccaccacccaacaatgacagctttcaagtcttacaaggggacagcccagattctgccagaggaaactggacaaaacaggagagcacatggatattcaggcggtggtacagctttgatcacaattacctgaagcccatcctcacacacagcggctccccgctaaccaccactctcccgcctgtgaggaaactgaggcactggaagatgaaggctacagaggtagaaagtgatggag

SEQ ID NO: 125042 - DNA, 1267 bp, Homo sapiens
ttggcatcttaatgagtggcactctggtggtctgaccgacctccgtaaagcagaaactgctgccaagcatggtaaagatctggaggcgctcctggaatgaagaaatagttccccagattaaggaggggaaatgggtactgattacagcccatggcaacagcttccccggcattgtcaagcatctggagggtctctctgcagagcagaacctgctgactgctattctcgttgtctatgaattggacaagaacttgaagcacatcaggcgcatgcagaccacatctgtaggcatctgaagttgtagctacagatgagtaccagtggctcccatttttcatttcagccatttttctcctgcacccactgtcttcacacaatctagacaagatagcatgcagtgcattttgagacaacattgtcatttaatccttataagtagatcttcttctttggtccccgcaggcctcaggggagcaatggcatttgcgttggccatccgtgacacggcatcctatgctcgccagatgatgttcacgaccacccttctcatttgcccagagctcctggctctcctgttgtccctgtcacactcacgttcccttcttctgcatggctaccatgggccaagctaatacgctctgtttttctctttgtctttctccctggtgacttgggttggtgccaaacctggaagatatcagtctctcatttttgttgttgttgttggttgcacttttcagaaccaagagccactgagagaggaagactctgatttcatcctgaccgaaggcgacctgacattgacctacggggacagcacagtgactgcaaatggctcctcaagttcgcacaccgcctccacgagtctggagggcagccggagaacgaagagcagctcggaggaagtgctggagcgagacctgggaatgggagaccagaaggtttcgagccggggcacccgcctagtgtttcccctggaagataatgcttgactttccccccaagccctggcgcgatggggtaggctcccgatggggtgaggacagctgcaagccctagtgttgttggaggtggggcagtgactagattgaactaactcttctattttattggggtctgaagctattgtaacacttaaaatttaactcacaatgcagatggtgaggcaaaagtgtctctaaattcagacaaacgtagacctattcccacttttttcacatagtagtgcgctgtttcagagttaaccaaccaaaaaaaaaaaaaaaaa

SEQ ID NO: 125043 - DNA, 378 bp, Homo sapiens
atggtcctctgcgccccactgcaccagggggaatacggggacgagaaactcctacaggaagaactccctcccagaatccgcttccagttttctcaccggcaggagagcattcaggcctttcagggcactccagccctgtccaaccacactcggaatccaccatcccaccagacgttaaaatccccagggagaggccaccggcctggctgcaagaatgtggcagctttatcttcccaaggacagtcccagtggaagcctttgggccgcaggtgctgcagtcgtcccgtggccaagatggagacacaaaacactcaaaataatccatgcagaagagtgtccgatgtggtgatggatgcggagacagtgaaacctgaataa

SEQ ID NO: 125044 - DNA, 1035 bp, Homo sapiens
atggcccccccactccgcggaggccccgcccccttccttcttccctcccgagccgtcgctcgcgggacccgcccaggattccgctctgcgcttagtttccgcagacccggaaacagatcgcgcggagtgaacctgattaaacttgggcttcgcagtcctccacctccataccccggatttggaggttcgtacacgcctgaaaattctcaaccgctcccctcactgctactccaccccctggaaaaatgtgctctgcgggatgcagagagacagttaaaaccacctgaccatcacctgatggttgcctggctcattcctgatgtgtggaatggggagggggagccctctccttctcataccagacactctctcagggcaagttcatccaactatgtgcttcgagctccagaggggaatctccttgccaggaggttacctcgagaaacagcaatcaatctacaacccaaagcctgctacaaaactctctcccacccggagagtttcagccacttttacaaccagttctgcccacgaaggcaccagtggctgccagctcaaccccctggtcacttcttccttgggtaacataaaagagtctttagaagtcaatactgaatatccaaaatatgctgcttagggctgagaatctatacatccccttcatgtgccacagtcacatgcacagatctcaccctgtggaaagatggtcctctgcgccccactgcaccaggggaatacggggacgagaaactcctacaggaagaaggagaggccaccggcctgctgcaagaatgtggcagctttatcttcccaaggacagtcccagtggaacctttgggccgcagtcctcttcacttgatgatgagtttccgaattaaattcctgcatgcaaatctctgtgtcagatctgtttcccagcttctgaacttctcgccacccttcctgaagggaatccaggaccccgactgcgagcgcatcacctgctggaaggcaaagcccctgcccaggatggcaccgggccccggtgatgtgtag

SEQ ID NO: 125045 - DNA, 894 bp, Homo sapiens
ggaattccccgagccggccgcgctcctcccagcgaggcgtggcggggaggcgtagtgaggctgggcccgtggcggttccctgaggagggccgaaaaagggccgggggtgctaggggaacgggcgctgggggcagcggccccggtggatgctaagggcttcgggatcgggagagtccaccacgcctgcctgctcggctgagaatcgccatgccagctaaaggaaaaaaaggaaaaggccagggcaagtttcatgggaagaaacagaagaaaccagaagtggacattctcagccccgcggccatgctgaacctctactacatcgcccacaacgtcgctgactgcctgcatctgcgaggcttccattggccgggtgctcccaaaggaaagaaagggagaagcaagtgacagcattttcacaaacacatctctgttacagaccaccagggacctggggaagagaagtcaggataacacaactgttgccagcaacatagactttactccagacgacttgagatgcaaaattaagtgtgctttttctgtgatggtggaagatcaggaaatgcaccttacctcctctgttatgccagatatggttagccactttggtttttttaggagctataggatgggaaaagcctgagtaattcctacacagtgtgctgaaattaatagaactttcagaaattattataattctgggtcaggattaaactttgctctcagaaggcagttctagttgcattaattgttttcttttgccaaagagcgtttgtcatttagagaagacacggcaagaaacactgggtttccttaggaacattcctctcttgggcaccatttccttttttttttttaatggaaaataataaatactttgtttaaataaaaaaa

SEQ ID NO: 125046 - DNA, 977 bp, Homo sapiens
ctaccattttgtcttcgtgatcttcttcctcttcctcttccccttccccttccccttccccttccccttccccttctccttctccttctccttctccttctccttctccttctccttctccttctccttcttcttctttctttttgagatggagtcccgctctatttcccaggtctctctctttctctctctttcctggaactgggacacccttctcctgtccttgaacatcagaatcccaggttctacagccttggattttagaacttgcacaagtggtccccccatggttcccaggactctagcttctgactgagttccaccatcatcttccctgattctgaggcggtcagactcagaaccacgttggcctgagccatgttgcttacagtgaacacggatgcagtcataatagtatcgccactcatctggagaaaatgtaacggtgaccgtgagggacaagccagggaccaggtggtgttcctggaagacaggtggcatcttgttgggacaagccccggactttcttacataattgatctcaaagtatttggtttgcgggggtaaaatatgaacacgtgtgtcttcattggaaacattgaccagatgcagaatctgttggtgttgtttttctacttgatagcctccaaaatgtattatgccaggtcttgcctgtatgaccttattattcacaagttttgcataaacctttgattctaggaggtgattaggtactacttttctttttttcggctcctccactaggttcttcaagagatggggtgatgcattattaaagggttctttagcattctttagtcctctgctgggggttttcaccactgccattttatcatgaaaaatggagtcttctttttagagccaaaggtcatgtccctggaggtggttcccgggccggattcggccggcgccagcggaattccgccacactgcactacggatctcgaggttcaaaa

SEQ ID NO: 125047 - DNA, 489 bp, Homo sapiens
ctactgatttagttggctcctaaaaggagtatctggttagaactaaatgacagaaaggaaagggagagaatcccctcgttaaaataacatttcggccaccacctgggctgaggacctatccatctgctccttggtccgctcgaagcacctacgggcgagctgctgctgtctggcgtcctcactcaccatcagctccccgtagaggtacacacccatggcctgcagggcacagaggccaaagggcatcaggcgaaggtgtgggtacccacacacacgcacacatgagctcagtctgtgcttgttccacacacacttgctggtctagaaattgcaaagaccccagagaagacagaggccgtgggctgactgtgcttttggaagctgcagtctgcaattcctgtctcctccttgtactcaaaaccccaaggaatcctcagctcccaattctctacacagactctgacacgaaatcgtcgaccgggaatccgg

SEQ ID NO: 125048 - DNA, 1494 bp, Homo sapiens
atggctgctgccagtttttacatcactggccacatgcagaaaggcaaaggtaaaggacgaatgcacaaaccttcctctcacagtccgacacgatcccttcatgaggctcagacgctgctctgcacttacagccatttactccaggacacaggagatggttatcaaatggaatcagttaagcgagcacaagtctgtcccgtgtggcggtgtggaggcctggagggctgctttatggagggacacgttggggcagcttgcagccattctcagcaaggacagtttggtgactgctttgctttgaaatacactctttgggtccacaaatcaaatcttcccatgttccttgtctggaaaaagttgtggggatttcctaaagtgtacctcagaattcaattggtgaggaaggcattcattgtttccccaactgacagcaagaagccaagccccagtcaggccctctgcaaatctgaaaatccaagacccagtaaagacaaaactggccacacaagtgactcgggagcatctgttatcaagcatggacttaatccggagaagatcttcatgcaggtgcattatttaaagggctacttccttcttcggtttcttgccaaaagacttggagatgaaacctatttttcatttttaagaaaatttgtgcacacatttcatggacagctgattctttcccaggctccaagtcacccggctaaacagatctgcatccaggctcacgtgtcccacccctttgccctttccattgccttcattgtcattgccattgtctgtaattatgttttcatcatggggctatttgtttcttttcgctgtcctccactctacgtatatgcccaacaaggccagaccattctatttcaccagtacttagcacatgattggcacacagtagatactgtcagcccacagccactgcagacgtggcccattgctacttccttgtccacagcaacagtgctggatacggctcagtgccttgtcagacagacaagagttgttgatgagtctgcaaagcagagctgccccagcaaccgccattctactttctgtctctgtgagtttgactcttctaggtacctcatgccacccccacctggagtggtagataggcctcttggcttgagtgctgtggccagccaggtgttcacaggtctcacctgtgcatctggggctcagatgggcactgttggccagtctctacacaagggtcagatttcacttcctccattgttgcaggaatcctggtttgctgcctcatggttgcaagatggccatcactgctccatccaccaggcttgtggggaagagccgctgcagagggagcgtcgcgccggggcggagtgcgggcttgcgcggcaagtgcgcgccgaggtcacgaaatggattggagtgaaccggagaccccgaaaacggaagcgcagggagaaggaagaggtgtttgaaaagagggtcatatatgtcacttcagttgaagaataa

SEQ ID NO: 125049 - DNA, 1046 bp, Homo sapiens
gttggaattcaaaatactccatcggaaagttgctgcctatttaaagtagtgagtttgatcttggctttgatctaaaccttttgatcttgaaagaaggatggagtagcaataaagagagggcaagacagattttctttaaagaaatgtgataaagttaaagggatggtcaagacccagcaagcaacaggacaacccgactctccgccccggcccgccctcaccggcaggcgggttccagcaactgctgatgcggatgagaaggcctttggcgggtggaggaaaatcttggggtatcgcacatttttataaaccgctgcagagggagcgtcgcgccggggcggagtgcgggcttgcgcggcaagtgcgcgccgaggtcacgaaatggattggagtgaaccggagaccccgaaaacggaagcgcatggagaaggaagaggtgtttgaaaagcttcttccagaccagctgggcttgcttctggagcatctcttggagcagaagactctgagcccccgaactctgcaaagcctccagaggacataccacctccaggatcaggatgcagaggttcgccatcggtggtgtgaactcattgttaagcacaagttcacgaaagcctacaaaagtgtggagaggttccttcaggaggatcaggccatgggtgtgtacctctacggggagctgatggtgagtgaggacgccagacagcagcagctcgcccgtaggtgcttcgagcggaccaaggagcagatggataggtcctcagcccaggtggtggccgaaatgttattttaacgaggaaagaccacagcaagattctttcattcgtctcctcctagcctgggggaccaggctcgaactgaccctggacatcaaaggagggattatgtggctgctaaagccatcggcccacagccctgttcacgtcttggtgcttctctttcccagaggctggtcccagccaggcacacacaaaaggcagattctcgtaaacgcagcctccctccctggaggctgcctcctgcccttgatctggagtggagctgct

SEQ ID NO: 125050 - DNA, 688 bp, Homo sapiens
  misc_feature (1)...(688): n = a,t,c or g
aatgcgccggtacnagggngcgtcccattcgccatttcaggctgcgcaactgttggaagggcgatcggggcgggccttttcgcttattacgccagctggcgaaagggggatgtgctgcaaggcgantaagttgggtaacgccagggtttttccagtcacgacgttgtaaaacgacggccagtgaattggatttaggtgacactatagaagagctatgacgtcgcatgcacgcgtacgtaagcttggatcctttagagcggccgccctttttttttttttttttgttttttttttttttttttttttttttgagacggagtttcgcccttgttgcccaggctggagtgcactggcgtgatctcggctcaccgcaacctccacctcccaggtttaagtgattctcctgcctcagcctcccaagtagctggaattacaggcatgcgccaccacgcccggctaattttgtgtttttagtagagactggtctccaactcccaacctcaggtgatctgcccgcctcggcctcccaaagtgttgggattacaggcgtgagccattgcgcctggccaggaaactggcttttaaaggaaactcgttgtggttcttctgtagggaggcagataacaggccccattaccccggacgcgtgggtcgacccgggaattccggaccggtacctgcaggcgtt

SEQ ID NO: 125051 - DNA, 382 bp, Homo sapiens
tttttttttttttttttttgagacagagttttgctcttgttgcccaggctggagtgcaatggcgtgatctctgctcaccacaacctccgcctcccaggtttaagtgattctcctgcctcagcctcccgagtagctggaattacaggcatgggccaccacacccggctaatttttgtatttttagtagagatggagtttcaccatgttggccaggcctgtctcaaactcctgccctcaggtgatccacccgccttggcctcccaaagtgctgggattacaggtgtgagccaccgagcctagctgcaactggttatctttatgtgttaatagctgaagcccaaactgtgggatgaaggctattggctgtctggagccctgaaca

SEQ ID NO: 125052 - DNA, 577 bp, Homo sapiens
agccccatcagtaagaagcggaaacgaaagggatcttgccagagacgaagaagcgcaagaaacgcaagtcagaggatgccacgccagcggaggatggcacacctgcagccaccgcgggagccagccccccagcatgggcaggaagaagaggaacaggacaaaggctaaggtcccagcccaggcaaacgggacgccaaccaccaagagtccagcccctggcgcccccacccggagccccagcacccctgccaaatccccaaaactgcagaagaaaaaccagaagccacccccggttctgggctgggaccctggctccagggccatgtccagggctctggtgtttgcctgggttggtgcaggttgatgtgctggctgcaggcaggtgtgaccatctctcgtgcctgccacctctttgcccccaggcttttttgctgtgagggagccaccagggggtgatttaaataggtttatttcttcatttacaagaggaatatatttggcttctctcttaagactctgagattcacaatcagcagctctaaaaaataaaggagcagtttggcttccggaaggaaaa

SEQ ID NO: 125053 - DNA, 3639 bp, Homo sapiens
atgagccaccgcgcccagctgaggactctccagggagttgtatcttatgattccagtagtggaaagaacaaaatcaaaacactgtatggcgaaatcctcaacgggaaggacctggaattcacatccttcgagatatcatctgtacctcagcactgttgtgacccgtattccagcgtggtattccttgaagtagatgtggatgactgtcaggatgttgcttcagagtgtgaagccgaatgcatgccaacattccagtgttttaagaagggacaaaaggctcactttcagatgccctccaggtggccttgtcctggccactgccacatctgcaccgtggagaaaccccagctgaggtatagggctggcccaggtcacacagtgaggccgtgtgaggaagagcaccggtctgctctgggcctggtcctcgcctggtggctgggagtgttcatctgtagcttcatggtggctgcccccatcttcggctacctgggcgaccgcttcaacaggaaggtgattctcagctgcggcattttcttctggtcggccgtcaccttctccagctccttcattccccagcagtcccctgcagagagctgtgacctgctgggtgacatccagacctgcatcaggaaaagtctgggagagaagccccgccggagccgcaccaagaccatcgacccccaggaacccccgtgggtagaggtgctggtggagatcttgctggccctgttggcccagcccagccacctcatgcgccaggtggcccggagcgtgtttggccacatctgctcccacctgaccccgcgtgccctgcagctaattctggatgtgctgaaccccgagaccagtgaggatgagaatgaccgtgtggtggtgacggacgattctgatgagcgccggctgaagggtgcagaggacaagagcgaggaaggtgaggacaacagaagctcagagagtgaagaggagagcgagggggaggagagcgaggaggaggagcgcgacggggacgtggatcagggcttccgggaacagctgatgaccgtgctgcaggctgggaaggcgctgggtggagaggacagtgagaacgaggaggagctgggggatgaggccatgatggccctggaccagagcctcgccagcctctttgccgagcagaagctgcgtatccaggcccggcgagacgagaagaacaagctgcagaaggagaaggctctgcggcgcgacttccagatccgggtgctggacctggtggaggtgctagtgaccaagcagcccgagaatgccctggtcctggagctgctggagccgctgctgagcatcatccggcgcagcctgcgcagcagcagctccaaacaggagcaggaccttctgcacaagacggcgcgcatcttcacgcaccacctgtgccgtgcccggcgctactgccacgacttgggtgagcgcgcaggggccctgcacgcccaggtggagcggttggtgcagcaggctggccgccagcccgactcccccaccgccctctaccacttcaacgcctctctctacctgctccgggtcttgaagggcaacactgctgagggctgcgtgcatgagacacaggagaagcagaaagctggcactgaccccagccacatgcccacgggcccgcaggctgccagctgcttggacttgaacctggtgacccgggtgtactcgacagcactgagctccttcctgaccaagcgcaacagccccctcacagttcccatgttcctcagcctcttctcccggcacccggtgctctgtcagagcctgctccccatcctggtccagcatatcacgggcccggtgcggccccgtcatcaggcctgcctgctgctccagaagaccctgtccatgcgggaggtgaggtcgtgctttgaggaccccgagtggaagcagctgatgggccaggtcctagcaaaggtcaccgagaacttgcgcgtgctgggggaggcgcagaccaaggcgcagcatcagcaggcactgtcctccctggagctgctcaacgttctcttcaggacctgcaaacatgagaagctgaccttggacctgacggtgctcctgggtgtgctgcatagggcaacagtaagagcctacagcagggggcacactccaccggctatagacgcctgcacgagctatactggcaggccatgaaaaccctgggagctcagcgccccatgatggagaataacgatgcctaagagatacccattgccacccatagccccaatagtaggaagcggaagaaaaagggattcttgccagagacgaagaagcgcaagaaacgcaagtcagaggatggcacgccagcggaggatggcacacctgcagccaccggcgggagccagccccccaatgcatgggcaggaagaagaggaacaggacaaagtgttaaggtcccagcccaggcaaacgggaacgccaaccaccaagagtccagcccctggcgcccccacccggaagccccagcacccctgccaaatccccaaaactgcaggaagaaaaccagaaagccgtcccaggtgaatggagctcccgggtcccccacggaacctgcaggccaaaagcagcatcagaaggctcttcccaaaaagggggtcttgggcaaatcaccactgtccgcgctggcacggaaaaaggcaaggctgtctttggtcatcaggagtcccagcctgcttcagagtggggccaagaagaaagcacaggtgaggaaggcagggaagccctgagcacaggtacgggcccccctcagcccctgccttccatctgcctgagacgcctattttttttttttttttttaaaaccatgattttaatacgcaagctgtttctaaggcgctgccactggggagggtggctgttgccgcctgcccgggcatcctgctctggcaagcacagcctgagccattccttgcaggggtcccagggtgcaagagacttccccccccccggttttgggctgggaccctggctccagggccatgtccagggctttggtgtttgcctgggttggtgcaggttaatgtgctggctgcaggcaggtgtgaccatctttcgtgcctgccacctctttgcccccatggctttttttgctgtgagggagcccccagggggtgatttaaataggtttagtttcttcatttacaagaggaatatatttggcttctctcttaagactctgagattcacaatcagcagctctaaaaaataaaggagcagtttggcttccggaaggaagagcgaggcaacactcggacctggttcttgtacaacaagaaaacatcgctgggcgccccgctgaggctggtagtgggggtggaggctggtctttggaggatgccacccccaccccatcctcttttcagggccctcggggtaccccagaagcttgggtggggtgagtattccacctgtttacacaccactggaaggccacagccaggccagtaactacaggggcaagaaagagcattgtccaagctggctcttggggggggtcccccattggccacaaaggcctcaccccccaccccatccccgtaaccagaaaccaccttgattgcagcagaaattcaggcagatgggtagcgcaggggggctaacccccccacaagcggg

SEQ ID NO: 125054 - DNA, 1214 bp, Homo sapiens
ggactcggagatccaggagtaccagttcttagatcaggaggactggggcccccagcggacctcaaaggagatcaggcagttgcagaatgactgcatgaggcttcgggagtcactgaacaccacccaagtgcacaacctggccctgggggagaagctgcagaacctgcccaccttattgtataagagcctgaaggagggagcccaggccatccaggaggaggcccaggccatccaggatgaagtgaaggccctgcaggaggaaagccaggccctgccggaggtggctctgctcagggctgtcgcagaagctctgagccgtctggcacatagagtggacgaagcccacgatgaggccctcacggacaccctgactgcagaactcaccctgcaagagaaggtgcccaggtccacagcaggtcccctcttccaggtggggctcctgtacgaagagggtgttcgcaaggcccagagcagcgactccagcaagaggactttctccgtgtacagcagctctcggcagcagggccgctacgcccccagctatacccccaagtctggctgtgccccgatgaacaccaacttcttgagcaatatcccagaagctatttctctgaacgtattgatgtgttcaagccctgtggagttcaacaagggtgtccggtgcttgaccgggcatcatcaaagatcagccctgaagacgctgctgggagtgtggtgcggctgcgcagcctttgggcggcttcgggcttgcagcaaggtgcaagtggacttgccacttttctgcagcttcttacctgtggcgttttgtggcccgacgaagaactcgtgcacttgctgctggacgaagtggtggcctctgctgccctgcgctgcccagaccctgtgcccatggagcccacgtgtggttgaggtcatcttgcgaagcgcggctaggcgcagccgcatagccatgcacacggtctgtccctgcaccccatggagacccaggatctggtctcggtggtccttccccgcaggcaaggtgtcaggaccggcctaataaacatgtgtggcctcctcctctcgcttgctgggcgggcctttccgggggcggggttttgaagctgaggcgtctgaggcgcccgcgtcgggtccgcccccgagcgccgattggctggtgtgctgggcccagcatgggcagggggcggttccacttaaaaaccctgggacgaaaa

SEQ ID NO: 125055 - DNA, 993 bp, Homo sapiens
atgatgaagttggttatccacctcaacctcattttttccagtgagaaactgagttgggggaaattatttcttgtgcttgataccagtcagaatgaggggagagacgtcacaaatgtggaagtgtgtccagaattgatgttcagatgggtccggagtttcttccttctggtgggttcgtggctgacatcaggagtgaagctgcatccctttgtggtgagtgttacagctcttaaaggcgatgcgtctggagttattccttcctcccggtgggttcatggtcttgctggcctcaggtgtgaagctgcagaccttcgcgactcaggtgcccagctggcttcacccagtggatccctcaccaggactggaggtggagctgcctgccagtcccgtgcagtgtgcccacactcctcagcctttgggtggtcgatgggactgggtgccatggagcagggggcagcgctcatcggggaggctcgggcctcacgggagcccatggaggaggtgggaggctcaggcatggcagcctgcaggtcccaagccctgccccgtgggcagctaaggcccagtgagaaatcgagggcagcgccggtgggctggcactgctggggacccagtacaccctccgcagccactggcccaggtgctaagcccctcattgcccggggccgacagggccggccagctgctcagagtgcagggcccgccaagcccatgcccacccggaactccagctggcccgcaagggcggtgcgcagccccggttcccactggcgtctctccctccacacctccctgcaagctgagagagcaggctccggccttggccagcccagaaaggggctcccacagtgcagcagtgggctgaagggctcctcaagtgctgccaaagtggtagcccaggcagaggaggcacagagagcgagcgagggctgtgaggactacctagcacgctgtcacctctcaataaggaagatgagacgtagaaatcaatga

SEQ ID NO: 125056 - DNA, 1560 bp, Homo sapiens
atgagccacctgggccgactggccctccttccccacagagcccctggcacccaggacttcctggcaggtggtcaagcacccacgtggtcttcacacatctgcaccttgcaggtccaggatggagctgcgatcatcgctggatgggaaagcagcttcctgtctccctctcagcaagtggagtgcagggggttcccaggttcagatctcaggatatgtatcaaagctcaaggaacaagtttccttctggggctgcccatgtcccccaagaatgggctgtcccctggaagaaccaggggaacactcatcagtcctctagaccgtctgaatctggttgctgtgcccaagctgaaggctccaaccaatgccatcaaaggcaggaggcagctggtcccagcaggctcagtcttcctgacggtggaagacgtctggagacacctagacaccctaatggtccctggtattggaacaactcaccacagcgcctcaattaatggagaagaggggatccttcgtggccagaacctcaagggaaaccccacacaggaggagcacgtgttccagcgtgccaaagaagggagatctgtctttcccccttccggggcccacggcgaagacaaaaagagaacatttatgagtacctgtgacatgcaacgcactgcacctcgtgctgggggtgcagggcaaggtgtcaacccccgaagagtgctcagacctgtggggcaacaagcctgtaaccaaaccgaaggcgtggtgctccacagaagagtgttttctgggtggcaatcatctctttatatcatctttcttcctgcgccgtggggactcaccaaggaccttacagttgttggtgtcatctgcgaaagccatatccccttcacccaggatgaagtccacacactgaatgcagctttcaggccacggcgtgctgcgctgggtgctcagagcaaagatcagccaaaaggagtccacgcctctgctgttcagtgcaagggcgatgacagtgtaaacaagagcagtgccctgacacctgaggagctgaatgaggatgctcggctgctcgcggctcctctcctggaaaagtggaaaaacacaccggggtccctgggcagcctgctaaaggctaagggctacagtgtgaatgccagccgaccaataggttctgccgaaaagaccctctctggctcacaaggtgctccctggaatgaacaggagctggccgtgcctgccaccatctatgcccacccctttcctggtgcagcaaagatcctgtggatcagggagcactgcggatgttcatttaacatcatagagacagaaggaagcctaaccgtgagcttccaggatggtgtctgtggccccagcgcccaggagcccatctttgataccctctactgtgctcctatattaattatgcagggtgctatcacagcacttatcacagtgaatctaacagggaagagagaaattaaacaagtcattacggtaaaagagcatgacgaaaggacccccagggagaaggtagttcatcctgaacactcctccctggtgatatgcttttga

SEQ ID NO: 125057 - DNA, 438 bp, Homo sapiens; identical to SEQ ID NO: 115819

SEQ ID NO: 125058 - DNA, 1163 bp, Homo sapiens
tgggaagaggtcatggatgatgactgttgaatgctaaggctccatggctgagcgatgcctagtgtactcccctcaagaacacgaggagcttagaagagagaagcaggcctcatctggggcccaacacactggtggtctggctcagaaattgggcaaggataatcctaggggtgaagagcatcattagtccagcgcaattttgcccatttttcctttcttattcagggaccttccttggtgaccttcgtggaccctactctgtctcatgcagcctggcttctcacgtggcttgtacagggctctccatggatttgggcaaaccctcgtggcctcaagtgacagtcacatgactccaaccccattgatggctgtccctctggcttccttccctcctcccctacagtgtttccttcagttcccaaatcaactttctgcactggaatccttgtctcaggatatgcttctgggggaacctacgacacttgtcattgccagccccaaatctgcttctcttcctagggacctctatctcagtgccctccccttccccgcctcctcccaccccttggtgtatatagtaaaggccgggcgccgcacgcagacacacactcgccaggacacaggcgcacacacgctcacgcacaaccagcagcggcggcggcgacagcgactcggtgacagcggcgacggcggctcccaccgcggcgcacccccttcaggcggccggcggcgaggccagaccggagagttccagcacactcatctgccgttctgccccggcccggaaaacccggcgccttccaggcccttcgaaagatggattctgttgacgtatctggcggccctggcgagcctggtggaaagttgggttttgccagattgcgccgggctccacctgatcgtctgcccgggtgcccatcatctcattctttccagactcaaagcctttccttcatggctcacaatgttgatgagcctcttgagtctgccacttcactccttgggctcctcagaaggagttggttttgtttcacatggcagaagcagactgtttactggagcacaggaagaatccgacattctggcgaaaaataattcattaacagccagggtattaccagttccctggaaaagctcctccagctgcactgtagcaactgttc

SEQ ID NO: 125059 - DNA, 2265 bp, Homo sapiens
tcaatatcgctgatgaacatcgatgtgaaaatcctcaataaaatactggcaaaccaaatccaacagcacatcagaaagcttatccaccatgactgagtcggctttatcccttgcttgagaattttggtgatctatatttaacaaggctgtaaaatcctctatggctgcaaaccagttttcattttcacaataaaacagcccacgtttcaataatgcatctgttcttttgggatcataaaaaatacatctctgcagatcattcatggcactctgcaactttcccagtttcctataaatagctccacgcctacaatatgcaaatgcaggatattttgtcttatcatttatttcttcagtcaaaatcttcacttcagattcataatatttaatgacctcttgtggaagatcagactccacataatcatttaattttagttttggtggttctttcactctttcaggtgggtcttcaggaactgatattttatcatctttctcttttacaggtatgctcgcatctttgtactcaatgagcctatcaagagcccatgtccgaggatcaatattttctggaattcctcccttagcttggacgaatttttcaaaatttaaatacaaaggtaaactgggacaccgtatttgacgttcatataatggaactttgaacaaatatttcttctgtcccggaagtattccatgagatgctgatctttcaagagattttggaggcttggataactcttcatgcacgaatataagtttttgttgtttcaatcttttcttccatctcatcttctttttcttgggataaacaatgtaactaatgccagcttttttagacgcttcaatgagagtcaaagagagatttctcaaactgtgtttttcgcacatgttatcaaagatgtcatctatactttctttcacatagttgggctcctcagttttattttgcttagtgagctggagctgacgtttcaattcctttgctttctgaaacataacctcttttatactgctttgcatatcattcttgatttccaaaggagctatgatcttctccttcctcaagtctacagaagattttactcgttcctctcccaagacttccaagtgtggtttgtgagcacgctctctagttccttgtgccaattcaggtggtatcccttgcggtgtcggaggaatatggacatattcttggttgtcatccataacaggaattccatacaatattctatctgtttgttcttcatctgtaaagcgatcatctaagaaagaggttccaaattttccaagcagggtatcgtggcctttcctgttagcagtgtgatacactcgagaagccaggcgcaagtcaacaggcagctcctgggctgggatggtggtgcacagatcatgaaggtgcggcatggagtagtcttgtggaatttttttatgtagttttttatcacaaagaggttttgaagactttcttggtctcagtgatttacgtttccgcattcgcttaatttcttttccttcgatttgcaagaattctggtgattttgccgttaaagacacccacttggcttcttttgaatcacttgtgggctgtccatcttccaaaggtttacttaattcctctgctggctgaacttgcgaaatttcctgaggtttaaatactatgctttctgcttctgagggtccccattctatatcctcttgttcaatctggagaatacttgacatggtttcagaaagttccttatgcacgctcatttgcgattcctcagcacccatctggaatttatactctgcttgtatctcaggtgtttctgcttgcataggtgatgttttgaggtacatttttcccattaaagaaatatctaaattgaagagacagaaatcagatgagaggaggacaaaggggctagaatttgtaaggaacagtgtggagatgagggcactgcatagagaaagagctccagaaatcggcatagggtccttgaggctttggctgaaagtctgcccatgcaatggagaaacccatgaggctagacaaagaaaccatagaccactgagggcccatggcctcaggtaaaaggcactaccgcagagcataaagttacagacaagagcctctttccggctttcgggcttcaaaaatctagacttgacagtatttgacacagttattgcatccttcttgaaatgttttttcacttggtttccaccaaacacattctcctggtttttctcttctaccaggctcccctcagcttctttcat

SEQ ID NO: 125060 - DNA, 851 bp, Homo sapiens
tttatttctcaaaactatgtttaagttttaattccataattacctgttcatgtcaaaagactaaaatcagcgtcttccacagccctttctccctacaactcctccaccaccagctacaagagccacataagatgaagaaaaaagtccatacccgggcccaggcagtgataagaagtgcccaactctccaactaccttcccctcccactccctctgcaggtggctttccacccttgggtgaatctgggtcacctggagggcttgttaaagcacagattatggaggggatcagtatgtagcaatagctgctgactttaactatatttgcatttaccaaataccactgaactgactccttgggcccccaacttactcctgcttcttctgatcacttgtatgctcccaactcttccctaacctcactccacaacctcctctgccaatgtccttcagccctgtttctgttcactgggtaccacttgcattttggatagggcagttctctgtgcggagctgtcccacacactgtaggatgtgaagtacctctgatactctcattcccccaggatgctacagagcccacaggaagaacttctactctagcagctctaaagccacctgcccaccagggtttgactaaaggtccccccccctgagtatgatctcaatctggtcagcttgcttcagtctcttcctctggaaaatgggaataaatactaataattaccctgccatgtgtcagtgatgatccaatgaattaaagatcctaaagtggccagttatactctcattcgtgttattagagtaacttaggaattaatacccactctattctacatgatcacatcctga

SEQ ID NO: 125061 - DNA, 6933 bp, Homo sapiens
accgccaccttccagaggtgtgtgcacgttgcagagggtcgcacacaaggggctgcctgtagcctgtccccatcatggcccatctggctcttgctccaggcagaaggcctgaaaaggtgcactaagaacacagaaccaggtaagcccatcctgacagtgactgagcgccttgcactgcccatgctggggaatgtcctgctgctctgcttctttgtcttcttcatctttggcatcataggtgtgcagctctgggcgggcctgctgcgtaaccgctgcttcctggaggagaacttcaccatgtgagttcatcccctgccacccatgcagctccggccggaggaggatgatgagatgcccttcatctgctccctgtcgggcgacaatgggataatgggctgccatgagatccccccgctcaaggagcagggccgtgagtgctgcctgtccaaggacgacgtctacgactttggggcggggcgccaggacctcaatgccagcggcctctgtgtcaactggaaccgttactacaatgtgtgccgcacgggcagcgccaacccccacaagggtgccatcaactttgacaacatcggttatgcttggattgtcatcttccaggtgaggccattcaggcctggggccagcctggtctactacgtgatggatgctcactccttctacaacttcatctacttcatcctgcttatcatagtaagtgtcagggagcctgggctcctaggtgtgagcttcagcacagcacagtccccaaaatgtcaaggtgattcattcccaggagtcgctgctgaatccctgctgctgcgaggttgggttctctggcttcctggtggtgggagagaggtgaggggtccttggccttcaagcccaggccctgttgtcatagcgacccagttctcggagaccaagcaacgggagcaccggctgatgctggagcagcggcagcgctacctgtcctccagcacggtggccagctacgccgagcctggcgactgctacgaggagatcttccagtatgtctgccacatcctgcgcaaggccaagcgccgcgccctgggcctctaccaggccctgcagagccggcgccaggccctgggcccggaggccccggcccccgccaaacctgggccccacgccaaggagccccggcactaccgtaagtggccctgcatccgacgcggcactcaggcgccccacaccctggtgcagcccatccccgccacgctggcttccgatcccgccagctgcccttgctgccagcatgaggacggccggcggccctcgggcctgggcagcaccgactcgggccaggagggctcgggctccgggagctccgctggtggcgaggacgaggcggatggggacggggcccggagcagcgaggacggagcctcctcagaactggggaaggaggaggaggaggaggagcaggcggatggggcggtctggctgtgcggggatgtgtggcgggagacgcgagccaagctgcgcggcatcgtggacagcaagtacttcaaccggggcatcatgatggccatcctggtcaacaccgtcagcatgggcatcgagcaccacgagcaggccagtgcagcgcagccgggccgggcctgcgggagaggtgtgagggccccaggaccctgcccaggcctggatgacacatttgtgctgaactggggcctcatcagaaaaggggggcaggtgaaggcacctgggccatggaggtggggatgtaatgtggtcttcaccagcatgtttgccctggagatgatcctgaagctggctgcatttgggctcttcgactacctgcgtaacccctacaacatcttcgacagcatcattgtcatcatcaggtacccctcccccaacccacccggcagcagagtgctgtcggtgctgcggaccttccggctgctgcgcgtgctgaaactggtgcgcttcatgcctgccctgcggcgccagctcgtggtgctcatgaagaccatggacaacgtggccaccttctgcatgctgctcatgctcttcatcttcatcttcaggtgagcctgccctgctgggggccatacctcagccagcctccgcacggacactggagacacggtgcccgacaggaagaacttcgactccctgctgtgggccatcgtcactgtgttccaggtgagtggccgctgcgtgttcatgtttgctgggtacaatggcatggcctccacttctccctgggcctccctctactttgtcgccctcatgaccttcggcaactatgtgctcttcaacctgctggtggccatcctggtggagggcttccaggcggaggtgactgtggtcttggcagaggaagcacccccacagggtctgcgaaagactgggcgagggagaggtggcctggatgggggagggctgcaattcaaacttctagcaggcaacctatccctaaaggagggggttgctgatgaggtggtgagctcttcatcataggaagcatgcaaatggcagagctcatccaacatagaagagtttgataagctccaggaaggcctggacagcagcggaggtaaacaggccctcgcttgtcacctagagagccatgggcacctggaccccagtctcccactgggtgggcacctaggtcctgctggggctgcgggacctgccccccgactctcactgcagccggaccccatgctggtggccctgggctcccgaaagagcagtgtcatgtctctagggaggatgagctatgaccagcgctccctggtgagtccttgtggggagctctggacgggcgctgctgcctttgggcacctggtgccccagccgtgggtgtgcctgtggggcgctgacccgaacgggaactccttccagtccagctcccggagctcctactacgggccatggggccgcagcgcggcctgggccagccgtcgctccagctggaacagcctcaagcacaagccgccgtcggcggagcatgagtccctgctctctgcggagcgcggcggcggcgcccgggtctgcgaggttgccgcggacgaggggccgccgcgggccgcacccctgcacaccccacacgcccaccacattcatcacgggccccatctggcgcaccgccaccgccaccaccgccggacgctgtccctcgacaacagggactcggtggacctggccgagctggtgcccgcggtgggcgcccacccccgggccgcctggagggcggcaggcccggcccccgggcatgaggactgcaatggcaggatgcccagcatcgccaaagacgtcttcaccaagatgggcgaccgcggggatcgcggggaggatgaggaggaaatcgactacgtgagtgggggcggggccgaaggggacctggtgcggtgggataggacagaagtgggtgcggccgtctataagcccgactggtgcgaggtccgcgaagactggtctgtctacctcttctctcccgagaacaggtgggcagggccaggcctggggtgagggttagaccagggaaaggtgggtgacctcgtggtgtgggtgtatggtcagaggaggcagcgccaggtgggcaccctgagcaggtgtagagtcggcacccccaccctgcccaggttccgggtcctgtgtcagaccattattgcccacaaactcttcgactacgtcgtcctggccttcatctttctcaactgcatcaccatcgccctggagcggcctcagatcgaggccggcagcaccgtgagtggctgtagcctttgggcagggcaggcgttcacggccatcttcgtgggcgagatgacattgaaggtagctcccggtttcacccgggacccctgctaggcgtacctacgcagcagctggaacgtgctggatggctttcttgtcttcgtgtccatcatcgacatcgtggtgtccctggcctcagccgggggagccaagatcttgggggtcctccgagtcttgcggctcctgcgcaccctacgccccctgcggtgaggacccctcctgggcggatgggggaaagtggtggagacactcatctcctccctcaagcccatcggcaacatcgtgctcatctgctgtgccttcttcatcatctttggcatcctgggagtgcaggtgaggggtgcccagtctgggcagggactgggcgtggacacccgcaacatcaccaaccgctcggactgcatggccgccaactaccgctgggtccatcacaaatacaacttcgacaacctgggccaggtgagcaccaccgtcctagccctgatcagacccgatggttgggtgaacatcatgtacaatggactggatgctgttgctgtggaccagcaggtgggtgtagctgggaccaggccaagccttgattacttcatctccttcctgctcatcgtcagcttctttgtgctcaacatgtttgtgggtgtcgtggtggagaacttccacaagtgccggcagcaccaggaggctgaagaggcacggcggcgtgaggagaagcggctgcggcgcctggagaagaagcgccggagtgagtgggtgcctgtggagggcgtgggccaccgtcacacccggctgctcatccactccatgtgcaccagccactacctggacatcttcatcaccttcatcatctgcctcaacgtggtcaccatgtccctggagcactacaatcagcccacggtgagccctggtctgcctcccagcccaaggttaatgttcaccactgtctttgtgctggaggctgtgctgaagctggtggcatttggtctgaggcgcttcttcaaggaccggtgagtggccaggctggattagggcagtaataggtcagtcatgggcatcaccctggaggagatcgagatcaatgcggccctgcccatcaatcccaccatcatccgcatcatgagggttctgcgcattgcccgaggtgaggggcaaggggtgggacagggaacggggagggccctgctggacacggtggtgcaagctttgccccaggtaagagccactctttctggcagccctcctaggttcttcatctatgctgctctcggggtggagctctttgggaagctgggtgagtgactcccagagcaggcccgtggtgggggccggcatgccaccttcgagaacttcggcatggccttcctcacactcttccaggtctccacgggtgacaactggaacgggatcatgaaggtactcctgggcgggctggggtggagaaatcagagctgcctgagcagcctgcagtttgtgtcgccgctgtacttcgtgagcttcgtgctcaccgcgcagttcgtgctcatcaacgtggtggtggctgtgctcatgaagcacctggacgacagcaacaaggaggcgcaggaggacgccgagatggatgccgagctcgagctggagatggcccatggcctgggccctggcccgaggctgcctaccggctccccgggcgcccctggccgagggccgggaggggcgggcggcgggggcgacaccgagggcggcttgtgccggcgctgctactcgcctgcccaggtgggcaggggctggagaggtgtgagggtcgccatcaaggactccttggagggggagctgaccatcatcgacaacctgtcgggctccatcttccaccactactcctcgcctgccggctgcaagaagtgtcaccacgacaagcaagaggtaatggcagcccgggaggcctggccccttgtgcaggtctgcccatcccaaacctgggtgacccgaggccaccccctcttcctgcaggtgcagctggctgagacggaggccttctccctgaactcagacaggtcctcgtccatcctgctgggtgacgacctgagtctcgaggaccccacagcctgcccacctggccgcaaagacagcaaggtcagctcccctggggactcctgagcaggcgggggagacctgggcgaatgcttcttccccttgtcctctacggccgtctcgccggatccagagaacttcctgtgtgagatggaggagatcccattcaaccctgtccggtcctggctgaaacatgacagcagtcaaggtgaggggtgggagccctgccagctccccacagccagccctctcctgcccatgccagccgagttcttccaccctgcagtgtctgccagccagaaaggcccagaaaagggcactggcactggaaccctccccaagattgcgctgcagggctcctgggcatctctgcggtcaccaagggtcaactgtaccctcctccggcaggtaccgacacctcccaggccctagagcactggtcccagcagctccgcgggcagcctgcagaccacgctcgaggacagcctgaccctgagcgacagcccccggcgtgccctggggccgcccgcgcctgctccaggaccccgggccggcctgtcccccgccgctcgccgccgcctgagcctgcgcggccggggcctcttcagcctgcgggggctgcgggcgcatcagcgcagccacagcagcgggggctccaccagcccgggctgcacccaccacgactccatggacccctcggacgaggagggccgcggtggcgcgggcggcgggggcgcgggcagcgagcactcggagaccctcagcagcctctcgctcacctccctcttctgcccgccgcccccgccgccagcccccggcctcacgcccgccaggaagttcagcagcaccagcagcctggccgcccccggccgcccccacgccgccgccctggcccacggcctggcccggagcccctcgtgggccgcggaccgcagcaaggacccccccggccgggcaccgctgcccatgggcctgggccccttggcgcccccgccgcaaccgctccccggagagctggagccgggagacgccgccagcaagaggaagagatgagggtcgcaggggcccccggccgcccaccgcccg

SEQ ID NO: 125062 - DNA, 405 bp, Homo sapiens
tcctcttctggtttaggaacaatctgttccttttccgtaaggatcatctcaatgtggcagggagagctcatgtatgggttaatccgaccatgagctctgtaggtccggcggcgcatcttaggtgctttgttaattcagcactctttttgggccaccgaccttgtgtccagccccattgcttggcctgcgcacacctgccaactccaccattgtaacgtcggaatggtacacactgtttctgtaaagtgacatctttcagatacttcgtggcttttcgtatatgcatacccttgatggcctgagcagtttcacgagtgttcttaaagtgaacacgaagattggaacctcttgatttgcatgatttcgtggggttctccgggtcaagtgaatagcgaaccattttca

SEQ ID NO: 125063 - DNA, 372 bp, Homo sapiens
ttactcccatgccataagtttttgtttcatcagtttcttctgggatatctttttcttctgggcaacttcttcttctggtttaggagcaatctgttccttttcagtaaggctcatctcaatgtggcagggagagctcatgtatgggttaatccgactatgagctctgtaggtctggcagcacatcttagatgctttattcatttggatatgctcaatggccagagagtctacatctaaacccttaagttcaccattactgtccttgatggcctgggcagtttcacgagtgttcttaaggtgaatacaaagattggaacctcttgatttgcatgattttgtggggttctcccggtcaagtgtatagggcaccat

SEQ ID NO: 125064 - DNA, 530 bp, Homo sapiens
attctctggtcattgagcatatccaagtgaacaaagcacctaagatgcgccgccggacctacagagctcatggtcggattaacccatacatgagctctccctgccacattgagatgatccttacggaaaaggaacagattgttcctaaaccagaagaggaggttgcccagaagaaaaagttgaggagctcaagctttgggaaaaatgcgtgcattccttgtatcgtcattccagttctgctctggatctacaaaaaattcctggagccatatatataccctctggtttcccccttcgttagtcgtatatggcctaagaaagcaatacaagaatccaatgatacaaacaaaggcaaagtaaactttaagggtgcagacatgaatggattaccaatcaaaggaccaacagaaatctgtgataaaaagaaagactaaagaaattttcctaaaggaccccatcatttaaaaaatggacctgataatatgaagcatcttccttggaattgtctctgacctttctatctgagaccg

SEQ ID NO: 125065 - DNA, 342 bp, Homo sapiens
ggctcgagagtgaacatagcacctaagatgcgccgccggacctacagagctcatggtcggattaacccatacatgagctctccctgccacattgagatgatccttactgaaaaggaacagattgttcctaaaccaaaaaaagagggtgcccacactaaaaaggtaaataaatagttgctcggttttgtttgtgatagaaaaaagatttgtgggtgctgggaggactatcttaggacacctttggaataactatcaaagaaaactattctgagcaaccctttctacctgccttattttggcttttggaagactggttcttgactaataataaatggtaagttt

SEQ ID NO: 125066 - DNA, 879 bp, Homo sapiens; identical to SEQ ID NO: 121318

SEQ ID NO: 125067 - DNA, 744 bp, Homo sapiens
tttttttttttttttttccttttaattacatttattttaatgctgaatttactcccgtgccataagtttttgtttcttcagtttcttctgggatatctggggaaagaaaaatgtgttgttaagtttcttagagaaaaccacagtacatcttggaggacttcagcttattctggaggcaggaaacctagtcgttaaggactaagggggaaaaatacttaaatggtagaaatcaacagaacttaagttcattagatgtaaaaagaagtgtacagaatcactcaggttcttgacttaaaagaactaaatgtgatcaattactgaaaacaagcttcttagatttggggagagggcccattttgaagtggctatgtacatctaagtggggccatcagcagataatcatacgggcctgaggtactgaatataaaactaccagttttttttttttttttgagacagcgtctcggctctgtcacccaggctgggaatgcagtggcgcgatctcggctcactcctagttcctcctcccgggttcatgccattctcctgcctcagcgtcctgagtagctgtgactacagatacccgcgaacacgcccagcttatttttttttgacattttagtagagacgggtttcacgtggtagccagatggctcgatctcctgacctgtgatctaccactcagcctccaagtgctgggatacagaaactacattattatagtcagacaacttccaagccgat

SEQ ID NO: 125068 - DNA, 974 bp, Homo sapiens
cattgcttccaagccatttaatttgggtacccccaggtttttcccctccccccgtttttaaaacccggcccccgaattttattttgggggccctataaaaaaaattttaccttgcaagcccgcgtaagtaaactttgatcctttaaaacggcccccccaggattttttttttccttttaattacatttaattttaatgctgaaatttactcccggtgccataaagttggtgtttctttcagtttcttctggggatatcttttttctttctgggcaaacctccctcttcctggtttaggaacgaatcgtgttccgttttccgtaaggagtcatctcaatcgtggcagggaagagctcatgtatggggttaatccgacccatggagctctggtaggtcccggcgggcgcatctttaggtgcttgggttcacttgggatatgctccaatgaccaggagaatcttacatctaaaccccttaaggttcaggcattactctctttgcgtttttaaggcatgtggcaggcaaaaatttcaggcactctttttgggggccacccgacccttggtggtcccaggccccattggcttgggcctgcggcacacctggcccaactgtcacccattgtaacggtcgggaatggggacacactggtttctggtaaggtggacatctttcaggatacttcgtggggctttttcgtatatggcataccctttgatgggcctgaggcagttttcacgagtggtccttaaagggaacacgaagattggaacctctttgattttgcatgatttcataggagttctccggggtcaagtgaatagcgaaccatttttcacagatcaccctagaggaaagtacagtgtaattctgtcaatacgtacttacagtaactcattcagtataaatatcagatgattcgaacagcttgcttcagaagagagtgtggttcattattaatccaaaggtgtcct

SEQ ID NO: 125069 - DNA, 960 bp, Homo sapiens
ctaggtccataccacggaggccacgtgcaccaccactggagccaaaccctgtccatggccgtcaaaactcgccaccaggcaagaccacagtgtgttatccaccagcaatccccgaggtccaacgccacacaagtcaggcagccctgagacagcaggagccctgtcctctggggatgctggttccagaggagaaggcccgaggacagtctcttcagagaggagctcaccagggaaaggcggttccactctgctcgggactactgcttgagggccgggcccagcacacttcgcctctgcggtcttggggccctcttccaagtctttacaagcagcgtcttgagaggtagacagtttcccttcttcacttttaaagaccgcagtctctgtcttggcatctacagtaaggctgagcgtttccttcatgcctccattcatcactgtctcagttacctcgtctgtaatttctgcatcctcctctccatccgagctggcttccatggccacattgcctggtgcttctggctgagctgccagggcagttaattttgagttggatgaggaatgatcattttcctttattttctcagtggatgaggaatgatcattttcctttattttctcagttaccctggagctgtacaagtcacacacagctccattggagagaaaactggatggaaccatttgactgaaaatccatgtcaaaaggccaacaagaaagagctgagacacccttttagtgcctaaaatcttagatttgtgctttctaccttgaagaagcacaaaaagcacttgtcgaaacactggttgaatgaatctgttactgcctttaatattctttctttcattttggccttggaaaatgggatgattacgtgtcttggggatgatcttcttgtgtagaatcttgcaggagttctctgtatttgaccgttggcctctttctcctccttctgccat

SEQ ID NO: 125070 - DNA, 549 bp, Homo sapiens
atgttcgctggagtgctgtcagctggtaatgatgaatttagagtgatgctaaatatgctggcctgtacaactttctccagcaaagctgagctatttgagtacagacatggagaagcctcagcctatacccccaactgcccaagaaagtatgcccaaccagtaccaccaggagtgggactgcccctaaagtcaaactgtgtccattgtgggagaattacccatcccaagaaagcgttgcgagatcggcatctgggatgcccagaaaagatccctcgactcactggtccctgggccacgatcagtgtgcctactataagcaaaaaggccactggcaatcacagcatcctaaccatccccgggccagataccaaattaatgcagaatagtggaaagtccacttttaaacgaacacagatagaccatctcatgaatgtccttgtactctggtggtccacagaacgttggaccaactacggcataaaagctctacatcggggggcaagactcatggttgacactggggtctttatcaaaatctccctggattaa

SEQ ID NO: 125071 - DNA, 477 bp, Homo sapiens
ttaatccagggagatttcaataaagaccccagtgacaaccaggagtcttgccccccgatgtagagcttttatgccatagtcagtccaacgttctgtggaccacctctgagaccatccttgaacatcagtagactgggagctgtacttggacgggagcagcttcgccaacccttgcaaagtgactctgaagacgacgacaagccctgcttcagtcacaccggaagctgactggtccatgcacagccaaagcatgaggaactcattgcgggactcattttccttaaaatttggactgatcattatccatgactttctcacacccacattcaatccattagaaaatccttgtggctttctgacacgattttgctgtgtccccaaccaaatctcatcttgaattgtatctcctttaattcccatgtattgtgagagggacctggtgggagataactgagccatgggggcggttttccccat

SEQ ID NO: 125072 - DNA, 915 bp, Homo sapiens
ccccctaccaacccaaagctaagaaagatttaactttttcatctattctattactcttctttctttcctcgtgctattgctgaccatctagttattaacataaccaagtcaatttcacctcaaactattgcatttaatgcttgccttgttataccctgtggggacttgccaagtcaaagacagctctctacttcagaaaagtacttctgtccctcctgactctcctcagactggacattagtaaactaggaccatttaatccagggagatttcgataaagaccccagtgccaaccaggagtcttgccccccgatgtagaactttcatgccatagttggtccaacgttctgtggaccactgcagccaaaacgccaattttctgctcctactgagaggtgaagccagctggacttcctgggttgagtggggacttggagaacttttctgtcttacaagaggattgtaaaatgcaccaatcagcactctgtagctaggactgtaaaacacaccaatcagtgctctgtaaaacgcaccaatcagcagaatcctccccgtctgtatgcagccaccatgcagcccacctaggctgtgggctctgttgatgccgccttggagtgtgcggcttgctctgggtgggccttccaggggaggagggaagttggaactggcaatcgagccgtagagagagagcaaatgggaagcagcttgtgttccccaggcctggactagcatgcccttcctggcatccatttttcctgctgggccccaagggacctggccctgtgcgtcagttctgtggctgctagaccttgggctctgtggtcgggtctttggacatgacatctgcacgggctgggggctgaggctgctggccagggcgagccagggcaggccaccaggctgcagaacccacat

SEQ ID NO: 125073 - DNA, 1404 bp, Homo sapiens
cggacgcgtgggcggacgcgtgggcgcagccgcctccagggcaatttgcatatttctccaaagaaccatccagaacctgagcagcctgtcttcagacagagagaggcccacggctgtttcttgaaatctggcgctgggaatggccatgtggaaccaggccatgccagaggctgcctcagcagcctctggtagctgagcccactgcagagggggagccacacctgcccacgggccgggagctgactgaggccaaccgcttcgcctatgctgccctctgtggcatctccctgtcccagttatttcctgaacccgaacacagctccttctgcacagagttcatggcaggcctggtgaagtggctggagttgtctgaagctgtcttgccaaccatgactgcttttgcgagcggcctgggaggtgaaggaacagatgtgtctgttcaaactttactgaaggaccccatcttgaaggatgacccgacggtgatcactcaggaccttctgagcttctcactcaaggatgggcactatgacgcccgggccagagtcctcgtttgccacatgacctccctgctccaagtgcccttggaggagctggatgtccttgaagagatgttcctggagagcctgaaggaaatcaaagaagaggaatctgaaatggccgaggcatcccgaaagaagaaagaaaaccggaggaaatggaagcgttatctcctgataggcctggcgactgtcggaggcggaacggtgatcggtgtgactggaggtctagctgcaccccttgttgccgctggagcagcgacgattattggcagcgccggggcagcggctctgggctcagcagccggcatagccatcatgacctcgctgtttggtgcagctggagctggcctgacaggatacaagatgaagaagcgagtgggagccattgaagagttcacgtttctgcctctgacggagggcaggcagctgcacatcaccatcgccgtcacggggtggctcgcttctggcaaataccgcaccttcagtgccccgtgggctgccctggcccacagccgtgagcagtactgcctggcctgggaagccaagtacctgatggagctcggcaatgccctggagaccatcctcagtggtctcgccaacatggtggcccaggaggccctaaagtacacagtgttgtctggcattgtggctgccctgacctggccagcctcactcctcagtgtcgccaatgtcatcgacaacccctggggggtgtgtctccatcgatcagcagaggttggcaagcacctggcccacatcctgctctcccggcagcaggggcgacgacctgtcaccttgattggcttcagcctgggagccagagtcatctacttctgtctgcaggagatggctcaagagaaag

SEQ ID NO: 125074 - DNA, 1693 bp, Homo sapiens
catgccagaggctgcctcagcagcctctggtagctgagcccactgcagagggggagccacacctgcccacgggccgggagctgactgaggccaaccgcttcgcctatgctgccctctgtggcatctccctgtcccagttatttcctgaacccgaacacaggtgagttcttctgtcttgccccctggggactcctgtaggactgcactcagatgcccactatggacagagactggcggtggcagtgcacgtggagggcactcttcccttcacttcttccacatttgcagcagccagcgttttccagaaagcacgtccttggcagcatccaggagagcagatggccttctctgggaagccttttctggtggctgccgtcacttctgcaggtggatccggggctccctctgtgggctgcactgaactgatctccacctctgtcctagggtaccacacggctctagagatggcaggcctggtgcagtggctggagttgtctgaagctgtcttgccaaccatgactgcttttgcgagcggcctgggaggtgaaggagcagatgtgtttgttcaaattttactgaaggaccccatcttgaaggacgacccgacggtgatcactcaggtacacccaacacctggtgtcaaggatggtaagttgattttctaagccagagtcctcgtttgccacatgacctccctgctccaagtgcccttggaggagctggatgtccttgaagagatgttcctggagagcctgaaggaaatcaaagaagaggaatctgagtaagagagccccgcgaccaaaacagaaggtggtggtgaggataaggacagaaaacaccctcttatgggagataagatgacagagagtaagaccgatttatggatctatgagatgggcaatgcgggcgtcttgctcttcaggaggtatctctggcttcagcctaagaagaaagaaaaccggaggaaatggaagcgttatctcctgataggcctggcgactgtcggaggcggaacggtgatcggtgagtccagctagagatgtgcaccccttgttgccgctggagcagcgacgattattggcagcgccggggcagcggctctgggctcagcagccggcatagccatcatgacctcgctgtttggtgcagctggagctggcctgacaggtaaggttcaaaaggaatgagtgggagccattgaagagttcacgtttctgcctctgacggagggcaggcagctgcacatcaccatcgccgtcacggggtggctcgcttctggcaaataccgtgaggaccaggaggaccaggctgccctggcccacagccgtgagcagtactgcctggcctgggaagccaagtacctgatggagctcggcaatgccctggagaccatcctcagtggtctcgccaacatggtggcccaggaggccctaaagtacacagtgttgtctggtaagtgcccccacctgccctggccagcctcactcctcagtgtcgccaatgtcatcgacaacccctggggggtgtgtctccatcgatcagcagaggttggcaagcacctggcccacatcctgctctcccggcagcaggtacctgggaatggctgtgtgattggcttcagcctgggagccagagtcatctacttctgtctgcaggagatggctcaagagaaaggtgagcatggattattgtc

SEQ ID NO: 125075 - DNA, 324 bp, Homo sapiens
tcactgtgaacttgtcagtgctgcagcaaatccatcaatatgcaagtagcatatcgcgatatgcaagcataacatgctttcacttccaccattactgtcaggcaccagttcatttggtctcccttgctgctgatttttggtgtccatttgcatgaaatgccttattccacccctcactttaagtttatgtgagtccttatgtgttaggtgagtctcttgaaggcagcagataattggttggtgaattcttatccattctgcaattctgtatcttctgaattctttttcaggtgaatcagggatttcttcttgttttggatccat

SEQ ID NO: 125076 - DNA, 1980 bp, Homo sapiens
ttacattgttttttctagttcagtgaagaatgatggttgtgtttttatcggaattgcaatgtgtttccatttgtttgtgtcatctctgatttctttcagcagtgtttcattgttttccttgtagaggcctttcacctccttagttaggtatactcctaagtattttttttcagctattgtgaaagcagtagaattcttgatttgattctcagcttggttgctgttcatgtataggaaggctactgatttgtgtgcattacttttatatcctagaactttgctgaatttattgaccaggtctaggagctttttagatgagtctttagggtcttctaggtatatgatcatgtcacaaagaaacaatgacagtttgacttcctctttaccaatttggatgctcttgatttctttctcttgtctcattgctctggctaggacttccagtactatgttgaatagaggtggtgagagtgggcatccttgtcttattccagttctcaggggaaatactttcaacttttccccattcagcataatgctggctgtgggtttgtcataaatggcttttattaccttaaggtatttcacttgtacaccaattttgctgaggattttaatcacaaagcgatgctggattttgtcaaatgctttttctgttgctattgagatgataacgtgatttttgttcttaattctctttatgtggtgtatcacatttattggcttgtgtatgttaaaccatccctgcatccctggtatgaaatccacttgatcatggtggattatctttttgatttgcttaagtttatgtgagtccttatgtgtcaggtgagtctcttgaagacagcaaatagttggttggtgaattcttatccgttctgacattctgtacctagcctcgggagcctttgtcctggggcagatggtcagcgcgggcacgacaggaggggccctctggaccactccccgaggacccaggactctcctagagacagggccttggatcctgggacagagggaagcagaggccttgcgagttggcggtagggcgtccgtgacctccaccccctgagccggagctccagtgcggcaggacccggcccgggctgccccagctgcgcctcgcttccggctacaagtttgccccgtgcccgccaaattggtgagtctggaagcttctcttgggctccaggaagagggtccctgcttctgcttcggctgttccccacacggccaagtcgggggcgtcacccccagtctgtaggtgtcgctggatcttgcgccccctgcaacacctgtttcccagagcgtctggcgaggactctgcgttagcgaagcggcgcgcacacgaacacacacgcccattatacatgtcacttgccttaagtggttaggttggctctgttttgtgaaatatcgggggcgaatttcacccgatatctggctgaatttcccctgatagttcctaaatgtaacttctagtctcatcacatattctggcagttcatttcctggatgagtaaaatagccaagctcacactccccttgttcatcacctttatttctttccatacatattttcccgtgtgaatctttaattactagtttgaagtcttgaagggaaactaaagcagatatctgagctctttgtatcatgtcagaagggcattctcgtacttcccatccacaatctatctggttgggctgccctgggctacaagtacgtggatttaacatctttttagcttctttgtaggtttttgtgcgaacatatgttttttgagcagttgggtaaagacctaggagagcaactgctggattgtatggtgaaactgggtttaggtttgtaagaaacttccaattgtcttctaaagtggctgtatcaccttgtatcccacccccagcaattactgatggttgttgtacctccatattctcactagcaattggtgttttcttttttgcttgttttatagccat

SEQ ID NO: 125077 - DNA, 730 bp, Homo sapiens
aatggaatagtgcctcacctcgcaatactaacattgaatgtaaatgtcctaaatgctccacttaaaagatacagaattgcagaatgggtaagaatccaccagccaactatctgctgccttcaagagactcccctaacacataaggactcacataaacttaagttaaaggggtggaataaggcatttcatgcaaatggacaccaaaagctactatgaacacctttatgcacataaactagaaaacctagaagagatggataaattcctggaaaaatacaaacctcctagcttaaatcaggaagaattagataccctgaacagaccaataacaaggagcaagattgaaatgataagtgatgaagagaagactcttcgagaacaggagattgttgcctcatcaccaagtttaagtggacttaagttggggttcgagtccatttataagatcccttttgctgatgctctggatttgtttcgaggaaggaaagtctatttggaagatggctttgcttacgtaccacttaaggacattgtggcaatcatcctgaatgaatttagagccaaactgtccaaggctttggcaggccgagcctggttgagagaaggtccagagaacactttttcttatgtaggagagtggtgggagtccctgcctgggagcatgtcccgccagctgtggaaaggagcaggagagaagcgaaggagttcatttagggctgtggcgaagtag

SEQ ID NO: 125078 - DNA, 1281 bp, Homo sapiens
tcaaagggcttgccgtatgctgagaaacaccttcagaacgaagtgtccatcctgtctttttagcagcatctgctcagaaggtggggcagaagtggcctgcttttgaatgaccgttgagtcagcaatgaaatcaagatggaaattaacaaattcattgaactgaacaataatagtgacacaatctatcaaaccctctgggatacagcaaacacagtgcttaagtttatgtgagtccttatgtgtcaggtgagtctcttgaagacagcagatacttgactggtgaattcttatccattctgcaattaaaagagtttttcctttttccttggccttgccaggtgtccagttcaggagtacgtgtgtgcgctggagaaggaagcgcccatttaaatcatttaaaaggtatttattgaacataactttccgccctatccccaccatggtctttttaattactggagggtaccgagcacgaattcgtaagcatgtctttgtattttgggagtagataacttgtttctcgaatttcccaggttcactgttatcccatgccgatctcacctttgtattttgggagtagataacttgtttcttgaatttcccaggttcacagatgaagaagaattgtgcctgaggatggataacttccagagccttggatgatgcaatttggcacttttgagctaatctgccagctggattcaggctccccagaggttgcatcctgggcaaagctgacccatagcagccaaaaaaggacagcagctgctcattaaaatggagctgcatgttttgggtgccccgtactgggggagaattgaggacatttgagctcttctgccgggggtctttgtaccaggccaggacagccccttttgggcccccaggtgcaactctgtggagctcagtgagtttgcgggtcagttccctcagactcagctcaagaagaaacagagctcgcttttctgagaggctcttaattaaatgataaaaatgtgttccttcacagtgactgccaactcctgtccacctctccctgggcttggttctggctccaggcagagcctggaggatgcagaatgacaggtcggctccaagggcaagcagcgtgcctccagagcaatgagattgcacaccctcattttgggaagatttatggctggctcccaggagattctgctggggaccagactcaacaccacctgtagggtacccaaagtccggtggctcagtgaggagcacggtgcaccttgaggggcagtggttagcaaaagctgccat

SEQ ID NO: 125079 - DNA, 651 bp, Homo sapiens
atggtggatgtcggaaagtggcccatcttcactctactctcccctcaagagatcgcgtctattcggaaggcgtgtgtcttcggcacctcagccagtgaagcactgtacgttactgacaatgatgaggtctttgtatttggactgaactatagtaactgtctaggaactggagataaccagagtacacttgtacccaaaaagctagaaggcttatgtggaaagaagattaaaagcctcagttacgggagtggaccacatgttcttctcagcaccgaagggaaagaatatggcaaagctgatgcaagatgggtttattttgatccaaccattgtgtctgtggaaattctgaccgtcgccctggatgggtctctggcattgttcctcatttatgccatagtcaaagaaaaatattaccgacaagtaaggtcatggaaatgtgagagtttggcattactataccaagtgtccaactccctgggtatcaagaggcagtcatggcgggagcagcaggtctgtggtctgagtagccccagtggtggcctcactggtagtgctgcccttgggggtggtccattctgtggtcatcccgtagtcacccccaagagcttagccaagcatctatatcctgtaacccggcagtttgactcctag

SEQ ID NO: 125080 - DNA, 861 bp, Homo sapiens
cggaagcctgaagcatgggcgctgagtgggagctgggggccgaggctggcggttcgctgctgctgtgcgccgcgctgctggcggcgggctgcgccctgggcctgcgcctgggccgcgggcagggggcggcggaccgcggggcgctcatctggctctgctacgacgcgctggtgcacttcgcgctgggaaagaatatggcaaagctgatgcaagatgggtttattttgatccaaccattgtgtctgtggaaattctggccgtcgccctagatgtgtctctggcattgttcctcatttatgccatagtcaaagaaaaatattaccggcatttcctgcagatcaccctgtgcgtgtgcgagctgtatggctgctggatgaccttcctcccagagtgggctcacccagaagcccccaaccttcaacaaccggcaactggctggctgtactggttgggctttaccctgttttttttttaacggtgtgtggggttcctgatccccaggaactggctactgtgggcagtccatgggcctagaacctcaagaaaatggcatcagaaaggaaaccagtttcagtggaaggaagttttcagtggaacttttcaaaacccataaacacccttattcttaactttcatggaaccagaatgaattcaaatctttttgtttggcccaaaatgtaatacattccagtctacactttgtttttgtattgttgctcctgaacaacctgtttcaaattggttttaaggcgaccagttttcgttgtattgttgttcaaataaatggggatatagggaaaagagaacaacattggaatttgtaataataaaatgtttaattataaaaacaaaaaaaaaaaa

SEQ ID NO: 125081 - DNA, 833 bp, Homo sapiens
ggcacgaggccgggcgggagtagctggtggaccccgttgagctgccgaacttccgggactcccccgcgaccccttcccagcttcccgtccgctccgccgcagcgattgtctcggtgggttgattcggcacaaaccgcccgacccaggggccggtgcgcgtgtggaaggggaagcactcccctcgtggtcgcctggaggtgcgctggaggagggggtgacataaccagggactcgaggtccgccgtgggaatgatccacgaacttgctcttggctctgagcgggtaccctgggtccattttcacctggaacaagcggagtggcctgcaggtatcgcaggacttccctttcctccaccccagtgagaccagtgtcctgaatcgactctgccggctcggcacagactatattcgcttcactgagttcattgaacagtacacgggccatgtgcaacagcaggatcaccatccatctcaacaagggccaaggtgggttacaatggaatctaactgcgggccttctgcaaaagggctggattctgttttgcagccttatcgccaagcactgcttgatttggaacaagagttcctgggtgatccccatctctccatatcacatgtcaactacttcctagaccagttccagcttctttttccctctgtgatggttgtagtagaacaaattaaaagtcaaaagattcatggttgtcaaatcctggaaacagtctacaaacacagctgtggggggttgcctcctgttccaagtgcactgggaaaaatcctgggcgtttgtcatggggtcatgtataaacagctctcaacctggatgcttcatg

SEQ ID NO: 125082 - DNA, 1427 bp, Homo sapiens
tcagggatcaggttcggagaggccagggcggagagcccgcccgaatccagtgcccccgacggcggttgggcgagggtccgggagctccaaaccgcctagggccgcctgctcgggatccccgttgctcaccttggcctcgggctgactctcctcgagatcccaaccggctttcatcgcctcagctgccccgaccagcttatttggggcctgcctgctttccctgaccttcctggggtgtctctcggtcccttccctctctggctccatggcgtccgcatcggttaccggattctcaacggttccccaacggcggaagtagaagtcgagcgacttccggcagctggacttggaaaagcaaggagtgtcgggaatggcgaccaagcggctcgcgcggtactcgagggagttccgggtcgggggcgggtagctccgggtccagcgctggcgttggccgcagagcagggcacggcaggtggcatctgcggtgagggcctctattccccgcagccccggcgtctgcgacctgccctctctggcacggttggaaaggcgcctccctggacctcggtcttcagccttgggccaccttctacccgagggtgacaggagcccgaggcggacgaaccctggggccttgactgtgtggccttgaaccaatgcctgcctattttaggccttgggaaacgactggacgtgacagtgccctgcagactggttggaggtctcaggcaggccacacactgaatctgtcaaggtgttcaacctgttcgaaatgctcgttcctcggtgctgtaaagaaatagaacttaaacttaaatttaatttatttagtaaggccatttttacttcctgcagaaagggtacactcgccagcagtttttgccaggagagtacactgaacaaaggagacagggtcatttataacgtggcgcgtccaccctactgctgtgtccagtttccactggcgtggaacgggacctcacattctgtatttgtcctgattggctagcaacttagatctttttaaaagaggcagaggcagaggagagcaaagtaagggggcactcacttgtggaacgctgagaaaggtaaaaacgccttcaaataaggaagaggaacaggctatgacttaatgcttgcttgggccagtataagcattgccagggcaaatatttaggctaaattgtgggagctaagaatgtaaagtgtaatgatttctttaccatggctagcagatatttaagaatgttagcacaggtctttgaataaattttgcttctaagagaagctactatttattcctaattaaatgaagaggaaagtctctgaagaggaacctctacttcactttttactgatgtctcaagtacagcaggtaaaaatctcatcagaacaaacaacaaaggcttctatgaaacaggctgatt

SEQ ID NO: 125083 - DNA, 462 bp, Homo sapiens
  misc_feature (1)...(462): n = a,t,c or g
nttgctcaagcaacagttggttctcttccnccagctgctcaagcgggctcaggtntgcattgtggatgcgactatctcactgtcctcttccgaagggcgtcatagtccttcttgaccacctccaacttgtccatggccgtgtcatacagtttgttgagaatctcggatgacccgttgtgcttcaacacctgctgctgctgggcacggaggtcaccgatctccttctggtcctcctcgtggagccgcttcatgtcctcccatgactgctgcagcaggtttcgctcccgcagcagctgcccattctcccgcctcagcatgtccacgtcatccttcagccgagtctggtcactcaggagccggctgtggagtgtgtggtagaagtcagtctccttggccacctccacacacctcttcaaggagttggtgtgctggttctgcaggctctgcaggtccgacacgaaa

SEQ ID NO: 125084 - DNA, 1506 bp, Homo sapiens
tcactgcactccagccgcaacgatcctgtctcccacagcaagggacccttctttagcggcagggcttccaggcagcacagcggcagcatacactccattctccagactgatgccactgtctttctgtccactgaggttgatgtgcagcggcgtgaccaccttcccacccagggacttcctccgccgcacgaccatgttgatggccccctccccattgaggagcgccttgatggcctgcttcttgtccttgttgatgaggtccacatcgttgattctcagcagccagtcattgacccttaagcggccatcagcaatgcttcctttgtccactttagtgacaaatatgccacagtcccccgggaaacaaggctcattcacaccttctgccatatcaaaccccagtgccttcaagtcaatatcctccgtctccctctcgaactctacaacttccgtttcccactccatggaatccgtgtcaatggccgagtcgtgggagctgtgggccatcagctgtcggaaccgggcctccttttccaactgggattccatctgttccttgagctccttcagctcgcggctgacatcattcttctgcttgcgggtgtcatccaggctgcgcagggcctcagccagctcgctcaccgcacggtcccgctcccgcctcaggttgtcacacagtgtccggatgctgtcacgctctgctacaatcttgtctcgctcctggaaggcccagtcccgccggcacttggccacatccgcctcctggagggcttccttcagctcctggcacagagccttgcactgctttcgaaggatttcaacctccttgttggctctcccagcatccattgtcaccgtgtctttgatctgccgcagcgcctccatctcctcattggccgccttcttctcagatgtgctgctcttgagcttggactcggccagctccacttcggtctgcagcttgtccagctcagagatgacctggtcacgctcactcatgatgagcttgtactcgctgtacacagcgtcccgctcctccctgtatttctccgactcctttgctgtcttcacctgcgtggttctcagctcggtcagctctgactgcagcagctccatctcccactgcaggtccttgttctgcgccgtggccttgttcagctcatggtggatcgcctcaaacctcctcagggagagggcgcactggtgctgcagctggatggccgtgtccctctgctgggtcagcatctctgtctgcttcagcaaccgctggttctcctcccccagctgctccaggcggctcaggtctgcattgtggatggcgactttctcactgtacctcttccgaagggcgtcatagtccttcttgaccacctccaacttgtccatggccgtgtcatacagtttgttgagaatctcggatgacccgttgtgcttcaacaccctaaagcttttgagagtcttgaggtccaattctccaggccctgcagtcacactgggctgattcat

SEQ ID NO: 125085 - DNA, 2865 bp, Homo sapiens
ttaatgaacacaggactgaggccagaaatgccgaagttctgcagaaaccgacagctcttggtcactaccaagcagcctgtaagaaccttcagacttgcgcacaaaagcaaagtaagactctcttttgtttaagtccctgttgtggagctcctggatccacagcaagccccatctggagagcccactggaaaatgagctcagccacttgccttcaaagagtggaatggagtcactggaaaaggcatccaaggcgagcaggtctttcccgtccttggacccgctgcgtttgtgcttgtgtttcctccgaaaaaaggaccggcgtgcagccgctgacagcgtctttgtggcgctattgtcatctttgacttcagacatgctgagcctcctggagaattcttggtccatcacatatttgctgggaatctgcccgcgctggatcttctgggcattctcgtccagctgccaagccatccaggacccgaacgtgccctggggtaaggtgtcatccacgtagaggatgtcgtccttcttaaagctcaactcttgctccacatctgccagccggtcgtacagggccctgatgtagaagctgtcaccaggcaggcccttggccttcgtgaactcctcagggcggtactgcaccttcaggcggacgccatccctgggcttcagcatctccacatagacttcctccactgtaatgttccgcacgtccaggctgccatactccaggatgaggtcccctggcacgaggccgtcaggacccttggcaggactgtcatcctccacctcggccacaaacaccccatgcaggttcccaccacacaagtgcaccccaagctccagctgggactttttgatgaagacaacgcgtggctccagggtcttcttgttggcatctcccgcaatcctggagctgctctgcttggctgggggggtgctaggcccctcgtcctgctccatcagtgggtcgatgacagatggatgctccggggtggtggtgccactgccctggagagtggagtgggtaccggcagggtccaggtgtgagctggaccgggagtggctgctgagctggtgcacgtgggggttgtactgggccaggatggtgatggtatcacactgctgcccgatgatgagccgcgcctgctgctccgtggcgctccgcaggtttatgccgttgaactggggaaacaccaggatgggctcagtgggggggtcggggctgtggacagggaggaggccctggggacttgggagcagtgctgttccctccagtaactgatccccatactcgaggccagcctggtgagcgatgctccccacggtcaccttggagacgtagatgccgcccttctctccactcacgatggagatgcccagcggctctgagcccttctgcaccttcacgtggcgtggctcctccacataaggcccaagtctggcaaccactggagaaggaggcagattgtccttttccttttggtgttcaggatcagatttcagaggtaagggatttggtttggactttgcttccaggccctgtatgcctgtgcttccaggagccagagagatgtccaggtaaacttcctggccacctccaggccctggccacactgctgagggagctgctgctttctgagtctgagggcatggtggacaggacgctgtaggtagaacctgctgctgctgggcacggaggtcaccgatctccttctggtcctcctcgtggagccgcttcatgtcctcccatgactgctgcagcaggtttcgctcccgcagcagctgcccattctcccgcctcagcatgtccacgtcatccttcagccgagtctggtcactcaggagccggctgtggagtgtgcccagggcatcaccagcctcaggtcccaacacttcccgtagatacagcggacaggagccaatggcaggtaggtctgtagcactcagaggcaagccaaaacctgctaacagcccaattccagaaacatccaaatcaccacttacaaactggtagaagtcagtctccttggccacctcctcacacctcttcaaggcgttggtgtgctggttctgcaggctctgcaggtccgacatggctcgcacgcactggatcttcagcctctcatagtcaggattcagcctgtggtagggcctcttgtcaaaggccgtgccatgcgtagcaaaggccaggcgcttgcggagctcgtttctctcccgggtcatcagccgcagctgaatggagaggttctccaccttctcattcacttgccggtcagtgaggaggggtggtggggacggcgccttcccggtagtgcagcagatgagtaacctccaggctcttgagcccctggcttgccattctttctcccgaacctggcccagtgccatgctaggcggggggcatgtgttggaaacctggctgacacgtgtgagtccgggagcgattgggcaccttcggtcattctgctgtggttcgtcaggctgtggttcctcagtgtgagcggcaatgaccagtagcctcattatcacattttcagagactctgaagaatctgaaggcgttgagcatgggctgaagagaatgactggggaatgggtaggtgtcttgtctctcaatacgactgtcagaagggattagatttgttcttgatggcctccagcagccaaaccaggagcagcgggtggatgctggagaaagctgcatctctaaacaggtctggatggccacggtcagcactgccaggtatgaaaagccattgtcatcatcgcctctgctgtcgtgcttctcttttgcatgtttggaaagcctcaagcgggaggaggaattcctcttgcaggttacacttgctttgtcatccgtcat

SEQ ID NO: 125086 - DNA, 642 bp, Homo sapiens; identical to SEQ ID NO: 120324

SEQ ID NO: 125087 - DNA, 461 bp, Homo sapiens
  misc_feature (1)...(461): n = a,t,c or g
tttttttttttttgagcatctcacgtatcacccagactgagtgcagtgcacaatccaggctcactcaacctccggcctccggngttcatttaatcaagctatgtttttaaaagcatattaacagcatttggaatgacctggatgagactggagactattattctaagtgaagtaactcagggatgaaaaaccaaacatcagatgttctcactgatatgtgggagctaagctatgaggatgcaagggcataagaataatacaatggactttggggacttggagggaagggtgagacgggaacaagggataaatgactacaaatagggtgcagtgtacactgctcgggtgatgggtgcaccaaaatctcacgcatcacaactaaggaacttactcatgtaaccaaataccatctgttccccccaaaaatctatggaaataaaaaaaataataaaaataaaata

SEQ ID NO: 125088 - DNA, 1679 bp, Homo sapiens
ggcaaggcagaccagatagaggcagcaaacatgggccaaaacgcatacacccaagtggtccatcagctcaggccagcacgccaccttctcaattcattccagaaaaattagcctggagccagggggcggcagagagcacagtgattggtaacaaaaataggaagagttgggtaacaaaataggagacgaaagagatgtcattctaatcagcatgaagtgaccagggtgatgatcagcaagacacccaggcagcaggaaccctgtgaggcaccaactaggtagccaagtgtatctaacggagaatccagggcctgaccaccaacacccgctttggccttcacctgccctacgtctgcagcagcacctctggctcagacaatgagcaatacagagtgtatcctaattcgtctatttcttcaggggtgaactctgcaaaataagttccaccttggggtttaagggcactgggcaaggactccagccctctaaagtaagctgataagtcccctcaaggcctgcaggaaacggtcggccagcatatccggagaccagtcagcctcctcctgggccaagtggaggatgacattggttagctggctggcagtgaggtggcccagagccggggtggacttgcatatggccttgaggatcttgaggcacagagatcggcagcccgagtcagcctggtccagagcccgcaggcgtgccgtctccgcgggacgcaggctcagccgccacaggttgtcatactgggctagccggtgtggtttggccaccgaggctgtgtcaccggagggtcactgatggcaggaagtcaatgaagagatgtttgtcacgctcatactgcacctccagtgtgagggcttctgggggtggggccgggcggatcacatagtccaagagggaccctatggctggccaattgatggagccagccactaccttctcaaatgtatctgcgactgtctttggagagaggtagccccctactacacagcggtcccagtaactgctcccacgaggaaagtactctggattctcacgacgcaccaggaagaagccagggacattcatgatggtgtcttcaccaggaaatctgtgccaacaacactatggtgctcagcactcaaaccccacccaccatgagaaccaccttgttacctgcaggtcatcgtagaggctgccactcaagtacatgtcccgaagcggcatgtcaggcaacttggcccgcaggaagctccggagctcggcacatatgtccacagcagcttgcttggcccgagcctgctctccagcagggatggctgcccggttccggtagtaagtaagaagtttctcctgcagggacatgcggagttctgctgagtgcaggagtggtactgaaagtccagagaggtcccaggaggggcagcagcccttctcacctgtgtcgaaggtggaggagtctgtgggaagggtctgcaaggaccggctcaggcccgtcttcatgtccctgttcagcagtcgtggggagcccatccagttgggttcttccctataaaacattacatcttatgaccataccactacattccacccccagccctggctgcatgcacttacccgcttaactgccagcgtggcgatgcccagcatggccgctccacccacccccagcaccagccgggcattggagagca

SEQ ID NO: 125089 - DNA, 408 bp, Homo sapiens
tgcatgacagcaactgtaatctcaaaaaccattattacaactaatccagtaagtacaatagttgatgtctacacagttgaacaattaaagggaaaagctttgaagaatgaaggaaaagctgatccttcctatggcatcctttatgcctacatttccacactcaacattgatgatgaaactacaaaagtagttcgaaatagatgttccagctgtggttatattgtaaatgaagcatctaacatgtgcacaacttgcaacaaaaactccttggactttaaatctgtctttctcagtttccatgtgctgattgatctgactgatcacacaggcacccttcattcctgtagtctcacaggaagtgttgctgaggagactttgggctgcacggtacatgagtttcttgcaatg

SEQ ID NO: 125090 - DNA, 359 bp, Homo sapiens
caatagttgatgtctccacagttgaacaattaaagggaaaagctttgaagaatgaaggaaaagctgatccttcctatggcatcctttaggcctacatttccacactcaccattgatgatgaaactacaaaagtagttcgaaatagatggtaaggatccgtgtcacttttagcaaattcatttttgtaagaaataattattgttaataaattttaagctctctaaaagttaaagctgtttgttgatgtaacaggggttatgtattggagataaatgtgtaaaaaactgtactgaaaagtttccatagcaaaccagattaaaatattataattgccttttaaaatataatctgtatttcca

SEQ ID NO: 125091 - DNA, 908 bp, Homo sapiens
ttgaccacaatgcaggctgcatcttagacagggtctcgctctgtcgcccaagctggagtgcagcagtgctatcacagctcactgcagcctcgaactcccggggtcaagcaatcctccctcagcttcccgtttctgaggttacagcccaaagtctcctcagcaacacttcctgtgagactacaggaatgaagggtgcctgtgtgatcagtcagatcaatcagcacatggaaactgagaaagacagatttaaagtccaaggagtttttgttgcaagttgtgcacatgttagatgcttcatttacaatataaccacagctggaacatctatttcgaactacttttgtagtttcatcatcaatgttgagtgtggaaatgtaggcataaaggatgccataggaaggatcagcttttccttcattcttcaaagcttttccctttaattgttcaactgtgtagacatcaactattgtacttaaatttatggattctttgaaataactgtcaatttcatcatccagaacattcgtttctttattttctcgtataaaattcagcagaatgttagcttctggtatatctggattagttgtaataatggtttttgagattacagttgctgtcatgcagttccgaaatttgtcaaaatttattcttacatctgaggcaaatattacacagtcaccaaccctaaagctgtcagaaagagacttgatgtaatcttcattgccccaggaagctgcatttacaaaatgtgctggtgaatcccgaatggtgaagctgaaagtgtacctttctgatccaatatcccaagccagctcagaaccttccaattctatggaaaacacctggtaactgaagctcagcgtctcaaaggcagccttgaatcctcccttctcctccactgtcat

SEQ ID NO: 125092 - DNA, 521 bp, Homo sapiens
ctgcgcaaggatgacacgcaaattcgtgaagcgttccatatttttgtccagtcctggcgtcccgccctgcccagcctcccgtccctgcccctagcccgtgccctggcagagaccctgaaccagccctttggcagcggccttatcaccccctcggggatcctgctcaacagccagatgctggacttctcctggcccaaccggacagctaaccactctgcacccagcctggtaggatttgcttccctgctttcctggggaccctgaggcctataggtaggaggtgcaatggcatggctgcccctttctccctactttctccagaatcttctagtataaggaagcctaaagaagaggttcacctcatccctagccctgctaagtctgggacatggagcctggtgggtctgaagaacccttgtcccattctgtcactgtcttactgtgtgaccttgtgaagatcttgccctctctgggcaatttcttcacctgtacaaagaggggtctgggctccaatttgaagc

SEQ ID NO: 125093 - DNA, 396 bp, Homo sapiens
agcagaactgcttacgtcatgcttggcacgaggttcagtgcagccagggaagcggccactctctttcctgctgcccacagtggtccgacccgcggaggggctgtgtggaacctacctcgctctgggggccaatggagctgcgcggggcctcagcggcctgacacaggtgaggtttacgccatggttggcctttttcagccgggagccaagctgtggcctagactgcagatgcctgtcatatctgtggcttgtttccattcctcatgcggcaaacatgggctgaggctgttttgtgccaggcgcatcctgggcaatgtggacatgggctgcgctgagtttcttagtgaaaatggagccctgatgctccctgtcttttccggttggaagggaaatggg

SEQ ID NO: 125094 - DNA, 2331 bp, Homo sapiens
atggcggcggagaacgaggccagccaggagagcgccctgggcgcctactcgccagtggactacatgagcatcaccagcttcccgcggctgcccgaggacgagccggcgcccgcggccccgctgaggggccgcaaggacgaggacgcctttctgggagaccccgacaccggtgaggcccgctgaccccgtccctgccctgccttgggaagtccccggtcttccttcttctgtgtcaagcatccagggtcgccgctacgcgagacgcgcaaagacccgttctccgccgcagcggccgagtgctcctgccgccaggatgggctcacggtcatcgtcacggcctgtctcaccttcgctaccggtgtcaccgtggcgctggtcatgcagatctacttcggggacccccaggtgagggggacaaatggggagggggaggaaactggggagtggggagtggggtaatgtttgaggaactgtggaaagggatcttctgtggacgcagcggtggcagcagccttgtgtttgggtatcgtggctccacacagttctggcctgggcgggtaaggagcagtggaggtcggggtcccccaggcctacttcttgcctccaggtctgtaggcctcatgtgcagcacgggccctcagggaagagaccctgcaaagatcctgggagaccaaggtggggaccctggtgagaagagagagttcaggggagtctctcttcattgcccttctgctaacccaagcattaatttgctaagtattggcccaagatggcttcaacgtgactcatgatctaggtcagtggggcctggggatttgggagagacatgaggttgatggagaagggtagaatctttgagatttggagcccccgccactacctggctcgttgctgcatcggcccgacctggctgaggtgctggatgtacttggcacctccggcccggctgccttctacgcaggtggcaacctcacactggagatggtggccgaggtaagtgctcgtgttgtgcgggtgggggcatgccccaaggtccctattgcaggacatccgcgtccgcatttttttggcgtgtacagaggtgacctctcccccggctcccagggtcccccctcaggagaagcctcccagtccatggccacatcgttttggcctttcaatctcaccagcctggtatcccgagaacaggctcttcactgggtggcagaggtaaggctgacccgtctgcctttccctggatttaaggatattaggagtggggagattgggtactgccatagggcggatgacatgctcaggtgggtcttgggcaggacctgggggctacagaggcagcggtgggtgtggggaaagggtcaggagaaaagcagctatgaactagacggagctcccacggctgcccaggtgctgatcatgggacctgatgacttcattgtggccatggttaggtatgccagctcagactcagaacctggaacaagggatcctctgaaccaagagggggtgggggctgggtagaggttctcctggcccaaccggacagctaaccactctgcacccagcctggtaggatttgcttccctgctttcctggggaccctgaggcctataggtaggaggtgcaatggcatggctgcccctctgtggaacctacctcgctctgggggccaatggagctgcgcggggcctcagcggcctgacacaggtgaggtttacgccatggttggcctttttcagccgggagccaagctgtggcctagactgcagatgcctgtcatagcagtccaacctcctgcaggtggacagtgagtgcagagcagagacctcgtggggcgggcacagggacaggtagagaaaggactcctcccaagggtgcccatgggtccatggcagccgaaggaccaacaacttcatcatcgctgttaaggaccctcggagcccagatgcagctggagccaccatcctgtagagcagcggggtggggcggggtctctgctcccccactttgcatgttcccagagtccctccttctcccaggtttggtctcagggggaccccagggatgccccagatcaggggccagaggggatgcttagcatacccaatcccagagtaactggaaaattctccatcaggatgcctgaggtggtggcggagatgctactctatgcttgaatgtcctacatgacataagttctgccgacctttgagttccagtcattccaccttttattggagcgtagtagattgtagtcttactgggctgttgttctgagagttattagactgagtattatatttggtactgtttagttgatacgtgtctctcctg

SEQ ID NO: 125095 - DNA, 843 bp, Homo sapiens
tcatctatgactacagtccatgccactactgccacccagaagactgttggagaaactttggcgtgactgctgcagaacatcatccctgtatctactagtgtggccgaggctatgggcaaggtcatccctgagccagataagaggctcacaggtatggccttctgtgttcccacccataatatgttggttgtggctctcatctgccatctgcagaaagctgccaaatatgatggcatgagaagatgcttcaatgccacgactggcattaccttcaatggccactttgtcaggctcctttcctgggatgaatttggcagcagcaacagggtggtggaccttatggtccacacggcctccaaggagtaagacccccagaccaccagctccatcaagagcatgagaggaagagtgaacccccagctgctggggagtcattgccccactcaggctccccaaagtcagtttccattccagactcatccttggaggcatcagcagggctggctgggatgcaggctgccgcttgtgctgtgatgctgggatcacacgaccctgcaggcctttgagtcgctggaagctgttgccttccagagggagccctgcaccccagggcttgggctgagcactttcatgactggaagctttggagaacaagtccttgggcagtacctctggctgggctggctccaagagtttctgatcctggacagatcccagggtgcacctctccaagacatgtctgttcccatgacatatatttaaaacataagtcatatccacgataatacatttttgggatgataaaccaatgttaacctcatccaaaacttccctcacagacat

SEQ ID NO: 125096 - DNA, 319 bp, Homo sapiens
  misc_feature (1)...(319): n = a,t,c or g
cagaccntgcctcccctcccgccggccaacccntagtccccttcntgtctccacttgcattcaggggtggctgctgttctgagaacattattctgaactttcgtatccaagttagtccccnttattccactgtggcattgccgttntaagcagttacctgatgcctgctgctgaagagctgctcacaggaggcggcggcggccctggcactgcctgcattaggtcttgtgtttgatgtgttcttgtgaatttactttgtcagaacaaaatatttacgcgttgggttcaggaattttttttagctccccatcttggctgt

SEQ ID NO: 125097 - DNA, 401 bp, Homo sapiens
  misc_feature (1)...(401): n = a,t,c or g
ttgcactccgcaagacaccccagtaaactggggcgtcccaaggtggcaagccttcatgaaggcactgcccagctcacaatcctgtgggccaacttcagtcaactctcctttccattagatttgttcctaattaaaagaccactcatnnnnnnnnnnnnnnnnnnnnnnnnnnnnnnnnnnnnnnnnnnnnnnnnnnnnnnnnnnnnnnnnnnnnnnnnnnnnnnnnnnnnnnnnnnnnnnnnnnnnnnnnnnnnnnnnnnnnnnnnnnnnnnnnnnnnnnnnnnnnnnnnnnnnnnnnnnnnnnnnnnnnnnnnnnnnnnnnnnnnnnnnnnnnnnnnnnnnnnnnnnnnnnnnnnnnnnnnnnnnnnnnnnnnnnnnnnnnnnnnnnnnnnnnnnnnnnc

SEQ ID NO: 125098 - DNA, 410 bp, Homo sapiens
  misc_feature (1)...(410): n = a,t,c or g
gnnnnnnnnnnnnnnnnnnnnnnnnnnnnnnnnnnnnnnnnnnnnnnnnnnnnnnnnnnnnnnnnnnnnnnnnnnnnnnnnnnnnnnnnnnnnnnnnnnnnnnnnnnnnnnnnnnnnnnnnnnnnnnnnnnnnnnnnnnnnnnnnnnnnnnnnnnnnnnnnnnnnnnnnnnnnnnnnnnnnnnnnnnnnnnnnnnnnnnnnnnnnnnnnnnnnnnnnnnnnnnnnnnnnnnnnnnnnnnnnnnnnnnnnnnnnnnatgagtggtcttttaattaggaacaaatctaatggaaaggagagttgactgaagttggcccacaggattgtgagctgggcagtgccttcatgaaggcttgccaccttgggacgccccagtttactggggtgtcttgcggagtgcagaaggctttc

SEQ ID NO: 125099 - DNA, 439 bp, Homo sapiens
  misc_feature (1)...(439): n = a,t,c or g
ccttgaatgcaagtggagacaggaaggggactaggggttggccggcgggaggggaggcagggtctggccaaacccaggcagctgccagaaagccttctgcactccgcaagacaccccagtaaactggggcgtcccaaggtggcaagccttcatgaaggcactgcccagctcacaatcctgtgggccaacttcagtcaactctcctttccattagatttgttcctaattaaaagaccactcatnnnnnnnnnnnnnnnnnnnnnnnnnnnnnnnnnnnnnnnnnnnnnnnnnnnnnnnnnnnnnnnnnnnnnnnnnnnnnnnnnnnnnnnnnnnnnnnnnnnnnnnnnnnnnnnnnnnnnnnnnnnnnnnnnnnnnnnnnnnnnnnnnnnnnnnnnnnnnnnnntgcgctcgtccaaactatnncgtgatgatcatgctt

SEQ ID NO: 125100 - DNA, 454 bp, Homo sapiens
ttttcttcatttttattttcaaacttacagtaaacaaaacaatcacttaaattgtcaaaagaacagcaattttacacaatgaagagcatacacaccaagccaaaatacaatagcactcaggtctatatgttgcagtggtgctggcgctggagggaaaggccatgtgtcttcctgggaggcactgaaaggccagccagcatctccaaaatgcaggccattttaacactgctgtgaatgttctggggtcaccaagggggccccttagtggtcagatgcactttgtcacaatgtacacctacatggggtgattactaggcaacgggaggtttcctgaatttcacagccagatggggagctaaaagaaattcctgaacccaacgcgtaaatattttgttctgacaaagtagattcacaagaagacatcaaacacaagacctaatgcaaggggcagtgc

SEQ ID NO: 125101 - DNA, 5362 bp, Homo sapiens
gcagccgcagctcgggggcggtgcctgccttgcagcctcccctcggcgatcgcgcagccccatctttgtccggcctccgcgctttgttctcggcgcccgggccttggccagcctggccagccgccgagcagcccccacgccgcgctggcgtcgtcctcgcctccctcgccgccgccccccgcgcgcggccgggccttgccccccatggtgtcccggccagagcccgagggcgaggccatggacgccgagctggcggtagcgccgccgggctgctcgcacctgggcagcttcaaggtggacaactggaagcagaacctgcgggccatctaccagtgcttcgtgtggagcggcacggctgaggcccgcaagcgcaaggccaagtcctgtatctgccatgtctgtggcgtccacctcaacaggctgcattcctgcctctactgtgtcttcttcggctgtttcacaaagaagcatattcacgagcatgcgaaggcgaagcggcacaacctggccattgatctgatgtatggaggcatctactgttttctgtgccaggactacatctatgacaaagacatggaaataatcgccaaggaggagcagcgaaaagcttggaaaatgcaaggcgttggagagaagttttcaacttgggaaccaaccaaacgggagcttgaactgctgaagcacaacccgaaaaggagaaagatcacctcgaactgcaccataggtctgcgtgggctgatcaaccttgggaacacatgcttcatgaactgcatcgtgcaggccctgacccacacgccacttctgcgggacttcttcctgtctgacaggcaccgctgtgagatgcagagccccagctcctgtctggtctgtgagatgtcctcactgtttcaggagttttactctggacaccggtcccctcacatcccgtataagttgctgcacctggtgtggacccacgcgaggcacctagcaggctacgagcagcaggacgcccacgagttcctcatcgcggccctggacgtgctccaccgacactgcaaaggtgatgacaatgggaagaaggccaacaaccccaaccactgcaactgcatcatagaccagatcttcacaggcgggttgcagtcagacgtcacctgccaagtctgccatggagtctccaccaccatcgaccccttctgggacatcagcttggatctccccggctcttccaccccattctggcccctgagcccagggagcgagggcaacgtggtaaacggggaaagccacgtgtcgggaaccaccacgctcacggactgcctgcgacgattcaccagaccagagcacttgggcagcagcgccaagatcaagtgcagcggttgccatagctaccaggagtccacaaagcagctcactatgaagaaactgcccatcgtagcctgttttcatctcaaacgatttgaacactcagccaagctgcggcggaagatcaccacgtatgtgtccttccccctggagctggacatgacccctttcatggcctccagcaaagagagcaggatgaatggacagtaccagcagcccacggacagtctcaacaatgacaacaagtattccctgtttgctgttgttaaccatcaagggaccttggagagtggccactacaccagctttatccggcagcacaaagaccagtggttcaagtgtgacgatgccatcatcaccaaggccagcatcaaggacgtcctggacagcgaagggtacttgctgttctatcacaaacagttcctggaatacgagtagccttatctgcagctggtcagaaaaacaaaggcaatgcattggcaagcctcacaaagtgatcctccctggccccccccctcccccaagtctcccgccgcctccccggcctggtgacaccacctcccatgcagatgtggcccctctgcacctgggacccatcgggtcgggatggaccacacggacggggaggctcctggagctgctttgaagatggatgagaatgaggggtgtgctctgggtgggaggagcagcgtacacccgtcaccagaacatctcttgtgtcatgacatgggggtgcaacgggggcctcacagcacagagtgaccgctgcctggcgttccccagcactcggtgtggaaaggcccctacctgctgtaagattatgggtccatgaaagcagtaagctggacacagaggtgtagtgtgcgggacagagggccttgcagatgcctttctgttggtgttttagtgttaaaatacggagagtatggaactcttcacctccattttctcagcggctgtgaagcagcctcctagcttcggaagtacggacactacgtcgcgttttcaagcgtgtctgttctgcaggtaacagcatcaagctgcacgtggaagcatctcgcggttttctagaaacaggcattttcttatccctctcccgctcctttttccacaaaggtgaatttcataaatgtaatactagtaaagtgaatgaattactgagtttatacagaaatttaggtaacttctcctttagtctcaagagcgagtcttgctttttaatgggtgccgtttatgttgctgcccgccctgtgtgcctggctcctctgggtgccttggtgtctgctggtggctggcagtgggcgcagcggaggagagttgtgctgcagctcatacggtgtgtctgtcatctcagtctggagtaaatgcagtgtctgccggtgtctgatgggttctgtccctcgtattttctttgccttctatcccattgcctggctaccgctgcctggcagccaagggtgttggtcgcgaagctggagtggcctctggtggagcctgcatcttgtctcgtctgcctctgctttacatttggtgtactttcgggcgtggtggcagtaaaatgacaccgtgattgagcttgtcagcagagctgaaagagaaagtagaaggatgtgcattgtttcttgtaagatatcttgcatgtatctgtgtattcaaattcaaacagagatggtttgtccatttgtccactgagaaattataaactagggacaagggggaggaaaagtactgaaatacagtttatgaagcaagtgtgtctcgggctgtgcttgtcccaggagccccagcagcatctgaactgaggcttcttcagtcctgcaggaacaggatcatctgtctcagcggtgggcagatgttttcatagacagccagggagtaaacactgttggctctgtgggctgtatggtctctgccataaatagtacagagatgtggctgtgtctagtacaacttttagacacagaaatctgaatgacatatattgttctgtgtcaagaaacttagattttttttttaactatttaaaaacgtgaaacctattcttagctcacaggccatggagaagctggtggggaccagacccagctccttagctggctgggctggggagggggcagtgacagtggcagctgctactcactgctcagtgtggaaaacacaggacttggcaatcacagcccgcagaaccatcatgtgtggcagaagcctgagggatgcggtttcttgcccacgtgctctgttcattttctgttgtttttctgcacttaaagaattcacatggaagcatgttttataaaatgaattaccagagaaacagagatgggccgagattctcagaaatggtcccatgtgaccaagttctgctgtttgggtgacagtgctttgaagatctcctttgaggatgtgcagtctttttttttttttttttttttttgagatggagtttgttgcccaggctggagtgagtggcacagtctcggctcactgcaacctccacctcctgggttcaagcagttctcgtgccgcagcctcccaagtagctgggactacaggcatgcaccaccacgccaggctaatttttgtatttttagtagagatggggtttcaccatgtctcaaactcctgacctcaggcgatccacccacctcagcgtcccaaagtgctggggattatagggcgtgacaaccggcacctgggccttatggagtggtctttttaattagggaacaaatctaatggaaaggagagttgactgaagttggcccacaggattgtgaagctgggcagtgccttcatgaaggcttgccaccttgggacggcccagtttactgggggtgtcttgcggagtgcagaaggcttttctggcagctgctagggttttggccagaccctgcctcccctcccgccggccaacccctaagtccccttccctgtcttccacttggcattcaggggtgggctgctgttctggagaacatttagaactgggaagagagaatggagtcacatggatttttggtggggcattatttctgaactttccgtatccaagttaagtcccccttatttccactgtgggcattgcctttctaaagcagttacctgattgcctgcttgcttgaagaagctgcttcacaggaggccggcggcggccctgggcacttgccccttgcattacggtcttgagctttgatgtgttcttgtgaatttactttgtcagaacaaaatatttacggcgttggggttcagggaatttcttttaagctccccatctgggctgtggaaattcagggaaacctccccgttgcctagtaattcacccccatgtaggggtgttacaattgtgaccaaagtggcatcttgacccactaaggggggcccccttgggtgacccccagcacaattcacaagcagtgttaaaaaatggccctgccattttggaagaatgcctggcctggccttttccagtgccctccccaggaaggacacatgggcctttaccctccttcagatgccctgaaggggagtggttttgagggcaggtgaatgtgctggggaagtgtggggcgggccctcccctctgggccccggggccctcctggtggacccttggctcccctccgttggaccctggggcttccgtggtgaagcacctggcagccttccctggggcattcccctccagcgcccagcacccactgcaaacatataagacctgagtgactattgtaattttggcttggtgtgtaatgctcttcattgagaaaaattgctgttcttttgacaattaaagagattgttatgattactgtagcgtttgaaaataaaaatgaagaaaaaaaattccgaatgactgtgctgtggttgggaagactttatttaccaagatgtttactcttcctttccccttccattttgaggagcttgtgtcactcctccgtcccccccaagtgctttgtagtctctcctatgtcataataaagctacattttctctgagaaaaaaaaaaaaaaaaaaa

SEQ ID NO: 125102 - DNA, 813 bp, Homo sapiens
atggagctgaaaaccatggtacaagaactacgtgacacaagcacaagcttcagtagccaatttgatcaagtggaagaaagggtatcagagattgaagatcaaatgaatgaaatgaaaaccaatgacaaaaaccacatgactatctcaatagatgcagaaaaggccttcaacaaaattcaacagccattcatgctaaaaactctcaataaactaggtattgatgtgacatatctcaaaataataagagatatttatggcaaacccacagccaatatcatactgaatgggcaaaaactgggagcattccctttgaaaactggcacaagacagggatgccctctcccaccactcctattcaatgtagtgttggaagttctggccagggcaatcaggcaggagaaagaaatgaagaatattcaattagaaaaagaggaagtcaaattgtccctgtttgcagatgacatgattgtatatttagaaaaccccatcatcttagccccaaatctccttaagctgataagcaacttcagcaaagtctcaggatacaaaacccatgtgcaaaaatcacaagcattcttatacaccaataacagacaaacagagagccaaatcacgagtgaactcccattcgcaattgcttcaaagagaataaaatacctaggaatccaacttacaagggatgtgaaggacctcttcaaggagaactacaaaccacagctcaacgaaataaaagaggacacaaacaaatggaagaacattccatgctcatggataggaagaatcaatattgtgaaaatggccatattgcccaag

SEQ ID NO: 125103 - DNA, 1454 bp, Homo sapiens
atggcacaagaactacgtgacgaatgcacaagcctcagtagccgattcgatcaactggaagaaagggtatcagagatggaagatcacatgaatgaaatgaagcgagaagagaaatttagaaaaaaaggaataaaaagaaatgaacaaagcctccaagaaatatgggactatgtgaaaagaccaaatctacgtctgattggtgtacctgaaacccaaaatctccttaagctgataagcaacttcagcaaagtctcaggatacaaaatcaatgtgcaaaaatcacaggcattcttatacaccaataacagacaaacagagagccaaatcatcagtgaactcccattcacaattgcttcaaagagaataagatacttaggaatccaacttacaagggatgtgaaggacctcttcaaggagaactacaaaccactgctcaacgaaataaaagaggacacacacaaatggaagaacattccatgctcatggataggaagaatcaatatcgtgaaaatggccatactgcccaaggtaatttatagattcaatgccatgcccatcaagctaccactgactttcttcacagaattggagaaaactactttaaagttcatatggaaccaaaaaagagcccgcattgccaagtcaatcctaagccaaaagaacaaaactggaggcatcacgctacctgacttcaaactatactacaaggctacagtaaccaaagcagcatggtactggtaccaaaacagagatatagatcaatggaacagaatagagccctcagaaataataccacatatctacaactacctgatctttgacaaacctgagaaaaacaagaaatggggaaaggattccctgtttaacaaatggtgctgggaaaactggctagccatatgtagaaagctgaaactggatcccttcctgacaccttatactaaaattaattcaagatggattaaagacttacatgctagatctaaaaccataaaaaccctagaagaaaacctaggcaataccattcaggacataggcattggcaaggacttcatgtctaaaacaccaaaagcaatggcaacaaaagccaaaattgacaaatgggatctaattaaactaaagagcttctgcacagcaaaagaaactaccatcagagtgaacaggcaacctaaagaatgggagaaaatttttgcaatatactcatctgacaaaaggctaatatccagaatctacgaagaaatcaaacaaatttacaagaaaaaaacaaacaaccccatcaacaagtgggcaaaggatatgaacagacacttctcaaaagaagacatttatgcagccaacagacacatgaaaaaatgttcatcatcactggtcatcagagaaatgcaaatcaaaaccacaatgagataccatctcacaccagttagaatggtgatcattaaaaagtcaggaaacaacag

SEQ ID NO: 125104 - DNA, 1641 bp, Homo sapiens; identical to SEQ ID NO: 121942

SEQ ID NO: 125105 - DNA, 1188 bp, Homo sapiens; identical to SEQ ID NO: 123066

SEQ ID NO: 125106 - DNA, 2307 bp, Homo sapiens; identical to SEQ ID NO: 124320

SEQ ID NO: 125107 - DNA, 2034 bp, Homo sapiens
atgggagactttaataccccactgtcaacattagacagatcaacaagacagacagttaagaaggatatccaggaattgaattcagctctgcaccaagtggacctaatagatatctacagaactctccaccccaaatcaacagaatatacattcttctcagcaccacaccacacctactccaaaattgaccacacagttggaagtaaagcactcctcagcaaatgtaaaagaacagaaattataacaaactgtctctcagaccacagtgcaatcaaactagaactcaggattaataaactcactcaaaaccactcaactacatgggaactgaataacctgctcctgaatgactactgggtacataacgaaatgaaggcagaaataaagatgttctttgaaaccaatgagaacaaagacacaacttaccaggatctctgggacacattcaaagcagtgggtagagggaaatttatagcactaaatgcccacaagagaaagcaggaaagatctaaaattgacaccctaacatcacaaataaaagaactagaaaagcaagagcaaacacattcaaaagctaggagaaggcaagaaataactaagatcagagcagaactgaaggagacagagacacaaaaacccttcaaaaaatcaatgaatccaggagctgaaatacaaactaccatcagagaatactataaacacctctatgcaaataaactagaaaatctagaagaaatggataaattcctcaacacatacactctcccaagactaaaccaggaagaagttgaatctctgaatagaacaataacaggctctgaaattgaggcaagaattaatagcttaccaaccaaaaaaagtccaggaccagatggattcacagctgaattctaccagaggtacaaggaggagatggtaccattccttctgaaactattccaatcaatagaaaaagagggaatcctccctaactcattttatgaggccagcatcatcctgataccaaagcctggcagagacacaacaaaaaaagagaattttagaccaatatccctgatgaacatcgatgcaaaaatcctcaataaaatactggcaaaccaaatccagcagcacatcaaaaaccttatccaccatgatcaagtgggcttcatccctgggatgcaaggctggttcaacatatgcaaatcagtaaatgtaatccagcatataaacagaaccaaagacaaaaaccacatgattttctcaatagatgcagaaaaggcctttgacaaatttcaacaactcttcatgctaaaaactctcaataaattaggtattgatgggatgtatctaaaaataataagagctatttatgacaaactcacagccaatatcatactgaatgggcaaaaactggaagcattccctttgaaaactgccacaagacagggatgccctctctcaccactcctattcaacatagtgttggaaattctgaccagggcaatcaggcaggagaaagaaataaagggtattcaattaggagaagaggaagtcaaattgtccctgtttgcagatgacatgattgtatatctagaaaaccctatcatctcagcccaaaatctccttaagctgataagcaacttcagcaaagtctcaggatacaaaatcaatgtgcaaaaatcacaagcattcttacacaccaataacagacaaacagagagccaaatgatgagtgaactcccattcacaattgcttcaaagagaacaaaatacctaggaatccaacttacaagggatgtgaaggacctcttcaaggagaactacaaaccactgctcaatgaaataaaagaggacacaaacaaatggaagaacattccatgctcatggataggaagaatcaatatcgtgaaaatggccatactgcccaaggtaatttatagattcaatgccatccccatcaagctaccaatgactttcttcacagaattggaaaaaactactttaaagttcatatggaaccaaaaaatagcctgcattgcaaatcaatcctaa

SEQ ID NO: 125108 - DNA, 1191 bp, Homo sapiens
atgggagttaataaaaatattgaagaagagacttatcccagaccaatatccttgatgaatattgatgcaaaaatcctcaataaaatactggcaaaccaaatccagcagtacatcaaaaagcttatccaccatgatcaagtgggcttcatccctgggatgcaaggctggttcaatatatgcaaatcaataaatgtaatccagcatataaacagaaccaaagacaaaaaccacatgattatctcaatagatgcagaaaaggcctttgacaaaattcaacaacgcttcatgctaaaaactctcaagaaattagaattggaaaaaactgctttaaagttcatatggaaccaaaaaagagcccgcatcaccaagtcaatcctaagccaaaagaacaaagctggaggcatcacgctacctgacttcaaactatactacaaggctacagtaaccaaaacagcatggctgcccttcatcctccagagctccaccagggtgatcgtagaccagaagggtccagtccaaaatctccttaagctgataagcaacttcagcaaagtctcaggatacaaaatcaatgtacaaaaatcacaagcattcttatacaccaataacagacaaacagagagccaaatcatgagtaaactcccattcacaattgcttcaaagagaataaaatacctaggaatccaacttacaagggacgtgaaggacctcttcaaggagaactacaaaccactgctcagtgaaataaaagaggatacaaacaaatggaagaacattccatgctcatgggtaggaagaatcaatattgtgaaaatggccatactgcccaaggtaatttatagattcaatgccatccccatcaagctaccaatgactttcttcacagaattggaaaaaactactttaaagttcatatggaaccaaaaaagagcccgcatcgccaagtcaatcctaagccaaaagaacaaagctggaggcatcatgctacgtgacttcaaactatactacaaggctacagtaaccaaaacagcatggtactggtaccaaaacagagatatagatcaatggaatagaacagagccctcagaaataacgccacatatctacaactatctgatctttgacaaacctgagaaaaacaagcaatggggaaaggattccctatttaataaatggtgctgggaaaactga

SEQ ID NO: 125109 - DNA, 353 bp, Homo sapiens
atgatcacaattgcttcaaagagaataaaatacctaggaatccaacttacaagggacgtgaaggacctcttcaaggagaactacaaaccactgctcaatgaaataaaagaggatacaaacaaatggaagaacattccatgctcatgggtaggaagaatcaatattgtgaaaatggccatactgcccaagattactgactcagcaatggagatgttatcggcaaaatgccattacctgcacattttggatatctctggttgtgtcttgcttactgaccaaatccttgaggaccttcagataggctgcaaacaactccggatccttaagatgcaatactgcacaaatatttccaa

SEQ ID NO: 125110 - DNA, 1608 bp, Homo sapiens
agaataaaatacctaggaatccaacttacaagggaagtgaaggacctcttcaaggagaactacaaaccactgctcaatgaaataaaagaggacacaaacaaatggaagaacattccatgctcatgggtaggtagaatcaatatcatgaaaatggccatactgcccaaggtaatttatagattcaatgccatctccaacaagctaccaatgactttcttcacagaattggaaaaaactactttaaacttcatatggaaccaaaaaagagcccgcatcgccaagtcaatcctaagccaaaagaacaaagctggaggcatcacgctacctgacttcaaacaatactacaaggctacagtaaccaaaacagcatggtactggtaccaaaacagagatatagatcaatggaacagaacagagccctcagaaataacaccgcatatctacacctatctgatctttgacaaacctgagaaaaacaagcaatggggaaaggattccctatttaataaatggtgctgggaaaactggctggccgtatgtagaaagctgaaactggatcccttccttacaccttatacaaaaattaattcaagatggattaaagacttaaacgttagacctaaaaccataaaaaccctagaagaaatcctaggcattaccattcaggacacaggcatgggcaaggacttcatgtctaaaacaccaaaagcaatggcaacaaaagccaaaattgacaagtgggatcaaattaaactaaagagcttctgcacagcaaaagagactaccatcagagtgaacaggcaacctacaaaatgggagaaaattttcgcaacctattcatctgacaaagggctaatattcagaatctacaatgaacttaaacaaatttacaagaaaaagacaaacaaccccatcaaaaagtgggcgaaggacatgaacagacccttctcaaaagaagacatttatgcagccaaaaaatacatgaaaaaatgctcaccatcactggccatcagagaaatgcaaatcaaaaccacaatgagataccatctcacaccagttagaatggcgatcattaaaaagtcaggaaataacagacaaacagagagccaaatcatgagtgaactcccaatcacaattgcttcaaagagaataaaatacctaggaatccaacttacaaaggatgtgaaggacctcttcaaggagaactacaaaccactgctcaatgaaataaaagaggacacaaacaaatggaagaacattccatgctcatggataggaagaatcaatattgtgaaaaatggccatactgcccaagcccacaaatgtacatgtcaccaacctggcagcccaagacactacagctctggaggcagcccaaatatccttggaagggcacccacaggagaaagaaataagcgtgaccgctatgccattattaagtccctcctgaccactgggtcagccatgaagaagatagaagacaacaacacacttgtggatgtcaaaatcaacaagtaccagatcaaacaggttgtaaagaagctctatgacactgatgtggtcaacaccctgatcaggcctgagggagagaagaaggcagatgtttga

SEQ ID NO: 125111 - DNA, 373 bp, Homo sapiens
atgagtgaactcccattcacaattgtttcaaagagaataaaatacctaggaatccaacttacaagggatgtgaaggacctcttcaaggagaactacaaaccactgctcaacgaaataaaagaggacacaaacaaatggaagaacattccatgctcatggataggaagaatcaatatcgtgaaaatggccatactgcccaagataggatattgtgtgcaagacacaacctctgccaatactacccttgttcatcagaccacaccttcacatgtaatgccaccaaatcaccaccaattagcatttaattatcaagaattagaacatttacagactgtgaaaaacatttcacctttacaaattctgcctccctcag

SEQ ID NO: 125112 - DNA, 557 bp, Homo sapiens
atgagtgaactcccattcacaattgcttcgaagagaataaaatacctaggaatccaacttacaagggatgtgaaggacctcttcaaggagaactacaaaccactgctcaacgaaacaaaagaggacacaaacaaatggaagaacattctatgctcctggataggaagaatcaatattgtgaaaatggccatactgcccaaggtaatttatagattcaatgccatccccatcaagctaccaatgactttctttacagaattggaaaaaactactttaacgttcatatggaaccaaaaaacagcccgcattgccaagacaatcctaagccaaaagaacaaagctggaggcatcacactacctgacttcaaactatactacaaggctacagtaaccaaaacagcatgggacatggatgaagctggaaaccatcattctgagcaaacgaccgcaaggacagaaaaccaaacactgcatgttctcactcataggtgggaattgaacaatgagaacacttggacacaggacagggaacatcacacaccggggcctgtcgtggg

SEQ ID NO: 125113 - DNA, 1260 bp, Homo sapiens; identical to SEQ ID NO: 123061

SEQ ID NO: 125114 - DNA, 3529 bp, Homo sapiens; identical to SEQ ID NO: 120366

SEQ ID NO: 125115 - DNA, 2376 bp, Homo sapiens; identical to SEQ ID NO: 119542

SEQ ID NO: 125116 - DNA, 1758 bp, Homo sapiens; identical to SEQ ID NO: 124821

SEQ ID NO: 125117 - DNA, 1602 bp, Homo sapiens
atgatttttgtctcaatagatgcagaaaaggcccttgacaaaattcaacagcgcttcatgctaaaaactctcagtaaattaggtattgatgggacatatctcaaaataataagagctatttatgacaaacccacagccagtatcatactgaatgggcaaaaactggaagcattccctttgaaaactggcacaagacagggatgccctctctcaccactcctattcaacacagtgttggaagttctggccagggcaatcaggcaggagaaagaaataaagcatattcaattagaacaagaggaagtcaaattgtccctgtttgcagacgacatgattgtatatctagaaaaccccattgtctcagcccaaaatctccttaagctgataagcaacttcagcaaagtctcaggatacaaaatcaatgtgcaaaaatcacaaacattcttatacaccaataacagacaaacagagagccaaatcatgagtggactcccattcacaattgcttcaaagagaataaaatacctaggaatccaacttacaagggatgtgaaggacctctgcaaggacaactacaaaccactgctcaatgaaataaaagaggacacaaacaaatggaagaacattccgtgctcatggataggaagaatcaatattgtgaaaatggccatactgcccaagctcttagatcattttaccggattctttggatttcttggattgcatttcaactttttcctggatctcagtgagcttctcaccatccaggttctaaattctatacctatcacttcagtcatttcagtctggttaagaaccattgctgggggctactgtgctcatttggaggtgttctgggctgtggggctccctcagatagaggtcatggctggcagacaggccacttccttcccagaccagccctgtggagagaggcaccccactttcatgctggtccatgaaccagggcatctcaaccctctcagtgttttgagagtgagaacatttcccccactcaggcaccaccaagccaatgacatgattgtatatttagaaaaccccatcgtctcagcccaaaatctccttaagctgataagcaacttcagcaaagactcaggatacaaaatcaatgtacagaaatcacaagcattcttatgtactaataacagacaaacagagagccaaatcatgagtgaactcccattaacaattgcttcaaagagaataaaatacctaggaatccaacttacaagggatgtgaagcacctcttcaaggagaactacaaaccactgctcaatgaaataaaagaggatacaaacaaatggaagaatattccatgctcatgggtaggaagaatcaatatcgtgaaaatggccatactgcccaagatgttacattcagcagagaataaacaatggcttagccccaaacagagaggtggcagcatggagaacaggattgatgtttggaatattgttcttaaggggctaagcacatcatccaacactgtcctggattcgagccccatagtattagtgacagattccccaggccacatctacattgatctttgtggaacatataacaacagggaaaattag

SEQ ID NO: 125118 - DNA, 1286 bp, Homo sapiens
tatctagagtacaaaactttggtgctgatagtgagaaatcaacgtgccgcacatttgctattccttgggttcttggtctcgctgacttcaagaatgaagccgcagaccctcgtggaacaaagccacagaccccggcagtgagtgttatagctcttaaaggtggcgcacgtccagagttgtttgttcctcccagtgggtttgtggtctcgctgacttcaggagtgaagccgcagaccctcgcgaattgcttcaaagagaataaaatacctaggaatccaacttacaagggatgtgaaggacctcttcaagcagaactacaaaccactgctcaacgaaatcaaagaggacacaaacaaatggaagaacattctatgctcatggataggaagaatcaatattgtgaaaatggccatactgcccaagtgttaccggacgagggtgtccaggttcctggcgttttgaacaaagaattggacaaaacacagaaacaaagcaatgaagcaatgaagccacaaaagcagagatgtattgaaaacgaaaagtacactccacagggcgtcggacccgaagtccacgagccggaactcagagcaggagccgaaggaccccagcgcagaatccgtggaggcgcacggcttcatccaccgcgctcccagatggggtcccagcccagatccggccacgaagacacaggcaaccccggcctgggtttcctgttccatgagctccaggaaggcgacagtcagtgcttgtctggggacccggaccggtgctttggggaactcccccggagggagagagtttggggaactctcccgagaagggaactttcccggagaggggggcgtggaccggacgctgctgcgcctcctctctcaggccgcggttctatgctgccctgtgcccgcgccaaacgccctgatctctctctgtctcctctctcaatctctctttgcctttcctcctttccagatgcgaaggctgtagggactttggtgactgaagctggaggagacgaggagaagaaaatacggtccaaacccgagcagggagctggagcagaagaagaaagtcacttctgtgcgggagctgccgaccccacgatcaaggataaccagaagcgcggcggtggcgaccaggagccctcgcagcagcagcctgaggcttccagcccaggactcctccgcggaggagccacaaccccaatattagcggcgtctcttcagccccagtgcgttcagcaggttgcacctgaaggagctagacagcattttcccacgctctga

SEQ ID NO: 125119 - DNA, 1826 bp, Homo sapiens
atgcacacagccccgtttatttttccagtgaagcgcactgtccctgaccccggtgaatactgggatggtagtcctgtagccacgggaccggaaagtctgggagtctttatgaaactacatctcccagcaaccctggcgacctggggctccagtcccaccgcagactctggtgggacgtgggtggcgcaagcacatcttggccctgcgactcagcttgagggggcccaagctgtcccactgagcaagcgcccagcaggccgccgtgctgtgggtcctggtcctcctggcatttgttggggtgcggaggccaccgaggagtctgaggtgttggaagttctggccagggcaatcaggcaggagaaggaaataaagggtattcaattaggaaaagaggaagtcaaattgtccctgtttgcagacgacatgattgtttatctagaaaaccccatcgtctcagccgaaaatctccttaagctgataagcaacttcagcaaagtctcaggatacaaaatcaatgtacaaaaatcacaagcattcttatacaccaacaacagacaaacagagagccaaatcatgggtgaactcccattcacaattgcttcaaagagaataaaatacctaggaatccaacttacaagggatgtgaaggacctcttcaaggagaactacaaaccactgctcaaggaaataaaagaggacacaaacaaatggaagaacattccatgctcatgggtaggaagaatcaatatcgtgaaaatggccatactgcccaaggtaatttacagattcaatgccatccccatcaagctaccaatgactttcttcacagaattggaaaaaactactttaaagttcatatggaaccaaaaaagagcccgcattgccaagtcaatcctaagccaaaagaacaaagctggaggcatcacactacctgacttcaaactatactacaaggctacagtaaccaaaacagcatggtactggtaccaaaacagagatatagatcaatggaacagaacagagccctcagaaataatgccacatatctacaactatctgatctttggcaaacctgagaaaaacaagcaatggggaaaggattccctatttaataaatggtgctgggaaaactggctagccatatgtagaaagctgaaactggatcccttccttacaccttatacaaaaatcaattcaagatggattaaagatttaaacgttaaacctaaaaccataaaaaccctagaagaaaacctaggcattaccattcaggacataggcgtgggcaaggacttcatgtccaaaacaccaaaagcaatggcaacaaaagccaaaattgacaaatgggatctaattaaactaaagagcttctgcacagcaaaagaaactaccatcagagtgaacaggcaacctacaacatgggagaaaattttcgcaacctactcatctgacaaagggctaatatccagaatctacaatgaactcaaacaaatttacaagaaaaaaacaaacaaccccatcaaaaagtgggcgaaggacatgaacagacacttctcaaaagaagacatttatgcagccaaaaaacacatgaagaaatgctcatcatcactggccatcagagaaatgcaaatcaaaaccactatgagatatcatctcacaccagttagaatggcaatcattaaaaagtcaggaaacaacagtctaattgtcggcgccagcatggacacctccctcctctccgggccgattccgtatgatatacaacactttgatcgtttcggaagcgtgacagttcgacgcgggtgcgcgatcgagttttacaacac

SEQ ID NO: 125120 - DNA, 1646 bp, Homo sapiens
atggataaatttctcgacacatacactctcccaagactaaaccaggaagaagttgaatctctgaatagaccaataacaggagctgaaattgtggcaataatcaatagcttaccaaccaaaaagagtccaggaccagatggattcacagctgaattctaccagaggctgataagcaacttcagcaaagtctcaggatacaggatcaatgtacaagaatctacaagcattcttatacaccatcaacagacaaacagagagccaaatcatgagtgcactcccactcacaattgcttcaaagagaataaaatacctaggaatccaacttacaagggatgtgaaggacctcttcaaggagaactacaaaccactgctcaacgaaataaaagaggatacaaacaaatggaagaacattccatgctcatgggtaggaagaatcaattatcctgaaaatggccatactgcccaagaattggaaaaaaactactttaaagttcatatggaaccacaaaagagcctgcattgccaagtcaatcctaagccaaaggaacaaagctggaggtatcacgctacctgacttcgaactatactacaaggctacagtaaccaaaacagcatggtactggtaccaaaacagagatatagatcaatggaacagaacagaaccctcagaaataacaccacacatctacaaccatatgatctttgataaacctgacaaaaacaagaaatggggaaacgattccctatttgacaaatggtgctgggaaaactggttagccatatgtagaaagctgaaactggatcccttccttacaccttatacaaaaattaattcaagatggattaaagacttaaatgttagacctaaaaccataaaaaccctagaagaaagcctaggcaataccattcaggacataggcataggcaaggacttcatgtctaaaacatcaaaagccatgacaacaaaagccaaaattgacaaatgggatctaattaaactaaagagcttctgcacagcaaaagaaactaccatcagagtgaacaggcaacctacagaatgggagaacatttttgcaatctactcatctgacaaaggactaatatccagaatctacaaagagctcaaacaaatttacaagaaaaaaacaaacaaccccatcaaaaagtgggcgaaggatatgaacagacacttctcaaaagaagacatttatgcagccaaaaaacacatgaaaaaatgctcatcatcactggccatcagagaaatgcaaatcaaaaccacaatgagataccatctcacaccagttagaatggcgatcattaaaaagtcagggaacaacagaactagagaaaactattttaaaattcatatggaatcaaaaaagagccaaaatagccagggcaatcgtaaggaaaaagaacaaagctggaggcatcatgctaccagacttcaaactatagtacagggctatacagtagccaaaacagcatgctactggtacaaaaacagacctacagaccaatcaaacagaacagagaaccaagaaataagactgcatacctacaaccatctgatcttcgacaaacctgacaaaagcaatggagaaacgactccctattcaataaatggtgctaggataactggctag

SEQ ID NO: 125121 - DNA, 3859 bp, Homo sapiens
atgacaggatcaaattcacacataacaatattaactttaaatataaatggactaaattctgcaattaaaagacacagactggcaagttggataaagagtcaagacccatcagtgtgctgtattcaggaaacccatctcacgtgcagagacacacataggctcaaaataaaaggatggaggaagatctaccaagcaaatggaaaacacaaaaaggcaggggttgcaatcctagtctctgataaaacagactttaaaccaacaaagatcaaaagagacaaagaaggccattacataatggtaaagggatcaattcaacaagaggagctaactatcctaaatacttatgcacccaatacaggagcacccagattcataaagcaagtcctgagtgacctacaaagagacttagactcccacacattaataatgggagactttaacaccccactgtcaacattagacagatcaacgagacagaaagtcaacaaggatacccaggaattgaactcagctctgcaccaagcggacctaataggcatctacagaactctccaccccaaatcaacagaatatacatttttttcagcaccacaccacacctattccaaaattgaccacatagttggaagtaaagctctcctcagcaaatgtaaaagaacagaaattataacaaactatctctcagaccacagtgcaatcaaactagaactcaggattaagaatctcactcaaagccgctcaactacatggaaactgaacaacctgctcctgaatgactactgggtacataacgaaatgaaggcagaaataaagatgttctttgaaaccaacgagaacaaagacaccacataccagaatctctgggacgcattcaaagcagtgtgtagagggaaatttatagcactaaatgcctacaagagaaagcaggaaagatccaaaattgacaccctaacatcacaattaaaagaactagaaaagcaagagcaaacacattcaaaagctagcagaaggcaagaaataactaaaatcagagcagaactgaaggaaatagagacacaaaaaacccttcaaaaaatcaatgaatccaggagctggttttttgaaaggatcaacaaaattgatagaccgctagcaagactaataaagaaaaaaagagagaagaatcaaatagacacaataaaaaatgataaaggggatatcaccaccgatcccacaggaatacaaactaccatcagagaatactacaaacacctctacgcaaataaactagaaaatctagaagaaatggatacattcctcgacacatacactctcccaagactaaaccaggaagaagttgaatctctgaatagaccaataacaggctctgaaattgtggcaataatcaatagtttaccaaccaaaaagagtccaggaccagatggattcacagctgaattctaccagaggtacaaggaggaactggtaccattccttctgaaactattccaatcaatagaaaaagagggaatcctccctaactcattttatgaggccagcatcattctgataccaaagccgggcagagacacaaccaaaaaagagaattttagaccaatatccttgatgaacattgatgcaaaaatcctcaataaaatactggcaaaccgaatccagcagcacatcaaaaagcttatccaccatgatcaagtgggcttcatccctgggatgcaaggctggttcaatatacgcaaatcaataaatgtaatccagcatataaacagagccaaagacaaaaaccacatgattatctcaatagatgcagaaaaagcctttgacaaaattcaacaacccttcatgctaaaaactctcaataaattaggtattgatgggatgtatttcaaaataataagagctatctatgacaaacccacagccaatatcatactgaatgggcaaaaactggaagcattccctttgaaaactggcacaagacagggatgccctctctcccccactcctattcaacatagtgttggaagttctggccagggcaattaggcaggagaaggaaataaagggtattcaattaggaaaagaggaagtcaaattgtccctgtttgcagatgacatgattgtatatctagaaaaccccattgtctcagcccaaaatctccttaagctgataagcaacttcagcaaagtctcaggatacaaaatcaatgtgcaaaaatcacaagcattcctatataccaacaacagacaaacagagagccaaaccatgagtgaactcccattcacaattgcttcaaagagaataaaatacctaggaatccaacttacaagggatgtgaaggacctcttcaaggagaactacaaaccgctgctcaacgaaataaaaagaggacacaaacaaatggaagaacattccatgctcatgggtaggaagaatcaatatcgtgaaaatggcccatactgcccaaggtaaatttatagattcaatgccatccccatcaagctaccaatgactgttttcacagaattggaaaaaaactactttaaagttcatatgggaaccaaaaaagagcctgcatcgccaagtcaatcctaagccaaaagaacaaagctgggaggcatcacactacctgactttcaaactatatatactacaaggctacagtaaaaaaaaaacagcatcggtactggtaccaaagacagagatatagatcaatggaaaagacagaacagagccctcagaaataatgccgcatatctacactattctgatcctttggacaaacctgagaaaaacaagcatgggggaaaggcatccctaatttataaaatggctgctggggaaaactggctagcccatatgtaggaagctgaaactggatcccttccttacaccttatacaaaaatcaattcaagatggattaaagatttaaacgttaaacctaaaaccataaaaaccctagaagaaaacctaggcattaccattcaggacataggcgtgggcaaggacttcatgtccaaaacaccaaaagcaatggcaacaaaagacaaaattgacaaatgggatctaattaaactaaagagcttctgcacagcaaaagaaactacccatcagagtgaacaggcaacctacaacatgggagaaaattttcgcaacctactcatctgacaaagggctaatatccagaatctacaaagaacttaaacagattttacaagaaaaaaacaaaacaactgcatcaaaaagtgggcgaaggacatgaacagacacttctcaaaagaagacatttatgcagccaaaaaacacatgagagcatggctcatcatcactggccatgcagggagatgcaaatcaataccactatgagatatcatctcacaccagttagaatggcaatcattaaaaagtcaggaaacaacaggtgctggagaggatgcggagaaataggaacacttttacactgttggtgggactgtaaactagttcaaccattgtggaagtcagtgtggcgattcctcagggatctagaactagaaataccatttgacccagccatcccattactgggtatatacccaaaggactataaatcatgctgctataaagacacatgcacacgtatgtttattgcggcactattcacaatagcaaagacttggaaccaacccaaatgtccaacaatgatagactggattaagaaaatgtggcacatatacaccatggaatactatgcagccataaaaaatgatgagttcatatcctttgtagggacatggatgaaattggaaaccatcattctcagtaaactatcgcaagaacaaaaaaccaaacaccgcatattctcactcataggtgggaattga

SEQ ID NO: 125122 - DNA, 439 bp, Homo sapiens
gctgcctcgggcctctgacgccgagcccaggaagtgcgtcccctccgtggtcgtgggcgtcgtgggcatgggccacgtgcctggcatcgagaagaactggagcaccgacctcaacatccaggagatcatgacagtgtctcggttggccgtgaaggccgccttcttcggcctgctgggctacagcctgtactggatgggccgccgcaccgcgagcctggtcctgtcgctgcccgccgcgcagtactgcctgcagagggtgaccgaggcccggcacaagtaggagactgctccccgcccgctcgggcccctgaggagccagtgcccccgcggcacttctgggtgccaggtgcatcctagcccgcccgaggcccctgccaccccccatgggggtctgggcccggcctcgcctgccctcctgggccagtcacccctcccccag

SEQ ID NO: 125123 - DNA, 719 bp, Homo sapiens
  misc_feature (1)...(719): n = a,t,c or g
agtgcgtcccctccgtggtcgtgggcgtcgtgggcatgggccacgtgcctggcatcgagaagaactggagcaccgacctcaacatccaggagatcatgaccgtgcccccgccgtccgtctccggcagagtgtctcggttggccgtgaaggccgccttcttcggcctgctgggctacagcctgtactggatgggccgccgcaccgcgagcctggtcctgtcgctgcccgccgcgcagtactgcctgcagagggtgaccgaggcccggcacaagtaggagactgatccccgcccgatcgggcccctgaggagccagtgcccccgcggcactttctgggtgccaggtgcatcctagcccgcccgaggcccctgccaccccccatgggtncttggggcccggcctcgcctgccctcctgggccagtcacccctcccccagcccacccaaataaaggattatttaactgtctgagctcaggcctcccggcagcccctcccctcccacactgcaggggccgttccccggcttctgggacaagacacccagctccgagggggcaggggcttataggaggggccgaggcgttgcgctgccctctcagccctggttgcaggcgggggacaatgggccaatgttccctaacttcaatgtggctttctgttgtttcgggcaaaagagcgtttggccaagggggggtttctgggggtttcagggtaagttt

SEQ ID NO: 125124 - DNA, 1431 bp, Homo sapiens
cgcagcctcccgcccggctgcacaggagtttctttaaggagtttccccggtgtgcctcggcagccttgcgctgctctaatggtccggacttccgtgtgtgagtttcccccgtgcgccccggcagtcttgcgctgctcctaagagttggccctcgtttttcagggtgtgtggtccacacagcggccacgggtccctttccagggtacgtggtccgtggagttgccacggagccctggctttctggggtgcatggaccctgacttgaactctcctttccacctgcaggccaacgtggggtgctttctggagacccccagaacctgtgtacgtgtccctcagggtcctggcacgttccccggtgttgggctgttgagcgtcagcggcccaacctgccgcgcactgtgacccagttggtggctgaggacgggagcagggtgtacgtggtggggacagcccacttcagcgacgacagcaagagggacgttgtgaaggtgagcgccgccacccgccacatcccggacacgggttggtgtaagctcctgcctgggagccgtgacggccttgtgcgttttcccacttatcgtgtgtccatgctgaagatggacgagagcacgctgctgcgggaggcccaggagctcagcctggagaagctgcagcaggccgtgaggcaggtgcgcagccgcgggcaagggtcagggtcagggtcggggtcaaagccaccacacatcaccgagcagctgggcatggccccaggtggcgagttcagggaggccttcaaggaggtgggcacagggtgaggtagggggtggccacagggatgtggctcacaggccgtcaccttcaagagggccatcgcagcgctctccttctggcagaaggtcaggctggcttggggcctgtgcttcctgtcagaccccatcaggtagggctgcccccgggaccctggccggcctgcagggtggtctgtgggaatggccgagatgattggcgagttcccagacctgcaccgcaccatcgtctcggagcgcgacgtctacctaacctacatgctgcgccaggccgcgcggcgcctcgagctgcctcgggcctctgacggtgacggccgcccgcaggcgtgggaccccctgtgaggctgaggcccgaggggccacgtgcctggcatcgagaagaactggagcaccgacctcaacatccaggagatcatgacgtgagtgcccgcccctccctgcaagccccaccccacaagcccccaggtggccgccttcttcggcctgctgggctacagcctgtactggatgggccgccgcaccgcgagcctggtcctgtcgctgcccgccgcgcagtactgcctgcagagggtgaccgaggcccggcacaagtaggagactgctccccgcccgctcgggcccctgaggagccagtgcccccgcg

SEQ ID NO: 125125 - DNA, 506 bp, Homo sapiens
ctaaagactgccaattttgagtaggaccagaacaaaagaaggctctgtataaggtccatgctcccatacaagctgctctacaacttgggccatatgaatgagcagatctgcgggtgcctgtgttctcatggggagctccctataatcaaccaaggaagaacaaaatttggggtctgctttatatgaccaggagaggattgttttggattgttctgtgtcaacttggttaagctgagaaccgtatttcccagaatctttttccctgtaagattgtaagttaaagctgaccaaaagagaacttgtgtaagatttggaaggcacacatgtgaaacagcagcctttactttctggaagtctttggggctagacaaagtgacaaaaccaaggagctcttcttcccaactcttggccctggcaattaggagcagtccaggttcaacaacagatgcttgtctcctggattctttttcaggtaaatcaaggatttcttcttggtttggatccat

SEQ ID NO: 125126 - DNA, 868 bp, Homo sapiens
  misc_feature (1)...(868): n = a,t,c or g
aattcggcgggagtcgactcacctgcagcaggcactcggcacaactccgcaggaccggctcacctgcaccgggcactcagcacagcctccagcatgcagcgcctccccgctgccacccgggccaccctgatcctcagcctggcctttgcctccctccactcggcttgctcggcagaagcaagcagcagcaacagctcaaccttgaccgctcaccacccagaccctgggaccctggagcagtgcctcaacgtggacttctgcccacaagcagcccggtgctgccgcacaggagtggacgagtacggctggatcgcggcagctgttggctggagcctctggttcctcaccctcatcctgctctgtgtggacaaactgatgaagctgactccagatgagcccaaggacttgcaagcgtgagacccaggctcggtgcacaaaaatggtgatcgccaccaatttgtggctaatggggaaaggggaggaaaggctaacatggtttctattatttaagtcattttcacctttaagcttcagttacttttacaagggaaagaagaaagagcgggagaaccaaataaggcaagccagtgctgcccttgcatgtcactcccaagggcccctgggctgtgcccaggtaactcctctctcaagatagtccctctgtaatgtatcctgttttaacctttcttctaggcaccaagggaggtgcacaagaaactataagacttagtctcatcatcaacattttcagaagcaaagtgctgggattacaggcgtgagccaccgcgcccggcctcacgtgttgtattttcattcatatttcctttgggacttctttntggcccatgcattatttataaatatgttg

SEQ ID NO: 125127 - DNA, 553 bp, Homo sapiens
aaaaagcgtccgtgatcgtccactctgacgtgaagcctttcaaatgcaagctttgtgggaaggaattcaaccggatgcacaacctgatgggccacatgcacctgcactcatacagcaaacccttcaagtgcctctattgcccaagcaaattcaccctgaaggggaacctgacacgccacatgaaagtcaagcatggagtcatggagcggggccttcattcccaaggtctgggaagggggagaatcgccctggcacaaacagacggtgtcctgaggagtctggagcaagaggagccctttgacctctctcagaagcgccgggccaaggtgccggtgttccagtcagacggggagagtgcccaaggcagccactgccacgaggaggaagaggaggataactgctacgaggtggagccctacagccctggcctggccccccagagccagcagctctgcacacccgaggatctgtccaccaagtcggagcacgcccccgaggtgctggaagaagcctgcaaggaggagaaggaggatgcatccaagggagaatggga

SEQ ID NO: 125128 - DNA, 1221 bp, Homo sapiens
atgggcctggcacaggaattggactggtcatttgcaaaggttgcttcttcctgttggaaaacacaggcttcctggtgcatctcatttttaaagctcacaccaggctggctggggcgaggcggtgtgctgcttctggccccagcccagtggctgcccactgctatcaccctgtctctggccacagccgacttctccatggctgtcagcatggccactggggttcatggcaagtgcctgaggtcaccattttcaaatgaatgtggtgtgcaggtgctctgtctggatgctgagcttggaaccccaccctgtaggccaaattcattcatgctagtaagagagagcaaaactttgtgggaaggaattcaaccggatgcacaacctgatgggccacatgcacctgcactcagacagcaaacccttcaagtgcctctattgcccaagcaaattcaccctgaaggggaacctgacacgccacatgaaagtcaagcatggagtcatggagcggggccttcattcccaagtgtcccgcccatccctggaggcctgactattggctcatcaaaggtcaaagccttaaagacaggatcaaatgaaactgccatgctgaaaagcccatccctacagccctgcaaactgaaggcaaaacatttcctcaggtgcatgaattcttactctgctcttgcaggtctgggaagggggagaatcgccctggcacagacagccggtgtcctgaggagtctggagcaggaggagccctttgacctctctcagaagcgccgggccaaggtgccggtgttccagtcagacggggagagtgcccagggcagccactgccacgaggaggaagaggaggataactgctacgaggtggagccctacagccctggcctggccccccagagccagcagctctgcacacccgaggatctgtccaccaagtcggagcacgcccccgaggtgctggaggaagcctgcaaggaggagaaggaggatgcatccaagggagaatgggagaagaggagcaagggtgaccttggggcagagggcggccaggagagagactgtgccggcagagatgagtgtctcagtctcagggcttttcagagtacccggcggggcccctctttttctgattacttatacttcaagcacagagatgagagtttgaaagaattactggagaggaaaatggaaaaacaagcagtgcttttaggtatctaa

SEQ ID NO: 125129 - DNA, 408 bp, Homo sapiens
atggcaatcagcatggtcaccacgcggtccacgacgatcagaacgaccgctgctggatgccactatgagaacgacatggcccacaatcacagtgaccgaggtggcctgcctttgaaggtggtgctgactaccccgtttctgaccccaccaggaaaaggaggtggagcagctggagcacttgagagacgaactgaagaaggtgacagagacgctgggggagcagctcaggagggagggctgacccctacctcagtccctccttcctcctgacacaccctgtggcttaggactgttgaccccgaagcctccacctcacctagcaccccacgccacccctacccaaacaggggaggaggcggacgtgccttggaaccacacccaaggaggtgagtctgagctgggccgggg

SEQ ID NO: 125130 - DNA, 1710 bp, Homo sapiens
atgcatagactggggcggggagaggaaaatttagtgagaggaagacgctcacatgaatctccaaagaaatatcgcgactctaagtcaggacaaaatgtgcctcgactttacaaggaagctaaagaagaaacaaaaatgacagctactaaaactgttattaggtccctcgactatagggtcaccgtcgacagcgacacacttgcatcggatgcagcccggttaacgtgccggcacggcctgggtaaccagtcaattcgggaggatcgaaacggcagatcgcaaaaaacagtacatacagaaggagacatgaacatgaacatcaaaaaaattgtaaaacaagccacagttctgacttttacgactgcacttctggcaggaggagcgactcaagccttcgcgaaagaaaataaccaaaaagcatacaaagaaacgtacggcgtctctcatattacacgccatgatatgctgcagatccctaaacagcagcaaaacgaaaaataccaagtgcctcaattcgatcaatcaacgattaaaaatattgagtctgcaaaaggacttgatgtgtgggacagctggccgctgccaaacgctgacggaacagtagctgaatacaacggctatcacgttgtgtttgctcttgcgggaagcccgaaagacgctgatgacacatcaatctacatgttttatcaaaaggtcttgtacagatggaacagacaaagcagcacatctgtcattgaaacaaataaaacatcggtggagctttctttgcctttcgatgaagattatataatagaaattaagccattcagcgacggaggagatggcagcagcagtgaacaaaattcgaattcaaagatatcaagacacaatttgagaaactggttgttttgccaaggctttgactggaaagacgtgcttctctttaaggaatcaagcttgacttgcagagccaataaaagccccttgggagaactggcctcataccttgtctacacagtttcgtgtacaagggttcttaacctgtggaagttgattggtgttagcactagtttaacaggggagatagacattttccatatgaaagatgaatgtgagcagctctacggacagctgtctttacaaaaggtacaagtaggcagacaaggcacaagggcacctgtggttgggcagtttgtacctgctggcggtgcctatgttgctttctggtataggcctggcgttggaggtcttggcctttgggctggggtgacccatgcttctggtggaggcaagggagccgagctggagccatggccatcaattcgggaggatcgaaacggcagatcgcaaaaaacagtacatacagaaggagacatgaacatgaacatcaaaaaaattgtaaaacaagccacagttctgacttttacgactgcacttctggcaggaggagcgactcaagccttcgcgaaagaaaataaccaaaaagcatacaaagaaacgtacggcgtctctcatattacacgccatgatatgctgcagatccctaaacagcagcaaaacgaaaaataccaagtgcctcaattcgatcaatcaacgattaaaaatattgagtctgcaaaaggacttgatgtgtgggacagctggccgctgcaaaacgctgacggaacagtagctgaatacaacggcatatcacgttgtgtttgctcttgcgggaagcccgaaagacgctga

SEQ ID NO: 125131 - DNA, 1410 bp, Homo sapiens
atgacgggagactttaacaccccactgtcaacatcagacagatcaacgagacagaaagttaacaaggatatccaggaattgaactcagctctgcaccaagcagacctaatagacatctacagaactctccaccccaaatcaacagaatatacattcttctcagcaccacatcgcacttattccataattgacctcataggtggaagtaaagcactcctcagcaaatgtaaaagaatagaaattacaacaaactgtctctcagaccacagtgcgatcaaactagaactcaggattaagaaactcactcaaaaccgctcaactacatggcaactgaacaacccgctcctgaatgactactgggtacataacgaaatgaaggcagaaataaagatgttctttgaaaccaacgagaacaaagacacaacataccagaatctctgggacacattcaaagcagtgtgtagagggaaatttatagcactaaatgcccacaagagaaagcaggaaagatctaaaattgacaccctaacatcacaattaaaagaactagagaagcaagagcaaacacattcaaaagctagcagaaggcaagaaataactaagatcagagcagaactgaaggagatagagacacaaaaaaccattcaaaaaatcagtgaatccaggagctggttttttgaaaagatcaacaaaattgatagactgctagcaagactaataaagaagaaaagagagaagaatcaaatagatgcaataaaaaatgatcaaggggatatcaccacccttgagagagtggtactggaagagccagacaccctacacctcctcaactacaccccaaggaaggtcttgtacagatggaacagacaaagcagcacatctgtcattgaaacaaataaaacatcggtggagctttctttgcctttcgatgaagattatataatagaaattaagccattcagcgacggaggagatggcagcagcagtgaacaaattcgaattccaaagatatcaacactcccccatgctgcacgcagtgaattccaaatgccaaggaaagaaattgggctaaaaatccctattggaacggatatcttggaaaagcatgtttgttctgatcccgtggctgtggaggctctaggagaaaagcttcatggaggaagtgatgatggttacgggttcccaaagaatgactatgagttgcacagggcaagaagggaggaaggagttcccaatccaccaaggaggccaatgggctactttgtgttgctcctgaaacacatataccaagggccagataacggtaccagctcagggaagtgtggcaaggagctccacagagcccagactctcctggagcagcagttctccgagtgtgtcctggagaccagcagcatgagcatcacctga

SEQ ID NO: 125132 - DNA, 1275 bp, Homo sapiens
atggtaaagggatcaattcaacaagaagagctaactatcctaaaaatatatgcacccaatacaggagcacccagattcataaagcaagtcctgagtgacctgcaaagagacttagactcccacacaataatgacgggagactttaacaccccactgtcaacatcagacagatcaacgagacagaaagttaacaaggatatccaggaattgaactcagctctgcaccaagcagacctaatagacatctacagaactctccaccccaaatcaacagaatatacattcttctcagcaccacatcgcacttattccataattgacctcataggtggaagtaaagcactcctcagcaaatgtaaaagaatagaaattacaacaaactgtctctcagaccacagtgcgatcaaactagaactcaggattaagaaactcactcaaaaccgctcaactacatggcaactgaacaacctgctcctgaatgactactgggtacataacgaaatgaaggcagaaataaagatgttctttgaaaccaatgagaacaaagacacaacataccagaatctctgggacacattcaaagcagtgtgtagagggaaatttatagcactaaatgcccacaagagaaagcaggaaagatctaaaattgacaccctaacatcacaattaaaagaactagagaagcaagagcaaacacattcaaaagctagcagaaggcaagaaataactaagatcagagcagaactgaaggagatagagacacaaaaaaccattcaaaaaatcagtgaatccaggagctggttttttgaaaagatcaacaaaattgatagactgctagcaagactaataaagaagaaaagagagaagaatcaaatagatgcaataaaaaatgatcaaggggatatcaccacccttgagagagtggtactggaagagccagacaccctacacctcctcaactacaccccaaggaaggtcttgtacagatggaacagacaaagcagcacatctgtcattgaaacaaataaaacatcggtggagctttctttgcctttcgatgaagattatataatagaaattaagccattcagcgacggaggagatggcagcagcagtgaacaaattcgaattccaaagatatcaaaaaaaaaacaaaatagccaaatccgtggagacagaagtgaggctagtgattggcagtggctgatgcctacgcgagaggatctggggcttccacttcgaatgcatgtacgctgtcagccatcagtacaataa

SEQ ID NO: 125133 - DNA, 597 bp, Homo sapiens
atgctacatacaaagcagcacctttccatgggcacagaagacatggatgataagcttcatttctcagactgttcagcagcatccctggtctctctatccactacaacaggaggacatgttttgacaaacatgtctgcagacattgccagatacctccctgtcttgtacagatggaacagacaaagcagcacatctgtcattgaaacaaataaaacatcggtggagctttctttgcctttcgatgaagattatataatagaaattaagccattcagcgacggaggagatggcagcagcagtgaacaaattcgaattccaaagatatcaaatgcctaggcgagaggatctggggcttccactccgaatgcatgtgcgctgtcagccatcagtagaataatgatttccctcacagctaggtccagtttatgacaaaagttatctgaaggacttgctgtttataatataagcaacatttagctagttgttttgaagacacccagtactaagtaatattgttgttcaagtacatcttattactggaataaaaatgttttttgcttctttaaaaaaaaaaaaaaaaaaaaaaaaaaaaaaaaa

SEQ ID NO: 125134 - DNA, 1086 bp, Homo sapiens
atgatcgtaccctggctgaggctccacacactgcccctgcccgcagtggccaccgcggctggtgccccagaccccaccgccggcgcaggaatcgaggacgccaactgctggcacctggacgaggagcagatccaggagcaggtgaagcagctactgtccaatggcggctactacggggccagccagcagctgcgctccatgttcagcaaggtgcgggagatgctgcgaatgcgggactccaacggggcgcgcatgctgattctcatgaccgagcagttcctgcaggacacgcgcctggccctgtggcggcagcagggcgcgggcatgacggacaagtgccggcagctctgggatgagctgggggccctgtgggtttgcgtcgtcctgagcccccactgcaaaccagaggaaagggcaggctggctccagctactcagcaggtgggacaagctcgacgtctgcccactggaagagggcaactactccttcgacggccccagcctgcagcccaccatggcccccgccccaggctcggaggaagaggaagaggtggcagccacaagtccccgccacacggtatttggccgcgccttgctggctggagagctacactggaatgacgcctacctgcagaggatcctggccagtgactcctacgggcccagcctcacaggcagcgtgggtggggacaaaccgactttcgacccccagggccgcccactgtggctgggagaacctttccccactgcctgtgcccgtgtggacaccctgcgtgcccacggatacccccgccaggccctgcggctggcaagtgccatcatcaacacactccggctgcagcagcggcatcagctagagagctacaagcagcagaaaaaagatgcattaagccagccacgattagatattcccaaggccctgatggagacccccaaaattacacgctatacacagacatacagcaccccgattaatacgcagtcgaaagtgatgctgacacacacatacagtccccacaataacactgccacgtgtgtagacacgtcacccacaagggctcggacatccagggatagtgcccattga

SEQ ID NO: 125135 - DNA, 828 bp, Homo sapiens
ttaacatgggctcggtagggccctgtatcctcccagctcaggttgctgatctacacgcagggataaacctggactcatgacactcaagcgacccgaggaccaggtttccgcttggtaaaagatgtctgggcccccagcttctcccatggttactgtggtgatctccatggggaccgaacgcgatatccaggagatggtcgccacctcctgtccagagcgatatccaggagatggtcgccacctcctgtccagagcgatatccaggagatggtcgccacctcctgtccagagcgtctgcaggggcagaatgacagaccctcctaggtcccagtgaccactaggggtgctgtggtccctctggaagtccctggtccattctgatgcaggtgctggtgagttatgagaggtcatcacaggtagtacttggccaaacccataacagtgctgcttggttcccaatgtggatgatgaagaagaaggagaagaacaagatgatgatgatgatgaagaagaggaaggattataagatattgatgaagaaggggatgaggatgaaggcgaagaagaggaagatgatgatgacgttgaggaaggagaggaggatgaaggagaagatgactggaaatttgcaaaagaatagagctgactattctccagtcttacccctccaaagcccttgactggggagggatcactgacctttttcagtgtctcttgccttactagtttttccttaggactcttgctgaagctgaatccgataattggaaagacagaccagccaaggtgcccgccatgaaccgttgctagagaagggtccctgagcat

SEQ ID NO: 125136 - DNA, 683 bp, Homo sapiens
tgatatttggccaaacccattacagtactacttggttcccgatatggatgatgaagaaggagaaggagaagaagatgatgatgatgatgaagaggaggaaggattagaagatattgacgaagaaggggatgaggatgaaggtgaagaagatgaagatgatgatgaaggggaggaaggagaggaggatgaaggagaagatgactaaatagaacactgatggattccaaccttcctttttttaaattttctccagtccctgggagcaagttgcagtctttttttttttttttttttttttccctcttgtgctcagtcgccctgtttttgaggttctcttttctctactccatggttctcaatttatttggggggaaataccttgagcagaatacaatgggaaaagagtctctacccctttctgttcgaagttcatttttatcccttcctgtctgaacaaaaactgtatggaatcaacaccaccgagctctgtgggaaaaaagaaaaacctgctcccttcgctctgctggaagctggagggtgctaggcccctgtgtagtagtgcatagaattctagcttttttcctcctttctctgtatattgggctcagagagtacactgtgtctctatgtgaatatggacagttagcatttaccaacatgtatctgtctactttctcttgttt

SEQ ID NO: 125137 - DNA, 1472 bp, Homo sapiens
tttcaaaggacacaaagagagatgtggactcaaagtcaccggggatgcctttatttgaagcagaggaaggagttctatcacgaacccagatatttcctaccactattaaagtcattgatccagaatttctggaggagccacctgcacttgcatttttatataaggatctgtatgaagaagcagttggagagaaaaagaaggaagaggagacagcttctgaaggtgacagtgtgaattctgaggcatcatttcccagcagaaattctgacactgatgatggaacaggaatatattttgagaagtacatactcaaagatgacattctccatgacacatctctaactcaaaaggaccagggccaaggtctggaagaaaaacgagttggtaaggatgattcataccaaccgatagctgcagaaggggaaatttggggaaagtttggaactatttgcagggagaagagtctggaagaaccgaaaggtgtttatggggaagggagaatcagtagaccatgtggagaccgttggtaacgtagcgatgcagaagaaagctcccatcacagaggacgtcagagtggctacccagaaaataagttatgcggtttccttttgaagacaccccatcatgttctggagcgtgcagatgaagcaggcagtcacggtaatgaagtcggaaatgcaagtccagaggtcaatctgaatgtcccagtacaagtgtccttcccggaggaagaatttgcatctggtgcaactcatgttcaagaaacatcactagaagaacctaaaatcctggtcccacctgagccaagtgaagagaggctccgtaatagccctgttcaggatgagtatgaatttacagaatccctgcataatgaagtggttcctcaagacatattatcagaagaactgtcttcagaatccacacctgaagatgtcttatctcaaggaaaggaatcctttgagcacatcagtgaaaatgaatttgcgagtgaggcagaacaaagtacacctgctgaacaaaaagagttgggcagcgagaggaaagaagaagaccaattatcatctgaggtagtaactgaaaaggcacaaaaagagctgaaaaagtcccagattgacacatactgttacacctgcaaatgtccaatttctgccactgacaaggtgtttggcacccacaaagaccatgaagtttcaacgcttgacacagctataagtgctgtaaagactgttatcagagactctgataagactaaaagtggtgagggggcgtatgggagggaaatgaagtcccctcacaagtttccagaaggaaaaatccacaacgacaaagaacatgataggatcgtccaagaatttctggcagagactggaccaaaagtcacaaggtttaatgagcagtgtcgtttcaggccacgaatttatgtgtatgaaaataaccagacccagatcatggtggaggagccacaagcctga

SEQ ID NO: 125138 - DNA, 440 bp, Homo sapiens
  misc_feature (1)...(440): n = a,t,c or g
gggggggcgcaccacactntttgagagaaacgagcgncnctggattcgcgggccgttcacacgtagcctgtgccggtttcctcgggtgagtccgtccgcgcgcggtgccgggggacggcctaggctgccgggggtccggggccccaggcattccgggctgcagattgacggggatcccggatgcaccgcgcgcccccgcgccctcaccgacgggtccagacctggtgggaagaaggtgcggggacgggtccctgaggatcccgatgcctacgagccaagatgctcagctttataggtgtgacctacacatgtgacttcacctcagttttgtgatccgtaaaatggacaaattcgaagnnnnnnnnnnnnnnnnnnnnnnnnnnnnnnnnnnnnnnnnnnnnnnnnnnnnnntgcaggagggagcctcggaagcagggccc

SEQ ID NO: 125139 - DNA, 889 bp, Homo sapiens
cctcggcggcctagtacacacgcacctgagtgagtggcaccagaggaccctctccatgtttagggacctcctgggcctcaggagcgtggcgcccgcccctgggcggactccccccatccgcgggcgcgaatggtccgggccgcgtccgcagtgctgctggctgctccctggttgctgggtgcaaagtgctgggttcttgggtttctggattcgcgggccgttcacacgtagcctgtgccggctcctcgggtgagtccgtccgcgcgcggtgccccgggacggcctaggctgccgggggtccggggccccaggcattccaggctgcatattgacagggatcccggatgcaccgcgcgcccccgcgccctaaccgacaggtccagacctggtgggaagaaggtgcggggacgggtccctgaggatcccgatgcctacgagccaagatgctcagctttataggtgtgacctacacatgtgacttcacctcagttttgtgatccgtaaaatggacaaattcgaagctacttcacagtgctgttgagaggattaaatgaaacaatgcttgtaaagctatttgcaggaggtaggcatgggatccacgctggctgtcattgcccccacccccatcagtacacataggaaagtgcctgtctcccctaccaccatagtgtgttttctggttggtgcctaaatagacacaggtgtcatctctccttcaccgccagagtcattctgtaaataattgccagtagcccccctttcaccaccattatgacaactaaaaaaaagccaaagaaatttccaaaatgccccctgaagttgacagctcccctttgagagactgtgtgagagagaactaaacccttgggatgagaacttcacacactac

SEQ ID NO: 125140 - DNA, 387 bp, Homo sapiens
  misc_feature (1)...(387): n = a,t,c or g
ggaacgtctccggatgccaggagtcgcaaagggccgaccacgatgaggaaaccccaggcggggacgggggaannnnnnnnnnnnnnnnnnnnnnnnnnnnnnnnnnnnnnnnnnnnnnnnnnnnnnnnnnnnnnnnnnnnnnnnnnnnnnnnnnnnnnnnnnnnnnnnnnnnnnnnnnnnnnnnnnnnnnnnnnnnnnnnnnnnnnnnnnnnnnnnnnnnnnnnnnnnnnnnnnnnnnnnnnnnnnnnnctggtggtgtgtgtttcaatgcctctgctgtatgacgcnnnnnnnnnnnnnnnnnnnnnnnnnnnnnnnnnnnnnnnnnnnnnnnnnnnnnnnnnnnnnnnnnnnnnctcccagtctctcttctctcactgtctctca

SEQ ID NO: 125141 - DNA, 1422 bp, Homo sapiens
atggccccaccgcgatgtccccgtccccccgccccgcccccctccccgccacgcctctccctcagcagccagtgccgcactgagccctcgccccacgctaatgcgatatggagagacccggtacagctgttgggagctgcctctcccgccctcaatctccctgtctgtggttccagagggaagaagagtggggaaaaaaggatgaagagaattgtttcagtgctgggggaggtcttaataattactgtagattgtgctgggaatacattatggaaattttgtcgagtgaataaaagtcaattatatacattatgtacaacagtacaagtaggccttgagacctacgggatcattctgtgttgcagcaaggccctgcctgcctcaccagatgtggtgagcctatcctatctcactcggaggggtccaaaatcggatctgaacgggagtctggagaacacagcaggcatcctgaagctccacctccctccgtggaagtcggctcaaggaggtcctgaggacaggactcctaggggtttggccctgggaacggacaagacacccgcggccccctctcccacgccgccccaaactggaccccggatccagccgccgccgtggcggcaggaggaacctcgctgccgccgcgcggcggtggcggtatttaaaggggacgcagccatactgccaggagcggagcgcgagtcggctcagccaatgcgcatgcgcgaggcgggagcggtttctcccgtcacagtggttcccatggttgtcttagaaaccagtccccgaggcttggcaaagcaggagccctctgtggcagtgcttgggtgtcggggctctgaggatccggcctcacctctccacggggtcgacgggaacgtctccggatgccaggagtcgcaaagggccgaccacgatgaggaaacccgacgcagagtccggagaaggcagcatggaatccctccctcaggcctctctggacggtgttggtgggggatcaagatgaacacactgcagacgaggacacgagccccacaggagctctttgtcccgccggagaccagcggacccacgtcagagaagatgcttgtatcttttcacggctcttctctgagaaatgaagccacaccacaatacggtctggaagaggaagccgggaatgggagatggcaacagtctcctgtcactggaatgctggcctttttggacaagccacccttttggaacccccatcccttatgaccctggcagtggaacggtgatttatcctgcctggccgccggggtttgccctgtcctccctcctgctttgcctcacctgtttcccaagtgcctcaatgcctttcgctgacgcccaatgttttcaacaaagatgacttcccagtccgtcagggagacattttttcgaaaaaaaaaaaaaaaa

SEQ ID NO: 125142 - DNA, 479 bp, Homo sapiens
cttcttgtgcaaagcttcattctcggttcaatatctaacctccctactggggacattttcattcctctgctgcagcctctgcagctttgaaggggaaagacggaggaagcagcaggagcctagtaccaccggcacagtgacactcacacagccccagcaaaacgcactgcgtccacacgccgtcccggtcctgtgcacagggcctcacgcacacactcacacagtcccctccgtcactcaagatcgcgcaatccccatcctttgatgcccgcgcacacgcacgcctaaggatctggcagattccgtctgcgccccgggttcctcctctgagcgcctcgctctcgcccacccgcactgccgggtcggtcaggttcgagtcccagtccacgaagacctcccgcagccaccgatttcttcctaggacgtgaagaccttacccagctaggtcgtcaacccacgaaatcgtcgacccgggaatt

SEQ ID NO: 125143 - DNA, 813 bp, Homo sapiens
atggatgactttgaggggtccaagacttcagtggaagaagcaattgccgatgtggtagaaatagcgagaaccagaaatctggcaaacatccccaagccagagctggagtacctggagtgggtgggggtaagaagggaagccaaggtcgtcccggaagctggatcagagcactgcttctctcaacattcgattctggagtacgttgagcccagggcgttctccccgccagcgtccttgcccgcgccagtgcccgccggggtgcggcgagacagaacctgggagcgcggcgcgccaggcagcccgaggcaccgctggtggcaggcgctgcgcttcgccgagtctgggcgcctggactggaagaggaggcgagagggagagagcggggaagaggaggaggaggaggagcaggagcaggagcatgggcaggggcagtctgctaaatcatctacgcagcgagcctgggttgaggagggagaggaacggcgggagcagttgacgggtttgcacgctttctctacgcggttccaacggcaaacagaccctctggaggtgcatttcttagccctcctccaggggagattacagtcaacatccacaggatgcctcaaggagagagattacaaggaagggaatggggatgataagtcttgtacgagggtttctcacatgagacagtgcattaaagttcatggcacagtggctggcacacaagctgtacggacttccagtatcatcctgtcattacagaacatcacagaaattgttgtccacatagttgaatacatagacaaaggattagaccgtattacatga

SEQ ID NO: 125144 - DNA, 450 bp, Homo sapiens
ttaggacaccgagcagtaagggctgtgggagaccccccaggggtatgggagcccaagggtctgctggttgcggacgccgccgatcaccacgcagatctcggcaggcacgtcgctggtcccatccttgctgaccgccttcttctcctccttggcctcgccctgccagatcacctcctggatgtagtcatcgggcagctctgtcttcaccttcacctccgtcatcgttccttgctcggcactcagcgaggcctcggctggcactggctctgggccctccaccttggtgctcttctggctgcgcttcaagcgctccctttgaccttcagcatccagaacagagccaaaaccaagatgctcgtgggtgagcaggaggacagtaggttccctggctttccgggctgctgccaccgttttcatcctgatggacccaatgagcaccagaatagccat

SEQ ID NO: 125145 - DNA, 412 bp, Homo sapiens
gaatcagttctgtgtatccaacattaatcagaaggtgaagtttcagcctcttagcaaatatccggctgtgatcaatgatatttcattctggttgccctctgagaattacgcagaaaatgatttctatgacttagtccgaacaattggaggagacctggtggaaaaggttgatctcatagacaagtttgtacatccaaaactcactccttgttccggggactgctggcctgccacttcctgctcacagtcgcagatggggcttcctgagtctgtgcactgtcagtcagagctgagatgctagaggacgcacaagaccagccactgctactcgatcacgtaccgccacatggaacggaccttgcccagagagagggaaggccattcaccagggctttgcggaagctgagcccac

SEQ ID NO: 125146 - DNA, 375 bp, Homo sapiens
actgtgcaagagaaggatagggtgcagtaacagaaaatgatttctatgacttagtccgaacaattggaggagacctggtggaaaaggttgatctcatagacaagtttgtacatccaaagtaagtgaaaagctttctgattttacccttgactatctctgtgtgataaatgtcatgtggaagcatccccagcctgcaggtccagatgagggtacgtaataatgttcatactcagatatcccaagtgcatcgccacctacctgctgtcatggatcccagtatcccgcagagccccccagaagtatttctgtaggtcccagggggtgtccacagcaagctaacttccactggacatgacagtgactcccattgggccc

SEQ ID NO: 125147 - DNA, 1534 bp, Homo sapiens
ggaatttctacaatggtgggctcagctctcaggagaggtgcccatgcatatgtctacctggtgagtaaggccagtcacatctccagaggccatcagcaccaggcctggggatcgaggcctcctgcagcagagtgtgccacccaaagagctccaggcagtgtggtggagctgctgggcaaatcctaccctcaggacgaccacagcaacctcacccggaaggtcctcaccagagttggcaggaacctgcacaaccagcagcatcaccctctgtggctgatcaaggagagggtgaaggagcacttctacaagcagtatgtgggccgctttgggaccccgttgttctcggtctacgacaacctttctccagtggtcacgacctggcagaactttgacagcctgctcatcccagctgatcaccccagcaggaagaagggggacaactattacctgaatcggactcacatgctgagagcgcacacgtctgcacaccagtgggacttgctgcacgcgggactggatgccttcctggtggtgggtgatgtctacaggcgtgaccagatcgactcccagcactaccctattttccaccagctggaggccgtgcggctcttctccaagcatgagttatttgctggtataaaggatggagaaagcctgcagctctttgaacaaagttctcgctctgcgcataaacaagagacacacaccatggaggccgtgaagcttgtagagtttgatcttaagcaaacgcttaccaggctcatggcacatctttttggagatgagctggagataagatgggtagactgctacttcccttttacacatccttcctttgagatggagatcaactttcatggagaaatggctggaagttcttggctgcggggtgatggaacaacaactggtcaattcagctggtgctcaagaccgaatcggctgggcttttggcctaggattagaaaggctagccatgatcctctacgacatccctgatatccgtctcttctggtgtgaggacgacgcgcttcctgaagcagttctgtgtatccaacattaatcagaaggtgaagtttcagcctcttagcaaatatccggctgtgatcaatgatatttcattctggttgccctctgagaattacgcagaaaaatgatttctagtacttagtccgaacaattggaagtgacctggtggaaagggttgatctcatagacaagtttgtacttccaaagacgcacaagaccagccactcgtaccgcatcatgtaccgcccacatggaaccgactctgtcccagtagagaggtcaggcacatcctatccaggccttgcaggaggctgcagtccagctgttgggtgtggagggcaggttctgatgtcaccacttcactccaggctgcagccctcttggggctccaggatttgctgaaagagaaaaagatatggtttgtgaactggggcatcaatcatcttttgataaatggatcagttttaggactttcagaaaataaaagatcgctcttgaaaagctaaaa

SEQ ID NO: 125148 - DNA, 445 bp, Homo sapiens
tctctagaccagcgcggaggaattcatttcaacctgctccactccattaccatgtcctgccagtcttaattcactcaatcctagatctgtcagcccaccttctttctccacaggctgctgagccctaagggaaagttttacctaacctgacagatggctccatcttctccactgcacacagaggtgtttttcaaaaagcggatttctactttaagtcctttcgtggctcttctctgtcttaaggattaagagaaaaaaaatttttttaatcactttgcatgtgtttatgatatgcagtcttatgtagaaaatctgtttcccctggtcagttcccactttcatcctatgtatatgattctaccaaacctttgcaactctctaaaggccttctgcacccccttgtcctcagaagataacatgtttttacttagtttttattatggat

SEQ ID NO: 125149 - DNA, 582 bp, Homo sapiens
tcaggcaggtccttcagggggtattccagaaggcattgctatcacaggagatgacagctccatgcatgccattgcccctgaagaccttccagtgggacaggatgtggaggcggaagacagtgatactggggatcttgacccagtcttgactgtgtttaggagaggtgtggaaagggagtttttttctaactggtacaaaacggcctggagtttttctaagcttgcacaaaaaggcttgctatcatcataaccatcatcgttatcatcatcatcatcatcatcagacaaagccgtaacagcaggaactgaactctttgcttcttcactttcctcctcatcagatccaaggagatcaatttcatcatcatctttactatttgtagctccacttcctgtagtgtcttccaccttagcaggaccatacctgcccacagctttcttcactcctggcaggctggccttttccttttcataagacttgatgtgcttgtgatggcacataccctcgatgtagctcttgtccaccaggtaatcgttgagcacctggaggctagccgggcttttcagatctctgaaacccat

SEQ ID NO: 125150 - DNA, 1172 bp, Homo sapiens
ttaagtatttttccctttaccagatggtacaatattaagtttgccaatagatggcgttggagagacattgcgggatgaaagggttttgctttctgcagctgatggcagctcactaggtttctttagggctcccgtaatgccccgttcctgtagctcaggaggcttccccagccctggctccggcagcgcatggcagcaggttgcatccagcagcctcccccagcaatccccttcacccacccaccttccagcagttttgtagcagagtgcctccagtaagacacctcccagtaacagcttttcccagcaccctgggggtggatttccagcaagttccaccagtacagcatcacagcacctctctggcatctgctgaaccatggccatgcctgtccaataaggtctggatgtcagccctgttggtggaggctctatcgcagcctttggttttgcatttttgtattcttcagtgtctgtgtcctcatcctctgagtaccaattatctcctcttcctccagccaagaggcccctggccgcgcaacagtcctgcagcattcccatagccagtgtatttcagcagactatccactctctctttgcaaaggacaaaaaggaattcagcagcaatttgcttgactccaaggtcaacatgtgtcatgaggcgcaccagcttatttctcacagttgagccaacttcaggtcgatttgtcacatcccttcacggtggtaaaacctttctcagctgttttattactgggcagttcatctatagtcgttgcctcttgggctgtttcttcatgggttaacggacaaatgagaacatccaaacaagagactggaacattgcttaaaaggttgactgcattgtttttggaggagaaaacagacttaataagtaagttatatggaatgtcagaaggtgaatagcactgacagatggctccatcttctccactgcacacagaggtgtttttcaaaaagcggatttctactttaagtcctttcgtggctcttctctgtgcagggtcaagatccccagtatcactgtcttccgcctccacatcctgtcccactggaaggtcttcaggggcaatggcatgcatggagctgtcatctcctgtgatagcaatgccttctggaataccccctgaaggacctgcctgaggctgcat

SEQ ID NO: 125151 - DNA, 873 bp, Homo sapiens
tcaacaatgattgaagctcatgttgatgtcaggactaccgatggttacttctttcttctgttttgtgttggttttactaaaaaacacaacaatctgataccgaagacctcttatgcttagcaccaacagtatatctgccttcctcaccaggatgaccgggtaacccatcaaaacccttctctccctgatggctccatagcaagggttctcagcatttattacctttacattagcagaagagagatgaatagcattatctcccaaggactgcaaaaagttcacatccatattgttattcctggcagcctgatgaaccaagaacttctggatgatctcataactgtatttttcaaagcctgagtcaaaggtaagctggccatttgagccaggcaccaagtagcggaatcttgggtcgatctgatcagaaatgccacggctgatgttagaaagtaaagccaactgttgcatcagctctggcagtaacccttgaagcttctgctgaattttctttgaaggagttgagatatcaattcctacagacaaatccaggttgcatccttgtggatcacagaccttagaaagaatttccttctccaggttctgcagggcctcaaaatttacatcatggtacactttgtcctcatcattagttatctccaaaagctgcgattttttggcttctcccaccccaatggcaaaaataattgtgtttttgtccctgagggctttggctggtatgattacattatcttgggccaccccatcggtgatcacaatcaaatattgttgaacactgggtctccctccttttgaactgtcaaaaaaaggcagagtgaaattcagagctttcccagtgcgggtgccatccctcat

SEQ ID NO: 125152 - DNA, 584 bp, Homo sapiens
atggtggaacccctggctctactaaaaattgcaaaaattaagccagacgttggtggcaggctttcttacagtaagcttataatgtctcctacagactatgggcaccagatcacagaggcagccagacctgtgatgacccaaggaacccaaattgcatctgatggtctcaagggtcttgtgtttgaaatgagtcttgctgatttgcagaatgatgaagttgcatttagaaaattcaagctgattactgaagatgttcagggcaaaaactgcctgactaacttctatggcatgggtcttacctgtgacaaaatatgttccaaggttgaaaaatgttcaacaatgattgaagctcatgttgatgtcaggactaccgatggttacttctttcttctgttttgtgttggttttactaaaaaacacaacaatctgataccgaagacctcttatgctcagcaccaacagtcccccaaatccagaagaagatgatggaaatcatgacctgagaggtgcggcaaatgacttgaaagaagtggtcaataaaatgattccagacaatattggaaaagaagtagaaaaggcttgcc

SEQ ID NO: 125153 - DNA, 892 bp, Homo sapiens
  misc_feature (1)...(892): n = a,t,c or g
ggcacgaggctgaccagcaccatggcggttgggcaagaacaagcgccttacgaaaggcggcaaaaagggagcccaaaaaaaagggggtgaatcccttttctaaaaaagaatggtatggatggtgaaagcacctgctatgttcaatataagaaatattggaaagacgctcgtcacccaggacccaaggaaccaaaattgcatctgatggtctcaaagggtccgtgtgtttgaagtgagtcttgctgatttgcagaatgatgaagttgcatttaggaaaattcaagctgattacttgaagatgttcagggtaaaaactgcctgactaaccttccatggcatggatctttaccccgtgacaaaatgtgttccatggtcaaaaaaatggcagacaatgattgaagctcacgttgatgtcaagactaccgatggttacttgcttcgtctgttctgtgttggttttactaaaaaacgcaacaatcagatacggaagacctcttatgcttcagcaccaacaaggtccgccaaatccgggaaggaagatggatgggaaatcatggacccgaggaggtggcaggaccaaatggacttggaagaagttggtcatgaattgattgccggcagcatttggaaaagacatagaaaaggcttgccaatctatttatcctctccatgatgtcttcgttagaaaagtaaaaatgctgaagaagcccaagtttgaattggggaaagctcatggagcttccatgggtggaagggcagtagttctggaaaagccacttggggacgagacaggtgctaaagttgaagcgagctgatgggtatgataccaccgttccaagaatcaaattaaacaacagncttcaaataaggcgaattnggggtgctatttgtg

SEQ ID NO: 125154 - DNA, 694 bp, Homo sapiens
agacagggtctcactttgtcattcaggcttgagtgccctggtgtgatctcagcccactgcagcctcaatcttccaggctcaagcaagcctccagcctcagccccccaagtagctgggactacaggtgtataccaccatgccagctaattttttatatttttcgtagagatggggtttcaccatgttgcccagcctggcttgtgcaatttcgttttttgaaaaaatagctaatggagattctgataattcttattgtttcctggtcaacttctgtgtctttcctaattttcaagctgtcagtagaaatgatgaactgtagcaggccagaagctcagcttcatttggtcactttttcctttcctgtcttcttgcccatccagctttcccctttctgatggtgtcttcttatttctgacaatgcttgggagcgagctgtgtgacacccagattttacgagttgccagcggtggagaggagagagccgggcatgcagattcttcatggaccctactagagaggacagagaaaaagagcactggtgtaggagcccacgggtctggctcttaaccctggcctggtgacttcagctatttgaccttgagcaagtcacttcatttctcctttagcaacatctctaaaatgagggagtgagcaaaaatgttcccttagatttcttctaattcagaaataccag

SEQ ID NO: 125155 - DNA, 465 bp, Homo sapiens
cctagatgtccaaatacaagaagcacaaagaacacctgggaaattcatcgcaaaaagatattcacctaggcactttgtcatcaggttatccaaacttaagaccaaggaaagaatcttaagagctgtgagacagaagcaccaggttacctataaaggaaagcctatcagattagcagcagatttctcaacagaaaccctacaagcaagaagggaccggggacctatcttcagcctcctcaaacaaaataattatcagccaagaattttgtatccagagaaactaagtatcatatatgaaggaaagatacagtcattttcagacaaacaaatgctgagagaatttgccattaggaaaccaccattacaagaactgctaaaaggatctctaaatcttgaaacaaatcctggaaacacataaaaacagaacttctttaaagcataaatcatagaggacctatgaaacaa

SEQ ID NO: 125156 - DNA, 648 bp, Homo sapiens
ggagccccgtcctggggagaaaacagctcacgtctatggccctgactgcttatgcgggagctgcgtgcagctcagcttctccggggcatttttttctacacgctgggtgagctatgaacaggccaactgcaagggcgagcagtttgtgtttgagaagggcgagtacgcccactgggactggtggaccagcagccagaggacagactcagcagcctgaggcccatcaaagtggacagccaagagcacaagatcatcctctatgaaaaccccaacttcaccgggaagaagatggaaatcatagatgacgatggtacccagcttccacgccccatggctaccaggagaaggtgtcatctgtgtggttgcggagcggcacgtgggttggctactagtaccctggctaccgtgggctgcagtacctgctggagaagggagactacaaggacagcagcgactttggggcccgtcaccctcaggtacagtccgtgcgctgcatccacgacatgcaggggcaccaatgtggtgccttccacccctccaagtagtgcccaccccaccatgcctccttcccaggacccaggtttgctgcccaggaaccctccagacctcccagagagtgaataaagtgtgacttgcaacttgaaaaaa

SEQ ID NO: 125157 - DNA, 1123 bp, Homo sapiens
ggaaatcatagatgacgatgtacccagcttccacgcccatggctaccaggagaaggtgtcatctgtgtgggtgcggagtggcatgtaagtgcattgccagccctggctcaccctgccccaggaactgagactctggggtcctaggagtggagaaaccttggccttaacctcagccccagtgagcaagacatgcgactttggggcccgtcaccctcaggtacagtccgtgcgctgcatccacgacatgcaggggcaccaatgtggtgccttccaccctttgggaactcaggaggaggaggaggcaggacagaaagagcagatggaacaggtacccttttggttagccagaggggacatttgtgaactaagtgggaagaaaagtgtcatgtgattagaccatgtgcatccggagccctttcctttcttttggtggccacctctccttgaggggccttgtgaccgtgccgagagcaagaactctgcaactgggctgactgggttcagattccaaatccggtaattttcggggctgagcaactgagcaagttgcttaaggacgctgttttttcatccagaaaaatggagataatagcagtacttcctttagaggttgttgtgaagatttaacctatttagtgtctgtgaagcgcttagtactatgaggtgtttaacataattattatgcagctaaaaacttgaaccatggggatgtgcttacttatttgtggggagcttacaaattaaaacaattgaatttatggagaccagtagaaggatggttaccagcggactaggaagggtaagatggcggggtggagttaggggagaaagaggggatagttaatgggtacaaaaaaatagttagaatgaattaagatctagtattttggtagcacaacagggtggctatagtcaacaataatttaattgtacatttaaaaataactaaaataatataattggattgtttgaaacacaaaggataattgcttgaggggatggatacccaatttaccccgatatgattattatgcattgcatgcctctatcaaaatagctcatatgccccataaatgtatacacctaccatgtatccacaaaaaattaaaaatggaaaaacatt

SEQ ID NO: 125158 - DNA, 567 bp, Homo sapiens
atggaggaggaggaactggagttcgtggaggagctggaagccgtgctgcagctcacgcccgaggtgcagctggccatcgagcaggtgtttccaagccaggaccctctagatcgagcagatttcaatgctgttgagtatatcaataccctgttcccaaccgagcaactgccaatgccctcagcccacggaggagtgagttcctgtggcaacgcaggcggcccagtgtcctttgccacgagggagaatgcacgctgtgggatctggggatccgggggtgtctgtgatggggtgtttggggctgtgctgcgggatggggaggagtctgaggaggcggggctctgggttggatgctctcaggacgcaggatcgtcctccgatcagcgatcttcacaagccctgtctccagggcagggagcccagagcgaggctggagctgcgattgctgacgtggctgcagtccccctgctgcctgggccaggagaggctggacattctgtggcttggatggtgttcatgctgtggtctgtgctcagacgtgattatgaagggggttttgatttgtcctga

SEQ ID NO: 125159 - DNA, 300 bp, Homo sapiens
tcatctgatgggcgccatctggcatttgaccagggcagtcctggttgagttctcggacacgtagggaagcaaagagctgtagacgtgcagccatctgtggctgtgagagtccgacagcctctgctgctgttgagcaccatcatggggagtgggttgctcggttgggaacagggtattgatatactcaacagcattgaaatctgctcgatctagagggtcctggcttggaaacaccctttcttccagttgatcgaattggctactgaagcttgtgcgctcgtcaggtagttcttgtgccat

SEQ ID NO: 125160 - DNA, 703 bp, Homo sapiens
agctgcagaatctccgggacgttccacgcgtacggacggagccgggctcaccaggtcgctgccgcgagggagtcgctgtgctggggcctgggtggcggctggaggcctgagttgggctcgcggcggcggtcggcaggaggccggatggcggaatgatggatgaggaggaactggagctcgtggaggagctggaagccgtgctgcagctcacgcccgaggtgcagctggccatcgagcaagtgtttccaagccaggaccctctagatcgagcagatttcaatgctgttgagtatatcaataccctgttcccaaccgagcaatctctggcgaacatagacgaagtcgcgaacaaaattaggctgaaaataaggagactggatgacaatattcgaactgttgtaagaggtcagactaacgtggggcaggatggacggcaagtaagtaactcattcctccatattacctatgctcccctggtttctcccggcaaccagatgaccaaaacgtcgatgtgccctcttgcagagcactttccgattgatccgtttcatacatggcaggacaagacagggcaggcgcccacagtagccacgtgctgtccctcagtgtcccttggaccaggaccgttaactgtggcaccggtcacccgaggccagatgagaacactggggcttacttgactttctccttcgtgtcgggcatc

SEQ ID NO: 125161 - DNA, 453 bp, Homo sapiens
tcatcccttccaccatgagcaagaaacaaatttttcagcaatctctgctatttccacgtctgaatagtcagtagcgacatcacaaaatcctgtcaactccaaggttgcaaagacgagacgagtcctccccagagaggggaggcggttaaggagaggagattgcgtggctcggagcagccagacccggtaagccgactccttcccgtattccgctttaaccaagcttgtttccctggcggccccacaaattccctgagcggagcgtcttcgctggctcgcagccagccagtcagagcccacctctgcgacctcctcctccttcccatcctgagggctcctgcctcggctcccggcttcctcctccgggctatcttttaccccttcggtagatctcttcagacgaaatgcaattttctctattctttccctgttactattgttacgaccaagcat

SEQ ID NO: 125162 - DNA, 476 bp, Homo sapiens
taacagctccaccaccatcaccagagccaaaactcaggatgcatgtgcttcatctgctgcttatttccagctgagagccagtggtgccatggttccttagggagccggtcccctgatgccggctcctggccccaaatctctctgatccgggctcttccagaatgtcttgtctccaccatcgcctttgaccaatggtgtccctttgcctggtaatgtcccctttgcctgatgatggccctgtcactcctctctttagcacagaggaggctgtttcatcccttcaagcctgccctcccttcaagtcttagctcaagttcaccttctccgcagagccttctccaatcttcttgactacgtctcctctcagctccagcaacctctgtctctggcactgattccttacttagctaagagaatcacagacacttggggctcaggacaatctgctttctctcgaattccagcacactggaata

SEQ ID NO: 125163 - DNA, 547 bp, Homo sapiens
tcagctcattcccagcacctgccagagaaggggcgcttgctccatgcaggtgccttgcaggcatctctgtgacccttcagggcaatccttgaggtaggtgtcatcatcatcatcatcatcatcatcatcatcatcataggtgttatgattcccaggagtctgggaagttaccccgacccgggcccaaagctgagcttgaagggccccctgcttggcttctcgttggacctggagctcacccatgaagccaggactcacgatgtggcgatgccacttgcgcatctgtgtctgagaggcttctgggtcttccaagagccaggcaaagggacaccattggtcaaaggcgatggtggagacaagacattctggaagagcccggatcagagagatttggggccaggagccggcatcaggggaccggctccctaaggaaccatggcaccactggctctcagccaggaaggaacttggcttgccagagggtggatattgcaggaactggatacccattatctgctcccctgggagcctgaacttcagggatcca

SEQ ID NO: 125164 - DNA, 432 bp, Homo sapiens
gaagcatcatcacgccaagcttggcacgaggcgactgtgagcagagccccacatcctcgcgcacgtcttccctgggctctggcggccccgactgcgccatcacagtcaagagccctgggagggagccggggcgtgaccacctcaacggggtggccatgaatgtgcgcactgggagcgcccaggccgatggctccgactctgagaaaccgtgaggcaagcccgtcaccccacacaggctgcggcatcaccctcagaccttggagcccaaggggccactgcccttgaagtggagtgggcccagagtgtggcggtccccatggtggcagccccccgactgatcatccagacacaaaggtcttggttctcccaggagctcagggcctgtcagacctggtgacaagtgccaaaggccacaggcatgagggaggcgtg

SEQ ID NO: 125165 - DNA, 451 bp, Homo sapiens
ggctttgtcctttgctcctgctccccgtggaccatgggaccttaaagcgttgcaggttcctgatttggacagaggtgtggggccttccaggccgttacatacctcctgccaattctctaactctctgagactgcgaggatctccaggcagggttctcccctctggagtctgaccaattacttcattttgcttcaaatggccaattgtgcagagggacaaagccacagccacactcttcaacggttaccaaactgtttttggaaattcacaccaaggtcgggcccactgcaggcagctggcacagcgtggcccgaggggctgtggaacgggtcccggaactgtcagacatgtttgattttagcgtttcctttgttcttcaaatcaggtgcccaaataagtgatcagcacagctgcttccaaataggagaaaccataaaataggatgaaaatc

SEQ ID NO: 125166 - DNA, 2188 bp, Homo sapiens
aacggggaggtcctgcctctgaagattgtcacctatgccgctgtgtccttgtcactggcagccctgctggtggccttcgtcctcctgagcctggtccgcatgctgcgctccaacctgcacagcattcacaagcacctcgccgtggcgctcttcctctctcagctggtgttcgtgattgggatcaaccagacggaaaacccggtgcttcccgaggccgaggccccgggctggcgggggctccgtgtgcggggcccatatggcagggtcgctgctcctgcggaggggtttcttcacatccgcagccgggcgcatccccgcaatgggcacgttctcatccgcgcattggtctgggaaggctctgagaagtgtgcggatttcatctcaaaacccctctagtgtgcttttgagtggcgtgaatgggggagaggtgccatcctcctccactacatctacatgagcacctttgcctggaccctcgtggagagcctgcatgtctaccgcatgctgaccgaggtgcgcaacatcgacacggggcccatgcggttctactacgtcgtgggctggggcatcccggccattgtcacaggactggcggtcggcctggacccccagggctacgggaaccccgacttctgctggctgtcgcttcaagacaccctgatttggagctttgcggggcccatcggagctgttataatcatcaacacagtcacttctgtcctatctgcaaaggtttcctgccaaagaaagcaccattattatgggaaaaaagggatcgtctccctgctgaggaccgcattcctcctgctgctgctcatcagcgccacctggctgctggggctgctggctgtgaaccgcgatgcactgagctttcactacctcttcgccatcttcagcggcttacaggtaggtgacggccgagttgcccgcgggacccctgcctggccgccgtgacaccatcgctgtggcgtgctcggcgggaggaagctgcacctggaggactccgccaccaccagggccaccctgctgacggtaggaggcgccggggacaccgcgggactgggggctgggcggcatctcgaggggcgggggagcgagtccaccgcctcgctggacagcatcgtcaggtcaggccgcagctccgggttcggggaggtggctctcgaactccctcaggttttgcccctgccagacgcgtccctcatgcccaggagctgcaaggatccccctggtatggcttccctggagggggaggaccccgtgggttgtttttcccacgtcccttcggtcacctcacactcgtcagacagcgaggacgatggggtgggagctgaggaaaaatgggacccggccaggggcgccgtccacagcacccccaaaggtgagtgtgtggggcacattgggccaggctgggctgtggacagcgggctcggggcaggcctcagtgaggaccccagcggcaagccccgcctgaaggtggagaccaaggtcagcgtggagctgcaccgcgaggagcagggcagtcaccgtggagagtaccccccggaccaggagagcgggggcgcagccaggcttgctagcagccagcccccagagcagaggaaaggtgcctggggaggccggggctgcagtgaaaggctggaggacccagaagggccagtccctgggggccggctccgggagaagctggccgactgtgagcagagccccacatcctcgcgcacgtcttccctgggctctggcggccccgactgcgccatcacagtcaagagccctgggagggagccggggcgtgaccacctcaacggggtggccatgaatgtgcgcactgggagcgcccaggccgatggctccgactctgagtgagtagcctgggcctccagggaccttaaagcgttgcaggttcctgatttggacagaggtgtggggccttccaggccgttacatacctcctgccaattctctaactctctgagactgcggaaaatactagaagcatctgagagagagaaagcagtccaggtagcccggagcaggcctgtccatcagccaggccaggatgtccatgtgaggaccacgaagtgctccgcagagcatccgcagcagaccgtgacgggtgagggctgaacgagcccctctgtgatcctgcctgaacagatgacagcacaaacaccggccaagccacagg

SEQ ID NO: 125167 - DNA, 729 bp, Homo sapiens
atgggcaaagacttcatgactaaaacaccaaaagcaatggtaacaaatgccaaaattgacaaacgggatctaattaaactaaagagcttctgtgcagcaaaagaaactgtcatcagagtgaacaggcaacctagagaatgtgagaaaatttttgcaatctctccatctgacaaaggactaatacccagaatctacaaggaagttaaacaaatttacaagaaaaaaacaaacaaccccatcaaaagcacctcctcggcctcggcgtctgctctagccatgtttgaggagtccttcagcccaccgctgcgctgtggtagcccctctctgggctggtcaaggctggagccagctccctctgcttgtggggagggcagggcttgggacctggcagcccgccatgcccgagcccccctgcggtgggttcccgcacggcccaagcctcccccacagaaagggtacacttgccagaagttttgccatgacagtacactgaacaaaggagacgacagggtcatttataacctgacgcgtccaccctactgctgtgtccggtttccattggctggaaggagacctcacattctgtgtttgtcccaactggctagcaacttagaactttttaaaagaggcaaaaggagaggagaacaaaggaaggaggaagtaacttgtggaatgctgagaagggtaaaaacacttttaagtaaggaagaggaacaggctatgacctaa

SEQ ID NO: 125168 - DNA, 394 bp, Homo sapiens
cctcagctgtggccgatccctccatcaagggtccgtgacttcctgcaaaacaatcaatgccctcactttaacagtagatacttggcgaggctgtgcatggtgaggctgtgcatgcacctttcattgcaggtcagccactaacatgataagagcttatgtctatttttccacaatttcagttctttctctacaggagattagactctcactcagggcaatcttggcagatttgaggctcagtatctgcttctgaagctgggagatagaatccccgagttcatcattttctttcatcactttatccactgaacttaggagcaaccaaccagcttcattatgttccttagttctccacatatggtcaaaggtatgatgtatagggtcactaaactcc

SEQ ID NO: 125169 - DNA, 1044 bp, Homo sapiens
atggcagtgcctggagaggctctgcttttccatgatcctttgaggcagacaggggctatcttggaggaagcagaaaatgcggagtcggagacagaaggggatgacaatgaagcgcggtggaatttggctgtgaatccatctggtcctggactctttttggttggtaaggacacattcaaagcagtgtgtagagggaaatttatagcactaaatgcccacaagagaaagcaggaaagatccaaaattgacaccctaacatcacaattaaaagaacaagaaaagcaagagcaaacacattcaaaagctagcagaaggcaagaaataactaaaatcggagcagaactaaaggaaatagagacacaaaaaacccttcaaaaaattaatgaatccaggagctggtgttttggaaagatcaacaaaattgatagaccgctagcaagactaataaagaagaaaagagagaagaatcaaatagacgcaataaaaaatgataaaggggatatcaccaccgatcccacagaaatacaaactaccatcagagaatactacaaacacctctacgcaaataaactagaaaatctagaagaaatggataaattcctggacacacacaccctcccaagactaaaccaggaagaagttgaatctctgaatagaccaataacaggctctgaaattgtggcaattgtttggttttttaaaaaatatatagtggttggccggaaaaagtacactcgccggcagttttgccacgagagtacactgaacaaaggagacaaagtcatttataacctgacgcatccaccctactgctgtgtccggttttcactggctggaatgggacctcacattctgtatttgtcccaattggctagaaacttagaacttttaaaaagaggcaaaggtagaggagaaaaaaggaaggaggaagtaacttgtggaatgctgagaaagccctgggaccctctggtggctgcaagtcctgattgctgtgccagtcgcagcaggaacaggcccccaaaatgtcacatctccaggaaataa

SEQ ID NO: 125170 - DNA, 642 bp, Homo sapiens; identical to SEQ ID NO: 115039

SEQ ID NO: 125171 - DNA, 430 bp, Homo sapiens; identical to SEQ ID NO: 117410

SEQ ID NO: 125172 - DNA, 559 bp, Homo sapiens
ttagatagaccaaattgctataattgcaacccgatttggtccacatccaaactctgggctgctgctgtctctactactgctgctgttcttaaggccagagattcctgaacacccttctttctcagcaagtaacttgtggaaacaagttacttcctccttcctttgttctcctctgcctttgtctcttttgaaaagttctaagttgctagccaatcgggacaaatacagaatgtgtggtcctgttccagccaatggaaaccggacacagcagtagagtaaacatgtcaggttataaatgaccctgtctcctttgttcggtgtactctcgtggcaaaactgctggcgagtgtaccctttgcacattaaagtttgagaaggactggttctcatactttggagtacatcataatctatagtgcttgttaaaacacaaattgttgggccccattcccggagtttctgattcagttggtgtggggtgggactgtgaatttgcatttctaacaagttccctggtgatgctgatgctacagttcccagggccacacgttgagaacct

SEQ ID NO: 125173 - DNA, 768 bp, Homo sapiens; identical to SEQ ID NO: 117411

SEQ ID NO: 125174 - DNA, 1560 bp, Homo sapiens
atgatcgacgttgcactggcaatttccctgcacgcgccgaacgacgaaattcgtgacgaaattgtgccgatcaacaaaaagtacaatatcgaaacgttccttgctgcggtgcgccgttatctggagaaatccaacgccaatcagggccgagtcactattgaataccacacctatgaccgggagaaaaagctggtggaaaaatatgatgtcagcaccaccggaacggggggcggcggtggcctaatatccattacaggatggctttggctggaccaatggcgtgacgctgaaaatgctggatttgatctgcccgaaagatcaaccttcgaaattcatgttcaggtttttcggcggaattggatttttgaaccacttatcaaaccatttttccgcttcaccggagttagacctttatatgtctttccacaatacgaacatcgcgttcgggttttcggcaaactccgggcgcagcgccagcacgtttccgtcggcatcaatcggtgcgggcgtcgagccggtactgtcaacgccaatcccgaccacagctgcgcgctgttcgacgctaagctctgcaagcacgtcacgcggatgatgacggaactggttattcggggcatcacaaaattgccctttctgccaacggggataccactctacgctggtggcgatctcttcaccggtagcgcagtccaccgccaaagctcgcacagaatcactgccaaaatcgaggccaattgcaatcgccatcgtttcactccatccaaaaaaacggcagtcaacattcaacacattcttgaggagcagctaagcgccagtcttgggcacagattaaagaacaagaaagaaaatgccgctgtgcttacggtggtcgaccaaaacgtttccctgcgccgcgggctcttactatcccggaatgagtgcgttcaagtaaaaggtctcgttcaaattcagcgactgctgaaattacatgcatccgacatcatgccgcacaccgaatgtgtggcgggtgaagaacaaaagcaattcacggtgcgcgacatctcggaactggttcgtcaggggcaagatctgatggtgcaggtggtgaaagatccgcttggcactaaagctgaaacggagcgactggacgcgctggtcaatgcggcgggaattttacgcatgggcgcgaccgatcagctcagtaaagaggactggcagcagacttttgcggttaacgtcggcggtgcgtttaacctgttccagcaaaccatgaaccagtttcgccgtcagcggggcgaggcgattgtcacttattaccattggcaggtgaagcatgctcccctgcaccagtccaagagaggtaaaaactgtggggttggagaaggtcaaaatggaccagttattctccagcagaaaccaggagcactgcctacacaacgccacctattcctgagggcacaaatggcagatgtcatctctgggctgcccactttggctgacatggctctggcccagctggtgctgctccttggccacggagctgtctccacttcctccacaggccaggactacacgctctaa

SEQ ID NO: 125175 - DNA, 807 bp, Homo sapiens
atgtctcgaatttttgcttactgtcggatatcaacgctggatcagaccaccgaaaatcaacgccgggaaatcgaaagtgcaggttttaaaatcaaacctcagcaaataatcgaagaacacattagcggctcagcagcaaccagtgagcgtcctggttttaaccggttgcttgctcgcctgaaatgtggtgatcaattgattgtgacaaaactggatcgccttggttgtaatgcaatggatatcaggaaaacagtggaacaactgaccgaaacaggtatcagagtgcattgcttagcattgggtggcattgacctgaccagtccaacaggaaaaatgatgatgcaagtaatttcagcagtcgctgaatttgaacgagaccttttacttgaacgcactcattccgggatagtaagagcccgcggcgcagggaaacgttttggtcgaccacctgtgttaaatgaagaacagaaacaggcggtattcgaacgaattaagtcaggtgtaagtataagtgccattgcccgggaattcaaaacctcgcggcaaaccattttaagagccaaagcaaaacttcagacacctgacatataaaaaataatctcggtgtgagatgctttacgtcttccaagcccccttccttgccgtaaatggaaagatacatctaattatagaagttatatgttttaccctacggcagtgctggccattcaatatcctgtgcagttgaggtatcaacacggttcagcaatacccgatactttttccatgcttccagaaacgagatttcttcctccgttgcaatttcca

SEQ ID NO: 125176 - DNA, 936 bp, Homo sapiens
atgatgatgcaagtaatttcagcagtcgctgaatttgaacgagaccttttacttgaacgcactcattccgggatagtaagagcccgcggcgcagggaaacgttttggtcgacctcctgtgttaaatgaagaacagaaacaggtggctcccgaacgaattaagtcaggtcttgcacgttactcaatcacaattcagcaaaaccggaatgtcggcaaaacacacggcttttgctatgcgcatgtcgcctgcacaaatgacggatatcgttgttgggttgtccactggtcagtcgccattcatggtgttaatgcagcagggcggccattcagctatgcaggagacaagaatcgccagcttacccgtcacagcgatacccgctggcatgaagattccgtgcgtaaccgctggttcagcgtgcatggtggggccgtctgtgcgcgtgaatgaatggttcagcgcgtatggcatggcgggtatggcttacagccgcgtgtcgacctttgtccggggattatctccgcggtacctgacaacaagggaagccccaggctgcgggtcatcagcaggacactgagccgagcttgggacgaggtggtgggctttctgctgatcatcataatcctgctgacaggctatgccattgcctttaacctgctgtttggatgcagcatctctgactaccggacatttttcagctcagcagtgactgttgttggtctcctgatgggaatttctcaccaagaggaggtaaaaataataatttgtttcctcacagaattcaatatattgaacaaggaaaattgggggggtccttatgaaaacagccccctactgtacactgcacactggaaaagggggaaaatttcagtcctttgctctactgctttatggtactgcctatgcatacagcatttacatggctgttgctttcaaaaa

SEQ ID NO: 125177 - DNA, 750 bp, Homo sapiens
ttacaggccaatcgcctcttttaagcttttcagataacggcggctgaccggcacggttaagccattacgcaaaatcaactcggcctggccgttatcttccagacgaatctcctgtaaatgcgcgaggttaaccagatactgacgatggcagcgcagtagtggtgtacgactttccagggtacgtaatgtcaattcggtaaagccctctttcccttcgtggctggtaacgtagacaccgctcatccgactgctgacaaatgccacatctttcatttgcagcaaataaatccgactatgccccgtacaagggataaatttcagcgcctgttgattttccggtaacagcgaaacatcctgcttgtgcgctcgcaatcgcgccagcgttttctccagtcgcgcttcatcaattggcttcagcagataatcagactctagagatcccgggtaccgagcactattcaccagccaagtgttgatccacgggatcgggttggagcgcgtctggaacggcagatccaaaccgactgcctgcatacggatattggtgatgtattcaacgtactggcagagaatgtctttattcagaccaatcatcgaaccgtcgcggaacagataatccgcccagtctttctcctgttgagcactgtactgctggtcctttgcggaacagtgcccgtcgcgcgaggtgttgaaacacgtcaccagccgttggggggtgttgattctggtggcgctaccgaaggtactcat

SEQ ID NO: 125178 - DNA, 1195 bp, Homo sapiens
atggaagcaacccataaattgggcggtgaaaactatgtcctgtggggcggtcgtgaaggttacgaaacgctgttaaataccgacttgcgtcaggagcgtgaacaactgggccgctttatgcagatggtggttgagcataaacataaaatcggtttccagggcacgttgcttatcgaaccgaaaccgcaagaaccgaccaaacatcaatatgattacgatgccgcgacggtctatggcttcctgaaacagtttggtctggaaaaagagattaaactgaacattgaagctaaccacgcgacgctggcaggtcactctttccatcatgaaatagccaccgccattgcgcttggcctgttcggttctgtcgacgccaaccgtggcgatgcgcaactgggctgggacaccgaccagttcccgaacagtgtggaagagaatgcgctggtgatgtatgaaattctcaaagcaggcggtttcaccaccggtggtctgaacttcgatgccaaagtacgtcgtcaaagtactgataaatatgatctgttttacggtcatatcggcgcgatggatacgatggcactggcgctgaaaattgcagcgcgcatgattgaagatggcgagctggataaacgcatcgcgcagcgttattccggctggaatagcgaattgggccagcaaatcctgaaaggccaaatgtcactggcagatttagccaaatatgctcaggaacatcatttgtctccggtgcatcagagtggtcgccaggaacaactggaaaatctggtgatgccttcagtggtcagcattaacgtagaaggtagcacaaccgttaatacgccgcgtatgccgcgtaatttccagcagttcttcggtgatgattctccgttctgccaggaaggttctccgttccagagctctccgttctgccagggtggccagggcggtaatggtggcggccagcaacagaaattcatggcgctgggttccggcgtcatcattgatgccgataaaggctatgtcgtcaccaacaaccacgttgttgataacgcgacggtcattaaagttcaactgagcgatggccgtaagttcgacgcgaagatggttggcaaagatccgcgctctgatatcgcgctgatccaaatccagaacccgaaaaacctgaccgcaattaagatggcggattctgatgcactgcgcgtgg

SEQ ID NO: 125179 - DNA, 1030 bp, Homo sapiens
ctccgcctggtcattgtgcgagtgggacagtgcaccaccgaaaattgcccgctggcagcgtaaacgtattcagcatcaggattttgagcggcggctacgtgagatggttgccgaacgcagagcccgtctggcgcgggtgaccgatctcgtggaacagcaaacgctgcatcgtgaagtggaagcctatgaagcgcgcctggcacgctgccgccatgcgctggaaaaaatcgaaaacagcaatggagagaatatgtcactggaaaatgcccctgacgatgtcaaactggctgtcgatttgattgtgctgctggaggaaaatcagatccctgccagtaccgtgctgcgcgcgctggatattgtaaagcgtgattatgacaagaaattaacgcgcgatgatgaggcggaaaaccttatcggcgcgatggatacgatggcactggcgctgaaaattgcagcgcgcatgattgaagatggcgagctggataaacgcatcgcgcagcgttattccggctggaatagcgaattgggccagcaaatcctgaaaggccaaatgtcactggcagatttagccaaatatgctcaggaacatcatttgtctccggtgcatcagagtggtcgccaggaacaactggaaaatctggacgttaaagcattgggtattgccggccaaatgcacggagcaaccttgctggatgctcaccaacgggtgttacgcccttataacgaacggaaatggaacccgagacgagaacgagacaggtcaaacgaacgggaacgacatggcaaacggtacggcgaccgcaaaggacaaggaaacgcgcgcatgattgaagatggcgagctggataaacgcatcgagcagccagaggggcggagggatagcgaagaggggcagcaaagccagaaaggccaaaagacaaaggcagaaatagccaaaaatgcgcaggaacaagataggactccggtgcatcagaaaggacggcaggaacagccggagaatccggaaaaccaagatcggggggacaaataa

SEQ ID NO: 125180 - DNA, 1011 bp, Homo sapiens
aatatgatggagcaagtgctcgatatcccttccctgtaagttatctcgaaagataacgccaacgttaccatcgacgccgtgtgctttattcaggtgattgacgcgccgcgcgcggcttatgaagtcagcaatctggagctggcgatcatcaacctgaccatgactaacatccgtaccgtgctgggttcaatggaacttgacgaaatgctctctcagcgcgacagcatcaactcacgcctgctgcgtattgtcgatgaagccaccaaccctctggcgctgaaaattgcagcgcgcatgattgaagatggcgagctggataaacgcatcgcgcagcgttattccggctggaatagcgaattgggccagcaaatcctgaaaggccaaatgtcactggcagatttagccaaatatgctcaggaacatcatttgtctccggtgcatcatcaggttgccgagtggatgcgggcgcgaaacggtcagcttttccgtttgcgcagcaaccacctcaccctgctcgttgagcaaaataacttttacgcccgaggtgccaagatctatcccgatatacatatcgatcgttccttaaaaaaatgcccgtcggatttatttgctgcaaatgcaagatgtggcatttgtcagcagtcggatgagcgctgtctacgttaccagccacgaagggaaagagggctttaccgaattgacattacgtaccctggaaagtcgtacaccactactgcgctgccatcgagattcgtctggtttgtaacaggcaaggcccagagcacccaggcgagcgccctatcctatattgattcgctcctctatcatcaccttgatctatatgggcaaagactaggccatcttgatgatggcactgattcttggaatcatgtgcctactctcaacggacaatgtactttggtcttgatacatgagtatgtggatactagaggtccggagatcaagaccatcctggtgatctcctggtggaacatcctggtgtttcactaa

SEQ ID NO: 125181 - DNA, 553 bp, Homo sapiens
tggatatcggcattggcgaagaaaaccgtaagcgctggctgcgtaccggtaaatgctctttcctgccgaaagagcgcgaatggatggacaggctgatgagctgggggttggtcgataccttccgccatgcgaatccgcaaacagcagatcgtttctcatggtttgattaccgctcaaaaggttttgacgataaccgtggtttgcgcatcgacctgctgctcgccagccaaccgctggcagaatgttgcgtataaaccggcatcgactatgaaatccgcagcatggaaaaaccgtccgatcacgcccccgtctgggcgacctttcgccgataatttagcagctctcctggctcaaactgggtcaggagaattaaccttgagaaaaatcaacaaactgtcagtaatgatttggtgcctgccgtcctttgttataccgcctctgcgtttttagttgtctgaccacttctctattatcaagtttgatataggaaactccacgatgaacgctgagcgtaaatttctttttgcctgtcttatttttgcgctggtcattt

SEQ ID NO: 125182 - DNA, 195 bp, Homo sapiens
ctactgcaagcttgcatgcctgcaggtcgactctagaggatcccaggtttttgcgctggatgtggctgcccggcaccggtagcagtttgcgatgccggagtctgatgcggttgcgatgctgaaacatttatcctgagaataaatgccttggtctatatatggaagtggggaactgagtggatatgctgtttttgt

SEQ ID NO: 125183 - DNA, 720 bp, Homo sapiens
atggcgtgtttggcagagtcagcgaaaagcagcgccctgcggctccagcggcgggggagcgccctcttccgcgccctcgccctctcccgtgtggggcagctgcgcgcacggggccatttgcagcgcaagcagcctagcgtgcggccgcggcgcccaggtcggaaaggaggcggcatcatggagctgaagaaggacatcaacgctgtatctatcgacatgctgctgatcgtgcactcggagaagcggcgcgccgcacagggtacgctctcagaccagcaggcgaacccgagctcgctgctgcagcgcggaggaggtaacgcgcgcccgacccgggtccccgggtcccccggcaccttggcctccttgccacaagggcctgcccgccggggggcgcccattgctcccccgaacgaggggccatcagctggtagacatgccagctttagctctactgaagtagacgccaaagctaacaaaactctgctatgggttattgagaattttaataagaatcagacccccagagacctgttagccacagaaatggccatgcagggcatggaagaaaacttggtggagaagcagcaccctcagcagccccaggtcatcacttcctacaacagccaaggccacagcgtgccctacagtttgcagctcctctcatcccaggaccgatccatccagcttggtgactccgggtttgaccctgctgctttctaa

SEQ ID NO: 125184 - DNA, 2511 bp, Homo sapiens
cttacaattcttcatctctggggatcaaatcagtcttaacatggcattttttttctcttctaaaggaggcagggcctggagggatggtgggccatagggctggaggggcttacagggaaagccctggcctggcttttcacggttcctggtgttcgtggacttcagtggtcaccaagattctttcttacacgtctccggaccctgctctgcaaggtccttggagtgctgttcagtgtggctggaggtaagaagggtccaacttgtatccttcaaatactcaaagggcagagacgacaagaagcatgatgtatttcaggatgggctgagagggtgtgggcctctgggcaggcctagtgggaggtctggttacactgggccaaatccagaaattggtttcttttttggaaacaacatgttcatgcgctgcgggtcagactcgacactaccttgttcagtctagaggagggttcgtccttctggaaccaagggctcacgtggaaagtggtgaggaggaccttcagtgaaagcattaaccacaccccccgaattacactgggtgtcccttactcggtacattccttccagctccctggattgctgaactttggcgagtttaaggtatgttttgtcctttccccaaggatttttaatttgacccatgaaaatttcctctcaagtgaaggaccagagattgggggcctcctgggagccacattcaactgtctgaacaagaggcttgcaaagtaccgtatgcgaaacgtgcacccgaaacctaagctcgtcaggtatctgcacagtcgcctcccccccgagcctgctgcggctccctgagcttggtgtgggccgcgccatctctcatgccgacagatgtcctcttcgagtcaaatcggtaatgactcattccagctccaggtaaccccagtgcacctgctacctttatcccataccacgaggaagaatccagaaatgtatgaccttcctctgctcttcttcaacccgcaggagtctgccatcctccagctcttccaccaggatggtgagtgtctgcactgcagcccaatcgtgggtgattggtgtcatctcggacacagccaggcttgcccttcattttctgttccaagtggcctttttgtgccttctctgctgtgtggagctgcttttggacgtttagttgccaatgtcctaaaaaggtactctgtgtgtgtgcgtgtgtgtgcgcatgtgcatgtgtgtgcacgtgtgcgtgtgtatgcatgtgtgtgggtccgcatgaccatcagcctcacggtcatcctgatcgagtccaccaatgagatcacctacgggctccccatcatggtcacactgatggtgagcacactccctccaggcccctgtcaggctcagggccacgtccgccccacaggacctatttttaggtctcttctggaatgggagacagaggtggaaatggacaagtaaggccatgattttgctcatgtcctagtttcagaatgtataagctctgaggcctaaggaatgttgttattctgtggagggccagacaggagtttattttcaactttccgggctgtatggtctctgtcacgactactcgactctgtcattgcagcaggaaagcagtaagcgtgacggacttgatcagtgggctacagtttgctgtgccctgatctaaagggggacccaagtgctgtgagcatcctgcgcaccacggtccaccatgccttcccggtggtcacagagaaccgcggtaacgagaaggagttcatgaagggcaaccagctcatcagcaacaacatcaagttcaaggtaaagaaaacggcatgagaggaaaggcaggtgagagacaagcggtcccgtctcacacggcttagtgctttggagctacggaacatgtgtgatgagcacatcgcctctgaggagccagccgagaaggaggacctcctgcagcagatgctggaaaggaggtgagagcctggcggggcccccactgcccgcagggctacacagcggtggggtgagcctttggctcagatgttccctctgaccttccacggcctgatccttcggtcgcagcttgtcaccctgcttgtccgaggagtttgttactctgaaagccagtcggtaagtctctccgaggcagaaatcagccaggccagacctgacgaagctcgaggggttgggcgctgccggcggctggacctgacgctgctcaacccgcgcatgatcgtggtgagaagggctgccccggcctgtcccatgcggagctgcctcttcatgccgttggcgtctcaggcagtcagtctgttcagaacgatgggcctgcgccacctgcccgtggtgaacgctgtgggagaggtgagcgaggccccggccctgcccccacctttgagagaggatcccctagccaggtgctgtttgtgcacccagaccatctgacagcccagcccaccctctcctggtgctgcctggggaggcaaatcatgctcactccggcgggcacagctggct

SEQ ID NO: 125185 - DNA, 2847 bp, Homo sapiens
ttaaaacgaggacttggacaaggagggaaccactggagtgacgtgatgcaagccctcttcggtcactcttggcttccaccaggggtctctgcctccttgatgagaagagaagctggctggctccatgatgacctcgatggcgtacaccctaacatcctcattcaccagacccagggtcagctttaggaagctcatctggcggctggctaccagctcctctgtctccttgtcgtgggtaggcaggtgcaggtggtggcagaaggtgtagaggaaggccttggagcagagctgggtgagcatgctctggacatgcaggtagtaggtgctgccccgcttgatctgtgtgcggtggtctgccaggcggggcaccagggtgcctctgtaaagggggcagcgcagggttttgttgtcaaggtccaggatgctcgtgtagcggctgtagcggctcagggcatggagggtaccggcaccggcaggggaggccactctctgcaagccaataagcttccacttctgaaaatccataatgtgcaaaggggaggaggcccaatgtttcacgggcttagcgtagcagccatagctggggacaaagatagccagtgcagtcacgagtttcctgactatggcctcatcttcccccaggaccacaagtgtcctcccactgagcagggagtagatggctgggtgggcaaaggggtactggcggatgaattttaaggcgttctggccagccctctttttatgcctatcggaagacaggccagcaggataagcagaggggatcctgtctgagctggtggacgctacactgctcacgtagctggtggtgtctgagtagttgtccaggctggtcttactgatgtcccggctagccagcaggtggctcgggtccagctcataagcgggaaacccttcacaactgttgtctcgggaagaagggttggcattttccactgaaaagtctacacggaacccctggtcgttctgcctgtggcgctgtggggggctgctcaccacaccatcctcgtcagagtgtgtgtgggctggagtggagggcagcaccaactgaccatcgctctccttcccaatacagcagcaggagtctatttgtgatggggtgtattctatgctgccttcctctgtctcacccagttctggaggactgatgcttgcctggaagtggatggctcgttcattgccatctggatatgattcttcttcattaatggcacttgggtagctggccttaaagtcatcagggatgagggcctcagaggggcaggtactgaggacttcaatcctgtcctcgctgatggtcctgtgactgactgctttgctccggaccacctgggggctcaatggtactgtaaggcttgcctggctgtcagatttagaaagcacggaggtggatttctccgtgcccaaaccttcaatactttcaccactgctgatactccctttcatatccatatccaggtagtccaagttttcctgggggtcgaaactgctcaactcagtcacttccacttccttgtactcctcatctcccagttcctgctccatcttgatcaacacagactccacactggacttgtaagaaccaacactaattaacactttaggaattgggcattcttctagagaactggaaggcggcctgtcttgactgggcttagagggtatgctttcttgtttctccaccatcctgtcatcgacctccacaaagtcttcaaagagaaagtttgttatatgctgttgttttagaagtgctctatcaatctgactggtcaggaggtaacacaggtctcctctgaacatgtgttcaatgtggctgagctgagccagggtctgggtgaaatattcagtgtcacagagctcctccaaggtcttcaacttcttgtcaaaacacttggtggactttgctttgataagttttggggtgtaggctggtctgcaggtgtaaaggtctgtgtcggcagactcatcagggttagaggtagtggatgcctggctggcctgatcctggatgtgctccatctcaccaggacacaaatcatgccccttcaacttccgatgagggtatgagcggatctgcttcagcaggtcttgatgttcaatgatggacttctccacactggccagtttattggctttctcaattgcctgagatgagtaaaagcctttgtcgttggctttcttctggatctccgtttctgtgtgtagcactgtcctggtgtaatccaagtctttcagctttttttcaagttccccagcaaatgccttcctgttgccagtcttcaagcactcagaagctctggaaaattcggctgaaagctcctggaactgctgcatgattttatgctggtctgcagagatataagccatgcaaaacggcctcacgaagccacgggcctccaggtcgtatagggtaaggtggtgcacgtatgcaaaggcgccctccttagaatctcccagcaccaccttggagtcctccacgaagttcagcttggggtaggcagatccaggaggatggcccacgaaggaagcctggtaatccacagacatgatacgcagggagaagtaattgagatcaaaagtgccaaaaactttggtgtcattggggatggtcagtaagggttggggtcccacctgctcagagaactcggaaataagaatgaagtccctcgaaaacttggccccggacagttttgaccaggggttagcaccctgactggcgaaggggaagagcggcaccgagtactcctcaggcagggccggctcattgtaaggctcttcttcatactcttcctctttggtgaaggccactacgtcaggggcgctgatcat

SEQ ID NO: 125186 - DNA, 2358 bp, Homo sapiens
tcctagggcataaaaccagccagcttcaataaagtcactgatcctgaagtcaaagaaatcattgaaggatgtattcgtcaaaacaaatctattaggttgtctatcagggacctattaaaccatgcattttttgctgaggatacaggactgagggtggagttagcagaagaagatgattgctcaaattcatcccttgctttaagactctgggttgaagaccctaaaaaattgaaaggcaaacacaaagacaatgaagctattgaatttagtttcaacttagaaacagatacacctgaggaagtagcatatttgtaggtcaagtctgggttcttccatgaaagtgattccaaagctgttgctaaatccattagagaccgggtgacgccaataaagaagacaagagagaagaagcctgctggctgtttggaagaacgcagggattctcagtgcaagtctatggggaatgtattccctcagccccagaatacaactttaccccttgctcccgctcagcaaactggggctgaatgtgaagaaactgaagttgatcaacatgttagacaacagcttctacaaagaaaaccacagcagcactgctcctctgttataggtgacaatttgtctgaggcaggagctgcatcagttatacattcagatacttcaagtcagcccagtgtagcctattcctcaaatcaaacgatgggctctcaaatggtttctaatatcccgcaggctgaagtaaatgttccagggcaaatttattcatctcagcaactagtaggacattaccagcaagtttaacagttacagaagcattcaaagctgactcagccgcagattttgcctttggttcaaggtcagtccactgttttacctgtacatgtccttggaccgacagttgtttcacaaccccaggtttccccattaactgttcagaaggtcccacagtcacagatgacttcccagcatccaacagttggtcttcaacttgagcgtgatcctagaaatgggaatcaggcattaaccaaagcaccagatgccagtcagacttctagtttcttaccggttaatcaccctcaagctttgttgaatcattcttctgtccttcagattcttcaatgccacaaagccagactgtgcaaggagtattgtttccaagcttgtattcagcaacaatcattaattttacaacctaagattttggcatctccacagaaaaatgttcagcaggattatgttctccaagagtctgaagctcttgcaagtcagcaacagccaattccagggccacctgcggaattatcatccttcccattgaaggctcctgagcagctgccctttgtgatatgtccccagcaacaaacttcttactcatcacagccaacttactcaattcaggctccactacataaacagcctgtttattcactgccagtcctggagcatcctctttacactgtacaaccaccgagatcacagccagcctattctgtgcagacttcttatccagtcccagctgcagtacagccctcatatttggcaaagactcacgtgcagtctgcttatctagtgcaacctctgcttcagtcaccttttccagaccaggcagcatatgcaatccaggcagcttaccttatgcaacctatggaacagcttgcttatcagacactgtctcttgagcatgtatcttatttaggacaaactgcttacactatccagataactgaacatgcaaccttcataaccgtccagctttcagcgactccatcccaagcagatgtcagttttggacaccagcagctaaaaactcaggcccaggcaactagcattatatctcagagggcagtggaaggacagcttcaaaaccctgagcagatgtccttcattcagcaggcctcttcacaggcacagatccagcccccacatttctcagcacagttttcccaatcacatctagcaccaagccaggtttttcacttagctttcattcagcagcagcagatgactcattcatctcatagacaagcacaggaaacccatcagttgtctactcaggaaggtcccataaatcaacagcaatctttatttagtcaacatgctgctctccagtgacaggcacctaagcaagttcagccattaccaggtattccaaacaccattacaaacatggtccagattatacatccattgcaagaacagttgcaactggcagccctggaacaacaatatataatacagcctttagagcagcctcaagtacttcaggcactagataacagtctgacttttcccctacagaaaaacctagcacaataccagccagcatacatccagcagcagtctgctgactggccgcag

SEQ ID NO: 125187 - DNA, 1425 bp, Homo sapiens
tcagaattccaggtaagacccatgttccccttcttgattttgagatgtctcgtagaccaaccatttgccgttcattttgaaaacattcgcgcgctcgatttcatcagttaccgtgtttgaagtgatcagcggcttcattacttttttcaatgtgtaatcattatttaactctatgataccgagggcgccgttcgctaactcagcatcgcgttttttagcgctctgctgaagcttctggctttctttacggaagaagttcgtgccgccgccgtagtacgctttgttaaataaagattcttcgccttggtatccgttttctgttcccgtgttggcttcgaatacaaggtatttatggcctttgtcttcaacgtagtgagggtctctcagcgtatggttgtcgccggatgtataattgccttcatcgataaactgctgaacgttctgatatgtttttccgtctgcgctgttgtcaggctttgtttgccgtaagtttaccggaatagcaagtgtagaataaacggatttttccgtcagatgtaaggttgcgaccttggtgcataaccgcaggtctagttgcccgctttccagtcgggaaacctgtcgtgccagctgcattaatgaatcggccaacgcgcggggagaggcggtttgcgtattgggcgccagggtggtttttcttttcaccagtgagacgggcaacagctgattgcccttcaccgcctggccctgagagagttgcagcaagcggtccacgctggtttgccccagcaggcgaaaatcctgtttgatggtggttccgaaatccgcaaaatcccctgtgatgctccgggggccagctgggaatgccgctgctgcctctttcaggaggccagcccccagcgctgcctccacgggccagtagggcagggacgctgatgagtgcccgttcttgcttctcaagctcagtgagacgggcaacagctgattgcccttcaccgcctggccctgagagagttgcagcaagcggtccacgctggtttgccccagcaggcgaaaatcctgtttgatggtggttccgaaatcggcaaaatccgagatgacggccgacggagggcacacacgagatgacgggggagggagcgtacactcgagttgacagccgacggagcgcacacacgagatgacggccgacggagcgtacactcgagttgacggccgacggagcgcacactcgagttgatggccgacggagcgtacactcgagttcatgaccgacggagcgtacacatgaggtgacggccgacggagcgtacactcgagttgatggccgacggagcgtacactcaagatgatgaccgacggagcgtacactcgagttgatgaccgatggagtgtacactctggaaaacagcagttggtgttttcagtgttctggattttggccat

SEQ ID NO: 125188 - DNA, 1019 bp, Homo sapiens
gttgaagtgcgagctctcccgaccaggggctcgctcccgccatccagactgtaagacttactcatgaatcgttgacggcccttgaaattcctaatgccctgttacagactatccaggatctcatcttggatctccgagtacgttgcgtaatggccacgttgcagcacacggcggaagaaataaagagattagctgaaaaagaagactggattgttgacaatgaaggactgacttctctaccatgtcagtttgaacagtgcatcgtgtgttctctgcagtcactgaagggggttctggagtgcaagccgggagaggccagtgtcttccaacaacctaaaacacaggaggaggtttgccagctaagcatcaatataacgcaggtttttatatactgtctggaacagttgagcaccaagcctgatgcagatatagatactacacatctctctggtgatgtttcttcccctgacttgtttggaagtatccatgaagacttcagcttgacctcagaacagcgccttttgatagtcctaagtaattgctgctatctagaacgtcacaccttcctaaatatcgcagaacattttgaaaagcacaacttccagggaatagaataaatcacacaggttagcatggcctcattgaaagaactagatcaaagactctttgaaaattacatcgagttgaaagcagatcccatcgttggctccttagaaccttgaatttatgcaggatattttgattgcaaggactgcctgcctccaacaggtgtcagaaactatttaaaagaagcactggtgaatataattgccgtgcatgcagaggtgttcaccatttccaaagaactggtccctcgggtactatccaaggggatagaagcagtttctgagagagctcagtcgactgatgcagtgtgtttcatccttcagcaaaaatggagctttacaggcgagacttgaaatctgtgctttgagggacactgtggctgtttacctgacacccgaaagcaagtcaagttt

SEQ ID NO: 125189 - DNA, 2412 bp, Homo sapiens
ccttgtgtaatagctgtatttcaagtggcatctttcaggatgtgggtttaaatggatgaagaagaaagagtatatagagcatgctatatactctgtatatctctcctttcttccccaggtaacccaggcctgcacagtcccatgttggatcttgataatgatacacgtccctcagtgttgggccatctcagtcttttcttgattcagaagtacaatcatagtattttattcttttcccccttagcgtggagatacaaaactccccacagggtggcctttgttgaaaaattgacaaaactcgtcttgagccagctgccttatttttaaattatttctaatatgttttattttgtttttttaatttttaagactgctgagaagtcaaacccgattaatcacatttgaacacggttatgcttgttcctggttttctagaaaatgattcaggaagtaatgcactccctggtgaagcttacccgcggagccctgcttcccctcagcatccgggatggggaagccaagcagtacggaggctgggaggttgctttgcgatcccactctgctcacttctgtttggatgtgtttgttcgcagacttactcatgaatcgttgactgcccttgaaattcctaatgacctgttacagactatccaggatctcatcttcaggccaggcagccaactgtgacctgtttctagaatcttcatcttttcagctgggacttttaggtttaaaaatcatcttcatgatttcacgggttttcacacttgtctcacgggtgcccctcgcggtcctgtgggtggctgtgccagtgacgatggccaggcagcggccgacacatcccagtggctttcttgaatttgagtgctttatttgtaactgttcctacttgcttctatgttcagtctctctgttgatgttttctctctggcaccataaaggtgattttctaaacatttgttttgcttttaggaacagcgccttttgatagtcctaagtaattgctgctatctagaacgtcacaccttcctaaatatctcccatggttcaccttgaatggttaatttaatacccttttcttttctctagagcacctgcgtattcacacctctccttcctctctccctttctgtatgacctcaaggatgcttttgctttgctgctttgtgcatgcacgcgtgcacacacagccgctggctcagaacagctgcaggatgctctgcatcctacctgaaaaatatgtcctccccactctccaatttgaagtacaatagctggtcgtggcacaagctgattaggaactctgagtagttttccagagtgtacactccatcggtcatcaactcgagtgtacgctccgtcggtcatcatcttgagtgtacgctccgtcggccatcaactcgagtgtacgctccgtcggccgtcacctcatgtgtacgctccgtcggtcatgaactcgagtgtacgctccgtcggccatcaactcgagtgtgcgctccgtcggccgtcaactcgagtgtacgctccgtcggccgtcatctcgtgtgtgcgctccgtcggctgtcaactcgagtgtacgctccgtcggccgtcatctcgtgtgtgccctccgtcggccgtcatctcgtgtgtgcgtttccatcaccctcaaataggcaactcatactcttcattatgtgtttataggttagcatggcctcattgaaagaactagatcaaagactctttgaaaattacatcgagttgaaagcagatcccatcgttggctccttagaaccctggcactctgcccactgccccaatgctccacctcacagcccctctccagctggactcaacctctgcctttttgaaaagctcatccttctaaaatataaattggatcctgtcaatcccctgctgaaaaaccttcgaggaggctcaacttttctttgccagccctctctcagacctgctgcctccgttaacaaacagcgaggctaccatcatgaacatcatattcctagtgctgtttgttgggacacttttcagaatctgtttttgtctccgagtgtggacagtgactgtcggcactcagtgcgtggtggttttcatctccgagtgtggacggtgagtgtcggcgctcggtgggtggtggttttcgtctccgagtgtggacggtgcgtgtcggtgctcagtgggtggtggttttcatctccgagtgtggacggtgagtattggcagtcagtgggtggttgttttcatctccgagtgtggacagtgagtgtaggcactcggtgggtggttgttttcatgtccgagtgtggacggcgagtgtcggcgctcggtgggtggtggttttcctctccgagtgtggacggcgagtgtcggcgctcggtgggcggttgttttcatctccgagtgtggacggtg

SEQ ID NO: 125190 - DNA, 426 bp, Homo sapiens; identical to SEQ ID NO: 125000

SEQ ID NO: 125191 - DNA, 1023 bp, Homo sapiens
gcagcaggtatggaagcaaaactgctttaaacattacagcaatgaaactgataacagcaccactcaattggttggagtccagaccctccaggtagtggtaccctctctgattctctgtgagcactgcatgaacttctcctctcctcatgtctggtgctgcatggtccaggctgtccctggtggacaaggtcaaaccatcatgcaagtacctgtttctggaacacagggtttgcagcaagtgagtaatatttaaaaatattgagcagtatatcagaggagaggtttcaaagaatagattattacaacgggccagacccagcagatcatcatccagcagccccagacggctgtcactgctggccagactcaggtaattccactagctctgtcacacaggagcaaaactgatttggaagagtcagataactgagtcagatatcaaccagttaatgcagatggcaccattctccagcaaggtaagtgtacccataagcttccctaggactttttggggcaacttttttgtcccttagacaactgacatacaaccagcagtgggcaagggactgtcactgtgacactaccagtggcaggcaatgtggtcaattcaggagggatggtcatggtaagaaaatgtatttttcagctttgtctttgaaattttcttgaacatgcaacttgatgcctcctaaaagaagagcctctctacgtgaatgccaaacaataccaccgtattcttaagaggaggcaagcccgagctaaactagaggcagaagggaaaattccaaaggagagaagggtatgtataacattgggaaggatataggaaaggagaatagcagggttctacttttgaaattatcttttctctccaaaggaaaaggatagtccccatatgcaggtaggaagacatatacattttattcttctctttattaccttgtattgacttgagttgaagccttcagcatggagctgatcaaggtcatgtttctcactgttccaggaaattgatcaactctt

SEQ ID NO: 125192 - DNA, 398 bp, Homo sapiens
  misc_feature (1)...(398): n = a,t,c or g
gagggtaatgcaacttcttatttattaatatataataacaacaattatacagctcatatctgcaactgttaggtctttgttatgtcttggtcactttgtctggactggccgtgaccttcagctccagggtctgggctaggaagacgttccagtgaccttcgtgggggccagcgagcagtcggaagtgctgtgcctctttctggaagtcttgcttcctgactttcttgatctgagtcaagtggaagattcctttcaccaagctttccagaggtagantctccaccaagtccgaggcctcgtgttccagggcaaagcgacgcaggttgtctggggctttggggataccgatgtgtggacgaggacccggcccggtgccttggggacacctggtaagaacn

SEQ ID NO: 125193 - DNA, 1551 bp, Homo sapiens
ctgagagaagaaaagttacaagaggaaaaaccctctgaagatcaaatccacaagctgttaccagaggatacagaaacagggaaaaggaaaatggatgaacagaaaaaaagagatgaaccattagtactgaaaacaaatctggaacgttgtcctgcacgtctctcagattcagagaatgaagaaccttctcgaggccagatgacacagacacatcgctcggcatttgtttccaagaacaactcctactccttagctttcctggcagggaagctaaactccaaggtggaaaggagtcagagctgtagtgacacagcccaggaaagagcgaagagcagagtcagagcagttccaggcaacaaagccaaggtcacaactatgactccagcctccaaccccatcattggtgtcctcttgtcaactcaaaacaaccgctgcgtctcggcccctgacttaaccatcgaaaagcgtctacccttcagctccctttcatccttggcttccctgcataagccagagcgttctgtcagccctgagagcaatgacagcatctccgaagaactaaaccatttcaagcccattgtctgctcaccatgtactcctcccaagagactccctgatggccgtgtgctaagtcctctcatcatcaaatcaactccacgcaacctaaacagaagcctgcagaagcagacttcttatgaggccagtccacggatcctcaaaaagtgggaacagatctttcaggagcggcagatcaaaaagaccctttcaaaagccactcttacctctctggctcctgaaatgggggaagagttactaggctctgaaggtatccattctagcaaggagaagccacttgtggctgtaaatacaagattatctggtgggcaggtcctctctgagtatactggacccacctctgctgatcttgatcatttcccctctgttagccaaacaaaagcagaacaggacagtgataataaaagtagcactgagatcccactggaaacctgctgttcctcagaactcaaagggggaggcagtgggacttctttggagagggagcagtttgaggggttagggtcaactccagatgccaagttagacaaaacctgtataagcagagccatgaaaatcaccacagttaattcagtgctaccccaaaacagtgttttgggtggagtcctcaaaacaaagcaacaattgaagacattaaatcattttgatctgactaatggtgttctagttgagagcctaagtgaagagccacttccttctttgcgtcgaggccggaaaagacactgcaagaccaagcacttagaacaaaatggctcccttaaaaaactgcgacaaaccagtggggaggtgggtctggccccaacagacccagtcctgcgagagatggagcagaagcttcagcaagaggaagaagaccgacagttggctctgcagttgcagcgcatgttcgacaatgagaggcggactgtgagccggcgaaaaggaagtgtggatcagtatctcctacggtccagcaacatggccggggccaagtag

SEQ ID NO: 125194 - DNA, 603 bp, Homo sapiens
tagggggcaaccttttaactgtcatcttgtgagaggcaacctcaaactttaagcagcctccctctctccctttctggtgtcttaaatcaagaactagtttgaagccaaggcaaagcaaggtttgttcatcttcctttcctgtcatttaaggtaaaacaggcaatgaactcgctcttcaaataccatagttcaagagtagctgtgggccccggttcccagattaataatagccagcaggcagattgccccttccttggggccaccaccctcccaaagctgtgcccaccaatgagagcattgggttcaagtttgcatcaaacatggtattaccaacgctgagcctccagcagagcacttaaaagtcctagtgagagaatagatactatgcaagggaaaaaaatttaaatgccaacgaatagtttttttttttttgaacctgatatactgtttgtttactctcaactctttgtacaaatattattgtcctaagggccttttcccctcctgcctagaaaataggttgtgtattggttttattcaacctgctgtctgctttaggattggagaaggtacctggatccttgtggactccactactggctg

SEQ ID NO: 125195 - DNA, 622 bp, Homo sapiens
ctttttttttttttttttgagggtaatgcaacttcttatttattaatatataataacaacaattatacagctcatatctgcaactgttaggtctttgttatgtcttggtcactttgtctggactggccgtgaccttcagctccagggtctgggctaggaagacgttccagtgaccttcgtgggggccagcgagcagtcggaagtgctgtgcctctttctgggaagtcttgcttcctgactttcttgatctgagtcaagtggaagattctggctgtgtggccttgggccaggtacttcacctctcctgagcctcaagtttcctcatcttttaccagcttccagaggtagatctccaccaagtccgaggcctcgtgttcccaggggcaaagcgacgcaggttgtctgggcttggggataccgatgtgtggacgaggacccggcccggtgccttgggacacctggtagaactgatctcactgtggccagggtctgctttgtcctctgggcaaatcttgcagcacttcccagccactatctcagggtgacggcaggggtacttcgtgggacaggtcacacgcttgcagtcctggcggccatcctcacaggtgcataggatgcatgg

SEQ ID NO: 125196 - DNA, 1311 bp, Homo sapiens
atggcggctgcaggtccgagtactcgggcctcttccgcggcggcagcagccgctctgagtcggcggggccggcggggccgctgtgacgagacggcggcagctaagactggggccccaggcccggcttctggaccttcgctgttggtgttgtcgccgccgttgctgcagccgccgctgccgccgcggccggaggaatcgggctgcgccgggtgcctggagccccccggagaagcagcggccctgccgtgcggccactcgctttgccgaggctgcgcccaacgcgccgccgacgcggcgggcccgggttgccctcgctgccgcgcccgcggcccaggctgggcccgccgtcgggcccgcgacgacggccaggccgactcagaggtgctgggcgagtgcgcccgccgcagccaacccgagcgctgccgcccgcgccgggacgggggcgcggctgccgcggggcccaggccagagcaggagccgcgtgccgcgcctgcggagccagggcttttaagtgttctgctggaggctccagcgttggttaataccatgtttgatgccaatcttgaacccaatgctctcattggtggccagcttgggagtgcctggataatggccatcagtgtctggcatacatatatttttgagtgtgaacaagacctgtgctttgcttctgaccgctggaacacggcaaagtgtcctgcacgtctctcagattcagagaatgaagaaccttctcgaggccagatgacacagacacatcgctcggcatttgtttccaagaacaactcctactccttagctttcctggcaggcggccccgccggccccgccgactcagagcggctgctgccgccgcggaagaggcccgagtactcggacctgcagccgccatcttgtttcccgtttgaagggagagtcggttgcgagggagaagagtggagggcggggcagtacgcgcggatgatagcggtgtcactaggaatgaacgcttattgggcgcttactgtattccagggcctggaccgaggcttctcccacttggttttatgtcatcctcccggctctattaatatccccattttacagatgaggcccagggaggttgaacaccttgcccaaggtctcacgggtttaaaggaaagagcaaggcctaaagtccagcagagggagagcagggttcggggcagctgggtcacaggagcccaagctcctaccttcgtgggggccagcgagcagtcggaagtgctgtgcctctttctggaagtcttgcttcctgactttcttgatctgagtcaagtggaagattcctga

SEQ ID NO: 125197 - DNA, 1286 bp, Homo sapiens
  misc_feature (1)...(1286): n = a,t,c or g
ggtgtggtagaatggcgttcgtaagtagtaagtcgtcaatcttgcgagtcaatctcaggactgcgatgttcgggcgtggggcggccggtactcgagccgacgtggtgtggtaggaggtgtgcgagttattaggcatggggagagagcttggggtgctattcgaaggtggtgggattctgaggcggcagggtagtcgaccggcagggcgcgacgtgatgtgtgcaagggggagggcgttatattcgcgaggtgttaaacggggggaatcgggtgattcgcctggagaggcggtggaaatcctgcggcagattgggttctatatggtgcacatgcggcaaccggtggcgccagaccatggaaggtgtcgagccgcataaccgccctggttcgtgcccatcagttgcccgatgcgatgacgcatctccgccgccgctttgttggtaaacgtcnccgccataatcgagtatggcgagcagttttccacgctcatcaaccaggcgatacgatgcaccagtacgcgcgtcttaccactgcccgcgcccgccagcaccagaaggttgctgcgtggcgcggccaccgcttcgcgctgtttgtcattaaggctgtcgagcaggtaagaaacgtccattggcaccgccgcgtaaaaataggttgggcggagaagcgcaacgccctccgccaaaaagctgggtatatatacagatttgctgattatatcagcgaggtcagagatgccaaccgggaaatttccagatgcggcagtaaacggctgtcccaggtttgcatcagatcgccattttccggtctgatccaacaagcctgcattccgctgcgaattgccccacccacgtcagtgggactagccggacctccgcggtttgcccggcgcgatgtcatttctcgcacggatgttacgtaccgcaacgatcgcctgtttcagccattcggtgtcggccagtgcggcttcatcaacctgagatgcatcgtactgcgggaacggctgcagcatgatggtgtcggcagtgataccgcaaagtactttcacacgctgccagatggtttcggtgatgaacggaatgatcggatgcgcgaggcgcagcagaccttccagtacagtcaccagcgtatggcgagtaccgcgcagttctgcttcggtgccaccgttcattaccggcttggtcagctcgagataccagtcacagaactggttccaggtgaactcatacagaatgcctgcggcgatatcgaagcggaagctgtccagcgcttcgcggtacgctttgatg

SEQ ID NO: 125198 - DNA, 787 bp, Homo sapiens
tggcctgccactggcccacgggcttctcggtaggtttggcatggacaggatctatgaaggccaagtggagatgactggagattaatgtgatgtggaaagcattgatggtcagcctggtgccttcacctgctatttggatgtaggccttgccagaaccatcactggcaataaagtttttggggccttgaagggagctgttgataaaggctgttctgtccctcacagtaccagatgattccctgcttgtgattctgcagagtttgcactggggattccttactttgtccagcccaacatctaactcttcatgttgtaacggagcccacatttctcctgtgtattcacccttctcccattgtgagtcccaggtggtttgagcacgccaactctctcttgattccttggaagggcccatggtaaaggcctgctcgacagccttaatgacaaacagcgcgaagcggtggccgcgccacgcagcaaccttctggtgctggcgggcgcgggcagtggtaacacgcgcgtactggtgcatcgtatcgccttcagactcgaactggtatgggccttcgttaattttcacgctctgaccgtgcatataagaaacaccaacgtcgactgaagcatctttattaaatgcgtaagtcgtacctgcactcagccagaaacggtcttccggtaaagtcgttgagttaaagtcacgttttatgcaggtaactttatccagatcagtgtgttctaagaacgcgtagtaaaagttagtaccgttcagccagcttttaccttgagt

SEQ ID NO: 125199 - DNA, 974 bp, Homo sapiens
  misc_feature (1)...(974): n = a,t,c or g
gtcactaaaacatctgaccctttgaagattctgggcaacgcagaggccatgaaggtgctgggagtgcagcggcctctcctacagagcacaatcattgtggagaagacagttcaagacctcctgaacctgatgcatgacttgagtgcatattcagatcaattcctcaacatggtgtgcgtaaagctccaggagtacaaggacacctgcactgcagcttacaggggtattgtccagtcagaagaaaaacttgtcatcagtgcatcctgggcaaaagatgatgatatcagcagactcttgaaatctctaccaaactggatgaatatggctcaacccaaacagctgaggccaaaaagagaggaggaagaagatttcataagggcagcttttggcaaggagtctgaagttcttattgtgaacctgggtgataaattaatccctccacaagacatccttcgtgacgtcagtgacctcaaagccttggccaacatgcatgaaagcctggaatggttggcaagtcgaacaaagtcagctttctccaatctttctacatcccagatgctttctcctgctcaagacagccacacgaacacggatctccccccagtgtcagagcagatcatgcagactctcagtgaacttgccaaatcgttccagggatatgggctgaccgctgcttgcttgtcttacatctgggaagtgagggttcactgtttccactatcttatccctcttggcaaaggaggggaactatggccattgtgggttaatgtgggaaagtatggattatgaccccctggtggtcaagctcaacaaagatatcagcgccatttgaagaggccatgagcgccagccttcagcaggcacaagttccagtatatcttcgaagggcctggggccacctgatctcctgcatcctcattaatggtgcncagtacttcangcgcatcagtgagtctggcatcaagaaaatgtgt

SEQ ID NO: 125200 - DNA, 1077 bp, Homo sapiens
atgcctgtgatcaagcctggggcagcttttggcaaggagtctgaagttcttattgggaacctgggtgataaattaatccctccacaagacatccttcgtgacgtcagtgacctcaaagccttggccaacatgcatgaaagcctggaatggttggcaagtcgaacaaagtcagctttctccaatctttctacatcccagaagccaaggcaaggccatgagacagaaaacatggtttcagagtccaccctgctggatgctgtggatccttctctgagaaaggagactggatatgccaccccaaaactatccatgttggtggatccagggttaaagcacagcccagaacgtaacttagaatattacgaaacaggtgtccaagagttttccagaccagcatctgttccagaaatgggcacagtcctgcagccaggaggcagagctagtgccaggcctgcagcacgcagggcaactggcctagggaccacggaaaaggcaaatgaagccagaggcagacggtccctggaatggaatcctttcctgcatctcctctccgcaggtagtcctggattccagctttgtgtcctccttggcaagctcccctgtcctgaaactgcagaggggccacatgacctccacagtctgaactgctattccctgtccctctgtggtcctttgccaggagaagcccccaccacgaggtcaggggagaccctgagcagaggagtctccccccaccaggccaagcaaggaaagagctcagctggaaggggctggattcattcgcgcctctctccagccactcctgcagctcctggcttcctcgcaagcctctccatcagcgccctcacagggcttggacacttcacagctgctgggagaaagaatggaatggacccaaggacatccaggcaggcccaggccctacctgctggcgactcgggcaagtcactttctctctccgagtctcgttgtcccattcatcataaaggaacaggcattactgctatagggttgctgaggataagatgcaccttgtacagcatagtaatgaacggcggcagaaaacaggtcttttag

SEQ ID NO: 125201 - DNA, 363 bp, Homo sapiens
atgcataactatgtaaatacagagaatgtaacagtgccagcaagtgctcacaaaatagaatattcaaggcgtcgggcctgtacaccaacagtctttaactttgatatcagacgcccaagtttagaacacaggcagcttaattacatacaggttgacttggaaggtggcagtgactctgacaaccctcagacaaaaaaaacgcctacaactccccttccacaaacccctaccaggcgcacagagctgtatgccgtgatagacatcgagagaactgctgctatgtcaaatttgcagaaagcactgccacgagatgatggtacatctaggaaaactagacacaatagtactgatctgcccatgtga

SEQ ID NO: 125202 - DNA, 1158 bp, Homo sapiens
atgacgttcgatggtattacctctcacgatatttacatgcttggtgatgtatcaaactcttcaaccggccctgccaagccgatgaacaatacagggcttgtgctgcagatgggtcgtgatgcgaacgatgtgacattcacttactctcgcttcgcagtgccgcaagccaaaggcaacaatgtggttatcacaagctacatgacaaacagaggcttcttcgaggataaaaaggcaacatttgcgccaagcttcttaatgaacatcaaaggcaataaaccatccgttgtcagacacagcatcctggagcaaggacagctgacatggctgccaatagcgcagcgagcagggctggccgcaggccaaagcggtcggacagtgctccgagaacgcgtgcgcatagaaactgcatcaacgcatatagcgctagcagcacgccatagtgacaggcgctgctgtcggaatggacgagatcccgcaagaggctccggcagtaccggcataaccgagggggatcctctacagaagactggctatgtcagcacaagtagactgggtgtcagcacagaagggcgggcaacagaacaatctgctggcttagctttgcccaagtgggcagctggacgaggacgctcagagccagctctcgagagttcaagtatccgacagttccccactgctcccaggagcggttacccgggcactctgtgcccctcattcctgtaccacagtaagccagtgctgtgtgctccgaattccagggcatcccccagctcagccactacactcagcacaaggactctgtggggcccaggagcaggtagtcacccctttgggctcctcaacacccggctgtccccagacttgtgtccagggaagatagtgttgagggccctcaaggagagcagggcagggatgcctgagcaggacaaggaccccagagtccaagaaaatcctgatgatcacagaacggtccccgaggtcaccggggatgcacggtctgcattttggcccctgcgggacaatggaggcctctctccctttgtgcccaggcccgggcctctgcagacagacctccatgcccagaggggatcctctagagtagactgggatgcagccagaaggctcacccagcaggagccatttatcgtcctgtcctga

SEQ ID NO: 125203 - DNA, 528 bp, Homo sapiens
  misc_feature (1)...(528): n = a,t,c or g
aaggcgtcgtttcgctgcccaaagacagactgaaancgctggccgancgtcaggtggacagagtccttgcaatnccaggcctttgtgtatgcagcttctgggttctcacagtttcatggcttgtctgtcagaaatttccagaattgaaattcaaatatgtggaagaggagcagcccgaggagttttttatcccctatgtctggtctcttgtctacaactcagcagtcggcctgtactggaatccacaggacatccagctgttcnccatggattccgactgagggcaggatgctctcccacccggacccctccagccaagcagcccttcaagttcttttatttctgggtaacagaagtagacagacaggttacttggtgtatcttctgttaaagaggattgcacgagtgtgttttcctcacacactttgatttggagaattggtgctagttggcaatagataactcagcgtagatagtattgcaaaaagggnaggaaatacacaacaataataaatgtaaaaacntnct

SEQ ID NO: 125204 - DNA, 428 bp, Homo sapiens
tttaccatcttcctgtaagatcgtgcagccacgttcaaacaacatcccagcatggcagctaactccctggagccacacggggctgcgggggctgtggttgaccaggaatgaagccttctgcttgaagttcacagacagcccagtaggaagctcagtggaaatgactctgactagagctgccatgtaccaggcacttcctgcttcactaatgaccaccctataaaaaacaaaagtggcctctctcggctcactggcttattgccttcacaacactcagtgcaattggtgcttctcttatttgttgacttgtgcaccatttgtttccccaactagaacaaacatcggttctaagaaggcagggaccttatgagcatctggcatgtcactgacatcttaaggcacgtttgctgaatgaggaattaaataaa

SEQ ID NO: 125205 - DNA, 552 bp, Homo sapiens
atgactcccagctcccttgccctggctctttctggccccatcgtgccacaggcctgcctgggaaacactgtgcatgctcgtctgtggccctgcctgagccagcccctgagcagtgtccacgagagacctgggctcaaggagcagcagtctgcagaggtgaagtccttcctctctgcggtctctttgtctgattgggtggtcattagtgaagcaggaagtgcctggtacatggcagctctagtcagagtcatttccactgagcttcctactgggctgtctgtgaacttcaagcagaaggcttcattcctggtcaaccacagcccccgcagccccgtgtggctcagggagttagctgccatgctggatgttgttgaacgtgctgcacgatcttacaggaagatgaaatttccagaattgaaattcaaatatgtggaagaggagcagcccgaggagttttttatcccctatgtctggtctcttgtctacaactcagcagtcggcctgtactggaatccacaggacatccagctgttcaccatggattccgactga

SEQ ID NO: 125206 - DNA, 820 bp, Homo sapiens
ccaagaattcggcacgaggtcattgaagaagtgattcgaatgatgttagagatcatcaactcctgcctgacaaattcccttcaccacaacccaaacttggtatacgccctgctttacaaacgcgatctctttgaacaaattccgaactcatccttcatttcaggatataatgcaaaatattgatctggtgatctccttctttagctcaaggttgctgcaagctggagctgagctgtcagtggaacgggtcctggaaatcattaagccaaggcgtcgttgcgctgccccaaagacagactgaaagaaatttcccagaaattgaaattcaaatatgtggaagaggagcagccccgaggagttttttaatccccctatgtctggtctcttgtcctacaacttcagcagtcggccctgtactgggaattccacaggacattccagctgtttcacccatgggattcccgactgaggggcagggatgcttcttccccacccgggaccccctccagccaaggcaggccctttcaaagttcttttatttctggggtaacagaagtaggacagacaggttacttggtgtatcttctgttaaaagaggattgcacgagtgtgttttcctcacacactttgatttggagaattgggtgctagttggcaatagataacctcagccgtagatagtattgcaaaaagggggaggaaaatacacaaccaataaataaaatgtaaaaacctgctattccaaaaataaaagagaagagagataaaagaattagcacgggcgggatttatgtggtctatgtcaccccgggattccgga

SEQ ID NO: 125207 - DNA, 1965 bp, Homo sapiens; identical to SEQ ID NO: 121511

SEQ ID NO: 125208 - DNA, 417 bp, Homo sapiens
gcgtcgacggcgggggtgtcttactatgttgctcaggctggtctcaagttactgggcctaagcctctcaaagtgccgggactacaggtgtgagccaccatgcccagagtagatgagtttatacaaagttatggcaatggcaaggaaagctatgagtctgtaacatctacttctttttggatgagttcatgtactttgcagggacatggatgaagctggaaaccatcattctcagcaaactatcacaaggacagaaaaccaaacaccgcatgttctcactcgtaggtggaaattgaacaatgagatcacttggacacagggttggggaacatcactcaccggggcctgccacggggtgggggactgggagagggatagcattaggagaaatacctaatgtaaatgagttgatggggtc

SEQ ID NO: 125209 - DNA, 366 bp, Homo sapiens
atggaatactatgcagccataaaaaatgatgagttcatgtcctttgtagggacatggatgaaactagaaaccatcattctcagcaaactgtcacaaggacaaaaaaccaaacaccgcatgttctcactcataggcaaactccgcttcgttctgcaggttggaggcctgctggagtgccagtgcctgtcggaagccacatccataggaaaagggggagagtactacatcaagggaacatcccgtgggacaaaagaatctgaacaacagccttcaaccccagaccttccctctgatagggcctacccaaatgagaaggaaccagaaaatcaaccctgcacacagcatgatgctcttttccacaaataa

SEQ ID NO: 125210 - DNA, 375 bp, Homo sapiens
atggaatactatgcagccataaaaaaggatgagttcatgtccttagcagggacatggatgaagctggaaaccatcattgtcagcaaactatcacaaggacagaaaaccaaacaccacatgttctcactcataggagtccacctgtcccgagttggaagtctgaactcatgttcctggattcctcccatgcatcttggtgctggtgtggggcctgaactcagccaatccgcaacacctccaggagtcttcctcttagatgctgaggccacggagaaggaagcagcacaaagaatgaaccctggagaggataagatcaatcagattcgtgttttgcaactacttcttggcaagacgtacgggactgaccgcagttga

SEQ ID NO: 125211 - DNA, 197 bp, Homo sapiens; identical to SEQ ID NO: 121092

SEQ ID NO: 125212 - DNA, 270 bp, Homo sapiens
atggaacactatgcagccataaaaattgatgagttcatgtcctttgtagggacatggatgaagctggaaaccatcattctcagcaaactgtcacaaggacgaaaaaccaaacaccgcatgttctcactcataggaaaggatcctccccatctctgcagaagcctgaccatccccctagagggcctgggaggaagtgggttttgcatacagtccctgttgactctagtgccccctgctggccccagacgcgagttccggcgaggcttcagg

SEQ ID NO: 125213 - DNA, 146 bp, Homo sapiens
atggaatactatgcagccataaaaaaggataagttcatgtcctttgtagggacatggatgaagctggaaaccatcattctcagcaaactatcgccggcgtgctgtgcaatttatccagtggccactagaggacagcagcgactcag

SEQ ID NO: 125214 - DNA, 268 bp, Homo sapiens
atggaatactatgcagccataaagaaggatgagttcgtgtcctttgcagagacatggatgaagctggaaaccatcattctcagcaaactatcgcaaggacagaaaaccaaaccgaatgttctcactcatagagagactatctggaagataacatgtgagccatccccagtcataagcatctgtctgcagtcggagctcttcatggtcaaagtggacgccaagagcttagagcattcaggctctaaagagcaatctaaaagtatcttag

SEQ ID NO: 125215 - DNA, 301 bp, Homo sapiens
atgatagactggattaagaaaatgtgtcacatatacatcacggaatactatgcagccacaaaaaatgatgagttcatgtcctttgtagggacatggatgaagctggaaaccatcattctcagcaaactatcgcaaggacaaaaaaccaaacaccacatgttctcactcatagccttaatacagatattggcagctgctgcagctgagcgagatgtggtttatttcacctttggggactcagaattgatgagagacatttacagcatgcacattttccttactgaaaggaaactcactgttg

SEQ ID NO: 125216 - DNA, 289 bp, Homo sapiens
atggaatactatgcagccataaaaaaggatgagttcatgtcctttgtagagacatggatgaagctggaaaccatcatgctcagcaaactatcacaaggacagaaaaccaaacaccgcatgttctcacacaacagcccacaaaacaaaccgcctgcagctcctgttataaatgagtatgccgatgcccagctacacaacctggtgaaaagaatgcgtcaaagaacagccctctacaagaaaaagttggtagagggagatctctcctcacccgaagccagcccacaaactg

SEQ ID NO: 125217 - DNA, 301 bp, Homo sapiens
atggaatactatgcagccatgaaaaatgatgagttcatgtcctttgtagggacatggatgaagctggaaaccatcattctcagcaaactatcccaaggacaaaaaccaaacaccgcatgttctcactcgtggatggatccacagcgaagggggaagcggcagtcactatctatcagtgaggcaggagccaaccagttcccgaagagtgttttccgcttctttgggctgggagacagcaaggttggtagtaaatggtctgcgacatgtgcttgtgagcctatccacacgagtgagtactgtg

SEQ ID NO: 125218 - DNA, 253 bp, Homo sapiens
atggatgatgctggaaaccatcattctcagcaaactatcccaaggacagaaaaccaaacactgcatgttctcactcaaaggcctcagtatggtggcttattctgtccaggttctagccgtatttatcagctgtgcaatattaacccttgcaatgaaaatagcttggattttcgggctcaacagtgtgcagaatataacagcaaacctttccgtggatggttctaccagtggaaaccctatacaaaagtggaag

SEQ ID NO: 125219 - DNA, 978 bp, Homo sapiens
atggatgaagctggaaaccatcattctgagcaaaccatcacaaggacagaaaaccaaacactgcatgttgtcactcataggtgggaactgaacaataagacttggacacaggggtttctgggaaagcaaaacagtgagactgatatttgtgtgcaagaaatgtattgggggtgcttttgggatgaacacatcttgggtaatgaaggaacaaggaggactgggcagaggaggaagtggaaagctttcacgctctcacaagacctcagcagtcacaccgacccaccccagcaggctctgtctaactggaaaggcactagagcattgcctaatgaaaacaaaagggatggcctttatccccgctgttgtttggcatcctatgtgtgctgccccaaaaaggaggcatggtcttggggcaaagtggctgtctttagcaaagggaagttgcagagagggtctcagctgagagctgcctgtgatcaaccttctgggcaattgggctatgagcactttgtcctccagggggcgctatggtcctgtcagctttgggaagaagtgggctattctccaggagcacacctaatgctttgtcgggtagaggcctctgcagccacgacctccagcttgaaggcagtcccagctttcaccagggaagaatgggctgcttctgcaagccctgagggctgcaggaaagaggaaacaggacatcagcagggagctcaccaccagcaactggtgaccatcggcaagcagttaaaggctgagggcaagagctcacagagagactcttatttctggcacacagtcaagaagcaaaactggaatctctacgttaaatcccagcgacacccccagcttcttgaaggagagacgttattgaaggagatttccttcctggatcatgaaaagctgtcctttggaccctcctctgcgggtctggggactctggctgcctcatactcaccccgttcagtgtcctga

SEQ ID NO: 125220 - DNA, 371 bp, Homo sapiens
atgataggatcaaaaatcaatgaaattgaacataaaaaacaacagagaaaaatcaaagaagcgaagacccggttctttgtaaagatcaataacaaatctctagcaagacaaagaaaaaacagagaagacaatataagaactgaaataagggacatggatgaagctggaaaccatcattctcagcaaactaacacaggaacagaaaaccaaacactgcatgttctcactcataagtgggagttgaacaatgagaacccatggacacagggaagggaacatcacacactggggcctgtgaggggggggagagatgcaggtgaagcagggagaattctgacagtgacagcctgggaactggcgagaacgatcgg

SEQ ID NO: 125221 - DNA, 1395 bp, Homo sapiens
atggggagaaaccagagaagaaatgctgaaaattccaaaaaccagaatgcctcttttcctccaaaggaacacaactccttgccagcaagtgaacaaaactgggtggagaatgagtttgacaagttgacagaagtagccttcagaaggtcggtaataacaaacttctccgagctaaagaagcatgttctaaaccattgcaaggaagctaaaaaccttgaaaaaagggacatggatgaagctggaaaccatcattctgagcaaactatcacaaggacagaaaaccaaacaccgcatgttctcactcataagtgggaattgaacaaggagaacacatggacacagggaggggaacgtcacacaccagggcctgttgaggggtggggctctgtgggaggagtagcattagaagaaatatgtaatgtaaatgatgaggatgacgtcaccaaagatcgcattaatggcatgtggaagaagacacacaagaagtttgttcatgacttcaaaggatttgtcaaggatgatgaggttgcaaaaagaaataaggctatgattgagatggcagacaaatttaacttgggtgtggaagcattcctgcaagctcccttcatggctgaactcctaataatcaagaactgcccatgggtgaaggcaagagaagatgaatgttccagcttaaggagagacaatgaatttgctgcaggacaggcaagccccaaaatgacagctaagcccagaagagttcttggtttaacccaggaaagaattcaagggcaagccagtggtattaaaaagcaacttttattgaagcagcagtgtactgaagcagcagcagaagcactgctccttgtggagcagggataccccgaagaatcagataggcacaatcagggtactggaagtcctgattactcagagacgttaatcgcatactatgtgaaccccaatcatgtcctaatttgccctccaaaagaaggaacagggaaagagacaacagggatgcacttatacagggaaaaggctacaggaggacatgaaaatgcagccctcttcaagccaaggagaaaggcctcaggaggaatcaactgtgttggcaccttgatcatggacttccagcctccagaaatgtttatggaaaggctaaaaggtaatttgttgtacgattatggttgctgcaatgacacaactgccacaggccacaggtcacacatgtcacgggtttttctaaagttgaaattggaatccaacttaagaaattgccatcaaacgccaaatggtaatgcaaccagagcctctgatgatagcctcttctgctgggaacccttagaaaggcctctgagggagctccgattgccattttcctcaaaacagcgccctctgtcagcaggaggcagttaa

SEQ ID NO: 125222 - DNA, 912 bp, Homo sapiens
atggaatcaaaaagagcccgcattgccaagacaatcctaagccaaaagaacaaagctggaggcatcacactacctgacttcaaactatactacaaggctacagtaaccaaaacagcatgctactggtaccaaaacagagatatagatcaatggaacagaacagagccctcagaaataataccacacatctacaaccatctgatctttgacaaacctgacaaaaacaagaaatggggaaaggattccctatttaataaatggtgctgggaaaactggctagccatatgtagaaagctgaaactggatcccttccttacaccttatgcaaaaatcaattcaagatggattaaagacttacatgttagacctaaaaccataaaaaccctagaagaaaacctaggtaataccattcaggacataggcatgggcaaagacttcatgacgaaaacacctaaagcagtggcaacaaaagccaaaactgacaaatggcatctaattaaactaaagagcttctgcacagcaaaagaaactaccatcagagtgaactggcaacctacagaatgggagaaaatttttgcaatctacccatctgacaaagggctaataaccagaatctacaaagaactcaaacaaattcacaagaaaaaatcaaacaaccccatcaaaacggacatggatgaagctggaaaccataattctcagcaaactatcgcaaggacaaaaatccaaacaccgcatgttctcactcataagtggaaattgaacaatgagaacacatggacacaggaaggggaacatcacacactggggcctgttgtggggtgttggtatctatggctgacagacctgaagacaaatcacatcacaggactctttgtggacactcccaaggacctgcctggagcccagtag

SEQ ID NO: 125223 - DNA, 680 bp, Homo sapiens
ttttgttgtaaaactgtaaaataagcaaggccaaatatttattgtttggcaacacatagagatatatagagttttacatgtaaaattacctataaatgtcaacagcacattgacatggtaaatacgaagttcaaaatgggatatccctggcatggaatagagagctgggatggcggagggccacacgggaagctgcaatagaatttttgatgtttgcttcattctctaggtgatgtgttcactggtgttcatcttatcatgtttttaaattgacaagcatgttacatatacaccacagaatactatgcagccataaaaaatgatgagttcatgtcctttgtagggacatggatgaagctggaaaccatcattctcagcaaactgtcacaaggacaaaaaaccaaacaccgcatgttctcactcataggtgggagttgaacaatgagaacacatggacacaggaaggggaacatcacacaccgggacctgttgtggggtgtgaggaaccttcaccaccccattttgtggtacaaccatcatttactgatcaaaacagaaaactgatcgtggtcattgtttcttctctctccctgaaacgctatttcccatacaacccaaaaagtctcggtgagggttacgtggtgagggaagttcacacagcagccgcatggtatcggtga

SEQ ID NO: 125224 - DNA, 630 bp, Homo sapiens
atggagcagctctcaccgatggccagctcctaccactctgaccacgctgctgtctccctggccatcttctttgactacaaaggaataaaactaggtatcaagctggcggctgttcccagtgccttgcccacccctgccgggccgtcggactcggcggggcccctgtggcatccctgtccagtccctgtcaccacccagtttttccctctggacccaggaattcaaagtaagcaaggaggtccgctgctccagttggctgcaaataattacaaccttaagcccaagcagcactttgggtcctggtttgggaccatgaagcggctcgggacatggatgaagctggaaaccatcattcttagcaaactatcacaaggacaaaaaaccaaacaccgcatgttctcactcatagatgggaattgaacaatgagaacacttggacacaggaaggggaacatcacacactggggcctgtcattggggggacaaagaagcaaggagaagaggaacatgctgtcctcctggggggtggggggcacaaagaagcctggagaagtggaacagttttcggcagcaagagtgacagctggggaatatttatccaggagcaaatgtgggtcttatgtgaatgca

SEQ ID NO: 125225 - DNA, 922 bp, Homo sapiens
atggcagaaggcaaaggaggagcaaggcacgttttacatggtggcaggcaagagagcatgtgcaggggaactgccctttataaaaccatcagatcttgcctcaagttttgccctccattaagaagggacaccctctttacggattggttacaggatctaattcgcctacaatcaacccttgagtcagaaaaagggattgaagcatcagtaagctctgggaaggcttatatccttggtcaacttcagactgctgtgctggcaggagagctctggatggcatcaggccagtgcccctctgagacgaagtttccagaggaaggagcaggcagcaatctttgctgttctgtatcctccactggtgataaccaggcgaacaaggtcgggggagtggaactccagcaaactgctgcagaactgcagaagaggggcctgaccgttagaagaaaatctaacaaacagaaagcaacaacatcaacatcaacaaaaaggactcccacacaaacctccgtccaatcatcatcagcctcaaagattaaagaaggaaaccttgctcagtggacttggaaagaacgtcatttctttgtgttcaatgtcaaatacccagggcttggtaaaatgttagccatatgggacatggatgaagctggaaaccatcattctcagcaaactaacacaggaacagaaaaccaaacactgcatgttcttactcataagtgggagttgaacaatgagaacacatggacacaaggagggggaacatcacacactggagcctctaggaggattttttaaaaatcagcatattcagtcacacaaaagactatttcaagaaattaagggtctcccatacagattctctcaatgtgaccatagggcccctaggaagcttaaggacgttgtgcttcagccccatcagcagcag

SEQ ID NO: 125226 - DNA, 1058 bp, Homo sapiens
gaatatacctaaccaaggagttgaaagacctctacaaagaaaagtgcaaaacactactgaaagaaatcacagatgacacaaacaaatggaaacacatcccaagctcatggatgggtagaatcaacattgtgaaaatgaccacactgccaaaagcaatctacaaattcaatgcaatccccttcagaataccaccatcattcttcacagcattagaagacacaattctaaaattcatatggaaccagaaaagagcccacatagccaatgcaagattaagcaaaaagaacaaatctggaggcatcatactacctgatttcaagctatactataaggccatagtcaccaaaacagcatgggacatggatgaagctggaaaacatcattctcagcaaactattgcaaggacagaaaaccaaacactgcatgttctcacttataggtgggaactgaacaatgagaacacttggacacagggtggggagcatcacataccggggcctgtcgtggagtgggggaaggggggaaggatagcattaggagaaatacctgatgtaaattatgagttgatgggttgctccaggagcatgcgtacagctacctgccacgaggattggggtggggaatgggtagctgctattgagtatatgctggaatttgctgaaattaaccacaatttatcatccaagccttcccctggaagttgcaagccttcaacatacttcagagttacaaaagagttgtatcagacagattctacctgtgcaattgttgtccagggttctctgctgtctgaaaatttccaaggcacgttgtcatataagagccctgttgaggatagaaggcagcagaaactgaagcaaggagaacaaccaggagatgtagcattcctggtgaaagctgatgctggcttgtgccagagtttcactggtggagaggaggagaaatggtcagcttctgaatatattttgaagagctcagaaacttttgatgagtgtatcatggtcactatttgcagtacaattcgcaattcttgccgtcctggaactactaaaagatag

SEQ ID NO: 125227 - DNA, 444 bp, Homo sapiens
atggaatactatgcagccataaaaaaggatgagttcatgtcctttggagggacatggatgaagctggaaaccatcattctcagcaaactatcgcaaggacaaaaaaccaaacaccgcatgttctcactcacaggagatcccacaggtgatgaccgcctgtgcctcctgtccctcccaggagatcccacaggtgatgaccgcctgtgcctcctgtccctcccaggagatcccacaggtgatgaccgcctgtgcctcctgtccctcccaggagatcccacaggagatcccacaggtgatgaccgcctgtgcctcctgtccctcccaggagatcccacaggtgatgaccgcctgtgcctcctgtccctcccaggagatcccacaggtgatgaccgcctgtgcctcctgtccctcccaggagatcccacagaccttcgtgtgggatga

SEQ ID NO: 125228 - DNA, 597 bp, Homo sapiens
atggaatactatgcagccgtaaaaaatgatgagttcatgtcctttgcagagacatggatgaagctggaaaccatcattctcagcaaactatcacaaggacagaaaaccaaacactgcatgttctcactcaaagatggaagacgttgccagcaggatcaaaaaaccctggattcatgtggcagatgcagggctggacccagtctaaatactacactgaaaccaaagagagtgaaaactgtatctgggaacaggataaaaagcaaccagaccaataaactgcagaagaaaggaatggcagcagtgggccaggcatgtgagcaggttcccaagcccctgtgcagtgggtgtggtgtgggtgatgccagtagcagcaacggacatccctctgggacccaagtggtccacattggtgttggcagtgcctgtgacagtccacagccacagcagctgtgggcagtggaatttgcccttggggcatgtaagaatgcacagctgcccctctgcatggggccagggcagaaaagtaaactgcagctaaaagaatctaaaatacttcccaaagccactgagtcagtcagcaccatgaccagaacttga

SEQ ID NO: 125229 - DNA, 1464 bp, Homo sapiens
  misc_feature (1)...(1464): n = a,t,c or g
atgacccttacaagctccgggagaaagtcccctctccgactccctcccggtgcattggtggaggccctattcggggtctgtgagatctccgcggcggtttcccactcagatcctagacttgtggggatcagaaagcgtgggtcgccggactcgttcagcgagcggaacagggacatggatgaagctggaaaccatcattctcagcaaactaacacaagaacagaaaaccaaacactgcatgttctcactcatatgtgggagttgaataatgagaacacatggacacaggggtggcggcatcacacaccgggacctataggaagnagatcccctactttacttatgcatgtgcactacatcaaagttatatcctggagagaactcttgttgatttggctccgagctgccaatgcatctatcaaccccggagttgagcagtcaccctccggggatccaaagacagtcacgggcttccctttcctgcggctggaggccgcagactgggtggaagaggcatctgtccccaagggcgtgcacattgccctctccagccaagagcagcgtgctggggaccctcgtgatttggaagcaccttctaacttagttatttctgagcgaacccatcgttcttttagagtgagctggacaccaccttctgacagtgtggatcgatataaggtggaatactatccagtttctggagggaaacgtcaagaagtcgtgcgaacacctggggtcccggatctccgcttgcctgccatcatcccccaggctgcttggctgctggctcatctgcccgcaccgtccgccccgccgactgagctccccacaaagcacacagaggcgcagagccagcgctgttggagtcttttattgtgttctgtcaccgaggtcgcagccccgagccaggtagtaaaagaagctccaccttctttccacacgggaacagaaaacggataccaaggcgaagaatctttatttaacaaagcgtactacggcggcggcacgaacttcttccgtaaagaaagccagaagcttcagcagagcgctaaaaaacgcgatgctgagttagcgaacggcgccctcggtatcatagagttaaataatgattacacattgaaaaaagtaatgaagccgctgatcacttcaaacacggtaactgatgaaatcgagcgcgcgaatgttttcaaaatgaacggcaaatggtacttgttcactgattcacgcggttcaaaaatgacgatcgatggtattaactcaaacgatatttacatgcttggttatgtatcaaactctttaaccggcccttacaagccgctgaacaaaacagggcttgtgctgcaaatgggtcttgatccaaacgatgtgacattcacttactctcacttcgcagtgccgcaagccaaaggcaacaatggtggttatcacaagctacatgacaaacagaggcttcttcgaggataa

SEQ ID NO: 125230 - DNA, 481 bp, Homo sapiens
cgagtatatatccaaacacatgcacacgtatgtttattgtggcactactcacaatagcaaagacttggaaccaagccatatgtccaacaatgatagactggattaagaaaatgtggcacatatacagcatggaatactatgcagccataaaaaatgatgagttcatgtcctttgtagggacatggatgaagctggaaaccatcattttcagcaaactatcgcaaggacagaaaaaccaaacaccgcatgttctcactcataggtggggaactggaacaatgagaacacatgggacacaggaaggggaacatcacacattggggcctgttgtggtcaggggggagtggggagggatagcattaggagatatacttaatgttaaatgacgagttgatgggctcagcacaccaacatggcacatgtatacatatgtaactaacctgcacattgtgcacatgtaccctagaacttaaagtataat

SEQ ID NO: 125231 - DNA, 970 bp, Homo sapiens
atgggcaaagacttcatgactaaaacaccaacaccaatggcaacaaaagccaaaattgacaaatgggatctaaataaactaaagagcttctgtacagcaaaagatactatcgtcagagtgaacaggcaacctatagaatgggagaaaatttttgcaatctatccatctgacaaacggctaatagccacaatctacaaggaacttaaacaaacttacaagaaaaaaataaacaacctcatcaaaaagcaaacagggtgtggagcagacctccagcaaactccagcagacctgcagcagacgggactgagtgttagaaagaaaactgataaacagaaaggaatagcatcaacatcaacaaaaaggacgtccacacagaaaccccatccaaagatcaccaacatgaagaccaaagaaatacaaactaccataaaagaatactatgaacacctctatacaaataaactagaaaacctagaaaaactagaaatggacaaattcttggaaacatgcaacctcccaagattgacccaggaagaaattgaatccctgaacagatcaataacaagttctgaaactgaatcagtaataaaaagcctaccaaccagaaaaggcccaggaccaggtggattcacagccaaattctaccagagggacatggatgaagctggaaaccatcattctcagcaaactaacacaagaacagaaaaaccaaacactgcatattctcactcataagtgggagttgaataatgagaacacatggacacagggaggggaatatcatactccagggcctgttagagtttgggggaatagaggagggatagcattaggagaaatacctaatgaatgcagctcctcaccagcaacagaccaaagctggatggagaatgactttgacgagttgaaagaagaaggcttcagacgattggtaataacaaacttctccgagctaaaggaggatgtttga

SEQ ID NO: 125232 - DNA, 1169 bp, Homo sapiens
ttttctactataaagacacatgcacacatatgtttattgtggcactgttcacaatagcaaagacttggaaccaacccaaatgcccatcagtgatagactggaaatgaagaacatgtggcacatatacaccatggaatactatgcagccataaaaaatgatgagttcatgtccttttcagggacatggatgaagctggaaaccatcattctcagcaaactaacacaggaaccagaaaaccaaacactgcatgttctcactcataagtgggagttgaacaatgagaacacatggacacagggaggggaatatcacacatcggggcctgctcgggggctggggagaaagcaataaaatcaacaaaaaggatgcccacgcaaaaaccccatccaaaggtcatcagcatcaaagatcaaaggtagataaatccataaatatgaggaaaaaccagcgcaaaaatactgaaaattccaaaaaccagaatgcttcttctcctccaaaggatcatgactcctcaccagcaagagaacaaaactggacagagaatgagtttgacgaactgatagaagtagacttcagaaggggggtaataatgaagtgctctgagctaaaggagcatgttttaacccaatggaaggaagctaagaaccttaaaaaaagaattggaaaaaactactttaaagttcatatggaaccaaaaagagcccacattgccaagaccatcctaagcaaaaagaacaaagctggaggcatcacactacctgacttcaaactatactacaagcctacagtaaccaaaacaacatgggacatggatgaagctggaaaccatcattctcagcaaactaacacaggaacagaaaaccaaacactgcatgttctcactcttaagtgggagttgaacaatgagaacacatggacacagggaggggaaggaacatcacacaccgaggccctgtccctgcaatcattcaaagaacagactccctcaactgtgcaatacaaacgaaagagaagtgacaggcactcagaggtcttggccaccaacatacgttcttgtgggacagtgccacaaaccttcaacccttacagccacaaggaactgtttgctgcctttggatttttcaggtccccaaatatgtctaaggtaaaagttggcactgaattctaa

SEQ ID NO: 125233 - DNA, 3368 bp, Homo sapiens
atggagtgggtactgcttggatctccttctagaaaacctgttggagaagcatggttgactgcagatccaccatatttgtaccgaggccatctttctaccagtctagttacagccagcttccattgcaacttctacagaaagttcaggaaaataacgactttcaacattatagaatttcaagttagaagtgatcattttcaactgatgaatctcattgaggaagatgaggcatcaagaggtagaagactaactcagcaggtgactatggaaatggtgtcagacaaaaagcaaattcgagtgattttcttattcaatttaaaaatgggtcataaagcagcagagacaactcgcaatatcaacaacgcatttggccaaggaactgctaacaaatgtacagtgctcaagaagttttgcagaggagacgagagccttgaagatgaggagcatagtgaccagccatcagaagttaacaactgccaactgagagcaattattgaagctgatcctcttacaaccacacaagaagttgccaaagagcttgacgtcgaccattccagggtcgcttggcatttgaagcaaattggaaaggtgaaaaagctcaataactttctgaatcctggtgaaaccattatatctgaggactatgctcagcaaatctatgagatgcaccaaaaactgccacacctgcaactggcattggtcaatagaaagggcccaattcttctccatgacaacgcccaaccacacgtcgcacaaccaatgcttcaaaagttcaatgcattgggctaccaagttttggctcatccttcatattcacctgacctctcatcaacagactaccacttcttcaagcatctccacaactttttgcagagaataaaatacctaggaatccaacttacaatggatgtgaaggacctcttcaagaagaactacaaaccactgctcaatgaaataaaaggggacacaaacaaacggaagaacattccatgctcatggataggaataatcaatatcatgaaaatggccatactgccagaggtaatttatagattcaatgccatccccatcaagctaccaatgactttcttcacagaattggaaaaaactactttaaagttcatatggaaccaaaaaagagctcgcattgctgagtcaatcctaagccaaaagaacaaagctggaggcatcacactacctgacttcaaactatactacaagactacagtaaccaaaacagcatggtactggtaccaaaacagagatatcgaccaatggaacagaacagagccctcagaaataataccacacatctacaactatctgatctttgacaaacctgacaaaaacaagaaatggggaaaggataccctatttaacaaatggtgctgggaaaactggctagccatatgtagaaagctgaaactggatcccttccttacaccttatacaaaaattaattcaagatggattaaagacttaaatatgagacctaaaaccataaaaaccccagaagaagacctaggcattaccattcaggacataggcatgggcaaggacttcatgtctaaaacaccaaaagcaatggcaacaaaagccaaaattgacaaatgggatctaattaaactaaagagcttctgcacagcaaagggaactaccatcagagtgaacaggcaacctacagaatgggagaaaatttttgcagtctactcatctgataaagtgctaatatccagaatctacaaagaactcatacaaatttacaagaaaaaaacaaacaaccccagtaaaaagtgggtgaaggatatgaacagacacttctcaaaagaagacatttatgcagccaacagacacaggaaaaaatgctcaccatcactggccatcagagaaatgcaaatcaaaaccacaatgagatatcatctcacaccagttagaatagcgaccattaaaaagtcaggaaacaacagagacatggatgaagctggaaaccatcattctcagcaaactatcgcaaagacagaaaaccaaacaccgcatgttctcactcataggtgggaattgaacaatgagaacacttggacacaggaaggggaacatcacacaccagggcctgtcatgggaattagaaaaagctattttgaaattcatatggatccaaaaaagagcccaaatagccaatataatcctatgcaaaatgagcaaaactggaggaatcatgctacccaacttcaaactatgccacagggctacagtaaccaaaacagcatggtagtggtacaagaacagacacatagaccagtggaacagaacagagtacccaggattaagcccacacacatacaaccatctgatcatctaaaaacctgagaaaaacaagcaatggggaaaggattccctatttaataaatggtgctgggaaaactggctagccatatgtagaaagctgaaactggatcccttccttacatcttatacaaaaattaattcaagatggattaaagacttaaacgttagacctaaaaccataaaagccctagaagaaaacctaggcattaccattcaggacataggcatgggcaaggacttcatgtctaaaacacaaaaagcaatggtaacaaaagccaaaattgacaaatgggatctaattaaactaaagagcttctgcacagcgaaaaaaactaccgtcagagtgaacaggcaacctacaaaatgggagaaaattttcgcaacttactcatctgacaaagggctaatatccagaatctacaatgaactcaaacaaatttacaagaaaaaaacaaacaaccccatcaaaaagtgggcaaaggatatgagcggacacttctcaaaagaagacatttatgcagccaaaagacacatgaaaaaatgctcatcatcactggccatcagagaaatgcgaatcaaaaccacaatgagataccatctcacaccagttagaatggcaatcactaaaaagtcaggaaacaacagggacatggttgaagctggaaaccatcattctctgcaaactgtcacaaggacagaaaaccaaacaccgcatgttctcactcatagatgggaactgaacaatgagaacacttggacacagggcagggaacatcacacaccagggcctgttggggggtggtggactgggggagagatagcattaggagaaatacctaatgtaaatgatgagttgatggatgcagcaaaccaacagggcacatctatacctattctctctccgctgcagccccctgtgccattctccaggccccacgtacctctgcctgggcccagtaagacctggtcagatggcccccggctgcaaagccttcctgggccccatcagagaggacgcccag

SEQ ID NO: 125234 - DNA, 754 bp, Homo sapiens
gaatctacaccttcccggccagcggtagcaactgcagaactggaggagactatctttctagacaaggcagttgaggaggagggagcgcttgagggggactggcctggcgtgcactccgcacctcggggacattattgcgcgtggaacggctgcttttggaagactattgcccagaagaaaagatgtttggttttcacaagccaaagatgtaccgaagtatagagggctgctgtatttgcagagctaagtcctccagttctcgattcactgacagtaaacgctatgaaaaggacttccagagctgttttggattgcatgagactcgttcaggagacatctgcaatgcctgtgtcctgcttgtgaaaagatggaagaagttgccagcaggatcaaaaaaaaactggaatcatgtggtagatgcaagggctggacccagtctaaagactacattgaaaccaaagaaagtgaaaactctatctgggaacaggataaaaagcaaccagatcagtaaactgcagaaggaatttaaacgtcataattctgatgctcacagtaccacctcaagtgcctccccagctcaatctccttgttacagtaaccagtcagatgacggctcaaatacagagatggcttctggttctaacagaacaccagttttttcctttttagatctcacttactggaaaagacagaagatatgttgtgggatcatctataaaggccgttttggggaagtcctcattgacacacatct

SEQ ID NO: 125235 - DNA, 1248 bp, Homo sapiens
atggaatactatgcagccataaaaaaggatgagttcatgtcctttgcagggacatggatgaagctggaaaccatcattctcagcaaactatcacaaggacagaaaaccaaacatcgcatgttctcactcatagcccctggcagccatcattctgcattctgcctttatgaatttgactcctctagggatttcctggattttgccgatttcggaaccaccatcaaacaggattttcgcctgctggggcaaaccagcgtggaccgcttgctgcaactctctcagggccaggcggtgaagggcaatcagctgttgcccgtctcactggtgaaaagaaaaaccaccctggcgcccaatacgcaaaccgcctctccccgcgcgttggccgattcattaatgcagctggcacgacaggtttcccgactggaaagcgggcaggattttgccgatttcggaaccaccatcaaacaggattttcgcctgctggggcaaaccagcgtggaccgcttgctgcaactctctcagggccaggcggtgaagggcaatcagctgttgcccgtctcactgcagcaaaacgaaaaataccaagtgcctcaattcgatcaatcaacgattaaaaatattgagtctgcaaaaggacttgatgtgtgggacagctggccgctgcaaaacgctgacggaacagtagctgaatacaacggctatcacgttgtgtttgctcttgcgggaagcccgaaagacgctgatgacacatcaatctacatgttttatcaaaaggtcggcgacaactcaatcgacagctggaaaaacgcgggccgtgtctttaaagacagcgataagttcgacgccaacgatccgatcctgaaagatcagacgcaagaatggtccggttctgcaacctttacatctgacggaaaaatccgtttattctacactgactattccgggaaacattacggcaaacaaagcctgacaacagcgcaggtaaatgtgtcaaaatctgatgacacactcaaaatcaacggagtggaagatcacaaaacgatttttgacggagacggaaaaacatatcagaacgttcagcagtttatcgatgaaggcaattatacatccggcgacaaccatacgctgagagaccctcactacgttgaagacaaaggccataaataccttgtattcgaagccaacacgggaacagaaaacggataccaaggcgaagaatctttatttaacaaagcgggggtcctttag

SEQ ID NO: 125236 - DNA, 8445 bp, Homo sapiens
atggaatactatgcagccataaaaaatgatgacttcatgtcctttgtagggacatggatgaagctggaaaccatcattctcagcaaactatcgtcttcgctgaaacatgggcactcgtgggaagtgctttctgttccccaggctcagttattttcatatcttcagctgctgctattacattcccatctcttggaaggagccagagccagagaaatacagggttcctctgtggccaagggaaaaatgcctgccaagaatgctgaacttctggtgaagaaccagatgatttcttggattggccagattaattccaggcccaaggagcaaaagaatcctaaaacagagacagaggctgtgagaagcgaaaggcgctgtggatgttgctgccctagcgtttggaagcccgaacattcacatgacttgcttcaatctcatagagagccagcagctgagctgtgggtccaagtgtcaggacacctcgcccatatctctgtgtgcgaaaggatgtgcatgatgtggtcccaatcctcaggcccagtgctacttctctattcatgccgagagcagcaggccagggaggccagaaagcaggtgggacagagaaatcttcaggcccatgaaaagatgatgtgtagagattacagccaccaaatggcttcagaattattcactgagtgcaatagacctgtcgaaaagggtgtccacatttgtcaaaaaggaacactttccagttccaaaattagaggtgaaacctgttgtacccagctctgccgaacattccacactcctcagtggaggaaggagttggctccatctaggcgaggtctgaggatctggaaggtgctcagctcccatagctattggcacgtttatttacatgcagatctaacacctacagaggacttaagttcacagaggcatgaggtggagagtaacaaagcatctgctattcaacaagaagagctaactatcctaaatatatatgcacccaatacaggaggacccagattcataaagcaagtcctgagtgacctacaaggagacgtagactcccacacaataataatgggagactttaacaccccactgtcaacattagacagatcaacaagacagaaagttaacaaggatacccaggaattgaactcagctctgcaccaagcagacctaatagacatctacagaactctccaccccaaatcaaaagaatttacatttttttcagcaccacaccacacctattccaaaattgaccacatacttggaagtaaagctctcctcagcaaatgtaaaagaacagaaattataacaaactgtctctcagaccacagtgcaatcaaactagaactcaggattaagaaactcactcaaaactgctcaactacatggaaactgaacaacctgctcctgaatgactactgggtacataacgaaatgaaagcagaaataaagatgttctttgaaaccaacgagaacaaagacacaacataccagaatctctgggacacattcaaagcagtgtgtagagggaaatttatagcactaaatgcccacaagagaaagcaggaaagatccaaaattgacaccctaacatcacaattaaaagaactagaaaagcaagagcaaacacattcaaaagctagcagaaggcaagaaataactaaaatcagagcagaactgaaggaaataaagacaaaaaaaaaaaccctccaaaaaattaatgaatccaggagctggttttttgaaaggatcaacaaaattgatagaccgctagcaagactaataaacaagaaaagagagaagcatcaaatagacgcaataaaaaatgataaaggggatatcaccaccgatcccacagaaatacaaactaccatcagagaatactacaaacacctctacgccaataaactagaaaatctaggagaaatggataaattcctcgacacatacaccctcccaagactaaaccaggaagaagttgaatctctgaatagaccaataacaggctctgaaattgtggcaataatcaatagtttaccaacaaaaaagagtccaggaccagatggattcacagccgaattctaccagaggtacaaagaggagctggtaccattccttctgaaactattccagtcaatagaaaaagagggaatcctccctaactcattttatgaggccagcatcatcctgataccaaagcctggcagaggcacaacaaaaaaagagaattttagaccaatatccctgatgaacatcgatgcaaaaatcctcaataaaatactggcaaaccgaatccagcagcacatcaaaaagcttatccaccaagatcaagttggcttcatctctgcgatgcaaggctggttcaacatacacaaatcaataaacatagtccagcatataaacagaaccaatgacaaaaaccacatgattatctcaatagatgcagaaaaggcctttgacaaaattcaacaacgcttcatgctaaaaactctcaataaattaggtattgatgggacgtatctcaaaataataagagctatctatgacaaatccacagccaatattgtactgaatgggcaaaaactggaagcattccctttgaaaactggcacaagacagggatgccctctctcaccacttctattcaacatagtgttggaagttctggccagggcaatcaggcaggagaaggaaataaagggtattcaattacgaaaagaggaaatcaaattgtccctgtttgcagatgacatgattgtacatctagaaaaccccattgtctcagcccaaaatctccttaagctgatagacaatttcagcaaagtctcaggatacaaaatcaatgtgcaaaaatcacaagcattcttatacaccaataacagacaaacagagagccaaatcatgagtgaactcccattcacaattgcttcagagagaataaaatacctaggaatacaacttacaagggacgtgaaggacctcttcaaggagaactacaaaccactgctcaatgacataaaagaggatacaaacaaatggaagaacactccacgctcatgggtaggaagaatcaatatcatgaaaatggccatactgcccaaggtaatttatagattcaatgccatccccatcaagctaccaatgactttcttcacagaattggaaaaaactactttaaagttcatatggaaccaaaaaggagcccgcattgccaagtcaatcctaatttatagattcaatgcccaagaattggaaaaaactactttaaagttcatatggaaccaaaaaggagcccgcattgccaagtcaatcctaagccaaaagaacaaagctggaggcatcacgctacctgacttcaaactatactacaaggctacagtaatcaaaacagcatggtactggtaccaaaacagagatatagaccaatggaacagaacagagccctcagaaataatgccacatatctacaaccatctgatctttgacaaacctgacaaaaacaagaaatggggaaatgattccctatttaataaatggtgctgggaaaactggctagccatatgtagaaagctgaaactggatcccttccttataccttatacaaaaattaattcaagatggattaaagacttaaatgttagacctaaaaccataaaaaccctagaagaaaacctaggcaataccattcaggacatagccatgggcaaggactttatgtctaaaacaccaaaagcaatggcaacaaaagccaaaattgacaaatgggatctaattaatctaaagagcttctgcacagcaaaagaaaccaccatcagagtgaacaggcaacctatagaatgggagaaaatttttgcaatctactcatctgacaaagggcgaatatccagaatctacaatgaactcaaacaaatttacaagaaaaaaacaaacaaccccatcaaaaagtgggcaaaggatatgaacagacacttctcaaaagaagacatttatgcagccaaaagacacatgaaaaaatgctcatcatcactggccattagagaaatgcatatcaaaaccacaatgagacaccatctcacatcagttagaatggcgatcattaaaaagttaggaaacgactggtgctggaggggatgtggagaaaacaggaacacttttacactgttggtgggactgtaaactagttcaaccattgtggaagtcagtgtggtgattcctcagggatctagaactagaaataccatttgacccagccatcccattactgggtatatacccaaaggatttataaatcattctactataaagacatatgcaccaagtatgtgtacctgcggcactattcacacaatagcaaagacttggagccaacccaaatgtcccatccaatggatagactggattaagaaaaaaatgtagaacatatacaccatggaatactatgcagccataaaaaaaggatgagttcatgtcctttgcagggacatggatgaagctggaaaaccatcattctcagcaaactatcacaaggacaaaaaaccaaacaccgcatgcttctcactcataggtggggaattgaacaatggggaacacttggacacagggaaggggaacatcacacaatcacacactggggcctgttgggaggttgggggcaaggggagggacatggatgaaaccggaagccatcatcctcagcaaactaacacagcaaaagaaaaccaaacaccacatgttctcactcataagtgggagttaaacaatgagaacacgtggacacaaggaggggaacatcacaaactggggcctgtcgtggggtgggaggacgtgggagggatagcattaggagaaacacctaagggcactggcagagttctacttggtgctggccacactgagttccaatgcaaagtcccagaatggctgagctctccttcccccaagcatacagattctctctccgcaccatgtggccactgcctggagatgagggaagggtggtgttggcatttcaagactgtctttgctatcctcttcagtgcctctgtcagcgatatgaagttaaaaccagttgttgaaagtgatacactaacaattgagtctggaccacttgctagtgaagataaaccactttcgtgtggtacaaactctggaaaagaacaagaaataaatgagactctgcctatcacaactgtagctcagagttcagttctacttcatcctcaagaagcagcagccaggattagaatgtcagcaaggcagaaacagataatggaaatagaagagcagaagcaaaagcaattggaattacttgaacaaattgaacagcagaaattaagattagaaactgactgcttcagggctcagctggaagaagaaaaaagaaaaaaaactcaaccgactggggtaggatgcagaaaatctcatcactacataaatcatttgcattcttttagttctctgcctgttaaagttgagtcaggaaaaattcaagaacccttttcagccatgagcaaaagtacagtttccacaagccattctataatcagccaaatgcatgataggcctttgctgccgtcagagaatatcacagcccagcaaggtaatatgaaggccctccaagaacagttagacctacagaagaaagttcttcaggcaactcaggaagctcaggaacagttgcttttgtgcaaacagaaagaagtggaacagcaaacgggcctctcggtattccttcccttggtaactccagattcatctgctttattgccttctgccaaagcagatttggggagaatccaggaatcttcaccaaccaagaataatattgcagtttcctcagaccatcatgtgatctcacaacttcaggataagcgtttgagtctttcacagcctatcctatcacagcaaaataattttaaatttctccaagagcagttgaatattcagaaggatagccttcaggctaggcgagaagcccaggaagtattgtatgtacataaacagagtgaattggatagaagagtatgttccgaacaggctgagccctctttcccatttcaggtagctcagcatacatttacttcactaccatctgctgatacaaaatctggaaaaatacaggagcaacattcatctaagagcgagaaaggacttgtttcatgccaatctgacatccccatatctcaggatgggtctttgagtttcctacagcagttcctacctctacatgatagtttgaagttgctccaagaacagttgactaaacagagggatactcttcaggctaggcatgaagctcaggtggaattacttttacatagacaaagagatttgggggacagtaagtctgggctggtgagctcttcatcctcaccagtggttgttcagcattcagttgcttcacaagcttctgctaaagctgagcctaggagaattcaggagctttatttatctgagaaggagaatgtggatgaatctgagagattccaggaatgtatatcaatcaagagtgacagtaccattcccttaagccatcctaagatcccaagatgtcaggaaagacttttgagagtttcacaacatatgctacctctacaagataatttggaggaacaccaagcatggctagacactgagaaagaagcctttcatttcagccagaaaacccaagaaaatacatcttctgaacaaactggttcatcttcattcataccccagttggtacagctttcatttacttcgttagcttcagctgagtctggcacaatcctggaacctctttttacagagagtgaaagtaaaattttttcaagccaccttcagatcccacaattgcaggataggcttttgaggatatcgcaacttatccagcctcaacaagataatttgaaggcacttcaagaacagttagctacacagagagaagccatcattctagctagacaagaagctcgggaagaattacttttacatcagagtgaatgggagggaagaatatctcccgagcaggttgacacctcttccttacccctagtaccacagcattcattcgcctcattacctcttaatgaatctgaaagaaaccaagaaccatgttcaattaacagtgataatatagtatcctcaggtcactcagagataccaacattgcctgatgggctgttgggtttatcacatcttgttttacctcaacaagataatttgattgcacttgaagaacacttgcatgcacagacagatttccttccttctattgagaaaacccagaaagaattggttttgtcaaaaccatgtaaatttgaggaaaaggtatcttctgagcattttatccagtctcaccatggtgatttgcaggcacttcaacagcagttagatacacagaagaaagccattcgatctatacaggaagtccaagaagaattgcttttgcaaagattaagtgaattggagaaaagggtatcatctgaacaagtttgctcctcttcatttgtatcccagcaagataacttgggacttcagaaacagttggatctacaaagagaagttctgcattatagccagaaagcccaggaaaaattgcttgtacagagacaaacagcattgcagcagcagatacagaaacatgaagagactttgaaggatttctttaaagacagtcagataagtaagcccacagttgaaaatgatttaaaaacccagaagatggggcagctcagagactggtttcctaatacacaagacctagcaggaaatgatcaagaaaatattaggcatgcagataggaacaactctgatgataatcatttggcttcagaagatactagtgccaagcaaagtgggagacatgagacatcaatcaacacatgtacgataagcattggtttggttcggaaaagtttcctctttgtggcaaagctgaactctggacttagcaggcttccctatggtcagtgtgcatttagagtctgccgaagatcatgtactctccactatgtcaaaactgcccatattttgtacaagttaattgcagaggttacaaggggatttggccacctccttaactttttcccacagcacatggcaagcacaaccccccagctggattcagggcacaaaggaaaagattgggagggaagcagagggagatgtgacactgacaaaaaagaaggcaaggtggccacagaggcagagactagagtcacgcagctgcaagtcaaggaatgccagcagccaccagggctgaagcggcaaggaacgggttctcccctggagcctctggagggaggctggccctgccaacaccttgatctgcaacttctttccagcttccagaactgtgagagaagaagttctgttgttctaagccatcaacttgtggtaatttggtatagcagccataggaaaccctatgcaaacagtgaactaaataatgagcggtatttgtag

SEQ ID NO: 125237 - DNA, 440 bp, Homo sapiens
tttcgttgatccatgaaaaacagacagctgtgtcagtagaaaacttcattgcagaattgctgcctgacaaatggtttgacattggttgtttggtggttgaagatcctgtccatggcattcatctagaaacatttacacatttactgggatgtcccgtcggcagatgatctacagtgcagccagagcgatagcgggcatgtataaacagcgcctgccacccaggacagtgtgagaggagacctacctgggagactgagactttcccccacttttagcttgatgttaaagaagtggctgtaccttcctaaatcgaatagtctaaatgaatccagtagtttttatcattttcctgtagcctgcaatttttctttctctagaaaggcatcatgtcattccaggagacaaaaagaaacaaatcctttttatagtcataccatttc

SEQ ID NO: 125238 - DNA, 1896 bp, Homo sapiens
atggcgggcgcccctcccccagcctcgctgccgccttgcagtttgatctcagactgctgtgctagtaatcagcgagactctgtgggcgtaggaccctccgagccaggtgcgggatataatctcgtggtgtgccgttttttaagccggtccgaaaagcgcaatatttgggtgggagtgacccgattttccagggcctttgaagatgtcaaggtcttttggcgagtcacacttaacaaaacagtcgtcgtgctccagaaggatggggtaaacctgatggaggaacttcagtctgtgtcagggaccacaacctgtacaatgggtcaaacaaaatgctttatcagcattgaactcaaaccagaaaaggtaccacaggttgaagtgtatttttttgtggaactatatgaagctactgctggagcagcaataaacaacagtgccagattcgcacagattaaaatcttagaaagtgatgaatctcaaagccttgtgtatttttctgtgggttctcggctggcagtggctcacaagaaggccactttaatcagtctgcaggtggccagagattctgggacaggactaatgatgtctgttaactttagtacccaggtcttcctatcactgggctctaatttcactttgcaactggtgactgtgatgcttgtcggtggacgtttctatggaatgccaacaattcttcaggaagcaaaatctgctgtccttccagtctctgagaaagctgccaattctcaggtcggatttgaatccactgcttttcaactcatgaacatcactgctggcacaagccacgttatgatttctaggagaggcacatatggagctctctcggttgcctggaccactggatatgctcctgggttagaaattcctgaattcattgttgttggcaacatgaccccaacactggggagcctttcattttcccacggtgaacaaaggaaaggagttttcctgtggacgtttcctagccctggttggccagaggcctttgttcttcacctatcaggagtgcagagcagtgctcctggcggagctcaactccgtggatttttcaccattgctgatggagagagtgaagctagctttgatgttcatttgctaccagatgaggtacctgagatagaggaagattatgtgatccagcttgtttctgtagagggaggagccgaactggatctggagaagagtatcacatggttctctgtttatgcaaatgatgacccacatggagtatttgccctgtattcggatcgccagtcaatacttattgggcagaaccttattagatccatccaaattaacataacccggcttgctggaacatttggagatgtggctgttgggcttcgaatatcatcggatcataaagaacagccgattgttaccgaaaatgcagagaggcagctggtggtcaaagatggtgccacatataaagtggacgtggtgccaataaagaatcaggctgacagacaactcatacaggagagctctggctggcatctggcaggtgccccgctgggtcgaagcttccagaggaaagaacaggcagcaatctttgctgttctgcagcctctgctggtgatatccaggcaaacagggtctggagtggacctccagcaaactccagcagacctgcagcagagggacctgactgttagaaggaaaactaacagaaaggagcagcacatccactcagagacctcatccaaaggtcaccaacatcaaagaccaaaggtaggtaaatccacaaagagggggagaaaccagagcaaaaatgctgaaaattccaaaaaccagaacgctgcttctcctccaatggatcacaacttcttgctagcaagggaacaaaactggacagagaatgagtttgatgattga

SEQ ID NO: 125239 - DNA, 627 bp, Homo sapiens; identical to SEQ ID NO: 121696

SEQ ID NO: 125240 - DNA, 360 bp, Homo sapiens
atggcgggcgcccctcccccagcctcgctgccgccttgcagtttgatctcagactgctgtgctagcaatcagcgagattccgtgggcgtaggaccctctgagccaggtgtgggatatagtctcgtggtgcgccgtttcttaagccggtctgaaaagcgcaatattcgggtgggagtgacccgattttccagaaaacccaactctctcaccataaaagggtgtcgagagccacagggcattatcacagatgtcggtcaaccaacgcgattagagacagcgattggaagatgtgtgctgcagagccctgaagataaggcgatgggtcccagcgagccccaggaagtagtggccagcgtgtga

SEQ ID NO: 125241 - DNA, 1336 bp, Homo sapiens
atggcgggcgcccctcccccagcctcgctgccaccttgcagtttgatctcagactgctgtgctagcaatcagcgagactccgtgggcgtaggaccctccgagccaggtgcgggatatagtctcctggtgtgccgttttttaagcccgtcggaaaagcgcagtattggggtggtagtgacccgattttccaggtgccgtctgtcacccctttctttgactaggaaagggaactccctgaccccttgcacttccccagtgaggcaatgccctcgccctgcttcggcttgcacacggcgttacccgtgacaaaaccactaaaggcggtgcttccggtaaagctggtcagccaccaaaaccaggtgctactaatactggtgcgggtgcttctgctgcaaaatctctgttcgaaataatgcagatacctgtgcttggagttgaccccagttttcgtaactggggactagcacggggaatgctcgacttagagacgggaatactctctggattagacctgaagctggtagaaaccaaacctgatggaaccaagcaagtaaggcagaacagcaaagatatgcaagctgctgaggacattactactggtgtcatcgactggttcaaagaagcaaaggtcatctttgtagaggttcccgttggctcacaaagtgccaatggaatgaaatcctatggtgtttgtgtaggcatcttaggagcactcagggcactaggacatgagattattgaagttactcctatcgagaacaaagtagctctgtccggtattaagactgcttctaaagatgtgatgattagagcagctacaggattttatccagaggccaactggctcaaggataccaaagaatttaatgagaattttatcaaaggtataacaatgcaagtaattctgactcaacctgaaatcgaagctgctctgactggttatgtaaacgacctgatgtctgtacgtgaaggcatggaaattaaagtaaccttcaaagctactcgtggtgatgatggtgctactgcaatcgtagatattgtccctgctggttcccaatctgttgaagtggttgaggaaccaaagaaagagtcaaaggaacgcaagcatcgtccagtaacccagaccaatactgctgctgtcagtgctctggcttctgctactggtaagaaaaaagaagaagtagttgaagtagaaactactactgaaactgttgatgaaactgttgaagtagctgaagaagctgctgctcaggaagaagaaaaagaagtacaggaagaagaggctaaagaaccagtacaagccaaaccttctctgtttgcaggtctgaaacgttaa

SEQ ID NO: 125242 - DNA, 871 bp, Homo sapiens
tgcttttataaacattcaaccaacatgttctttaataatctcttctttaaagaacaaaataatcaagtacatggcattaagttaaatgtctctgcacatgaatttccaccttataaatctggtatattaaattgtgctgtaaatagatttgtatattttcttttttgagtactatgataggtgaaatggtatgactataaaaaggatttgtttctttttgtctcctggaatgacatgatgcctttctagagaaagaaaaattgcaaggctaacaggaaaatgaataaaaactaactgggattcaatttaagactattcggattttaggaaggtacaaccacttctttaacatcaagctaaaagtgggggaaagtctcagtctccccaggtaggtctcctctcacactgtcctggggtggcaggcgctgtttatgcgtgcccgctatcggctgtgagggcgctgtaggatcatctgccgacgggacatcccaggtaaatgcccatgtgcccaatcagtccggctgacattcagtaaacttcttttccaaggacttcacccactggtcaccaaaagggccttgaccacctccagattataagtcctgggggaagttagacttttgagcctggctgtacaaatttccaaagggcaccggtgtggcttgtgtaaatgtttctagatgaatgccatgggacaggatcttcaaccaccaaacaaccaatgtcaaaccattttgtcaggcagcaattctgcaatgaagttttctactgacacagctgtctgtttttcatggatcaccccagttcgacgcaagctatctatccgttcctgagcaccttttaatccagctgcatagccactggttgtggg

SEQ ID NO: 125243 - DNA, 2129 bp, Homo sapiens
gagctttgggaagagcccagatcactgatggaattggacagtgcgtggaaatggttcagcaggacgaggaccgttacctggtacgctggctgctacctccctcactcttgtcagagtcggagctacaggcagtgccttcagctctgagctcaggcatcccggtccctgtttttgcggttaaggactctaaagtgttgtgtcgtgttcatcaactttttctcaacttccctggctctacctcttctgccacaaacgtcagcatggtggtatctgccgaccctttgtccagcgagagggcagagatgaacatcctagaaatcaaccaggaattgcgctcgcagctggcagagagcaatcagcagttccgagacctcaaagagaaattccttataactcaagctactgcctactccctggccaaccagctgaagaaatacaagtgtgaagagtacaaagacatcatagactctgtgctgagggatgaactgcagtccatggagaagctggcagagaagctcaggcaagctgaggagctcaggcagtataaagccctggttcactctcaggcaaaagagctgacccagttacgggagaagttacgggaagggagagatgcctcccgctggctgaacaagcatctgaaaaccctcctcactcctgatgaccctgacaagtcccagggtcaggacctccgagagcagctggctgaggggcacaggctggcagagcaccttgttcacaagctgagcccagtgggtgaaatgggaaatatttcaatggacacatctgtatttgcagaaaatgatgaagatgaagatgaggatgaagacgacaaagacgaggaggttgagaaagtacaggaatcacctgcccccagagaggtgcagaagactgaagaaaaggaagtccctcaggactcactggaggaatgtgctgtcacttgttcaaatagtcacaacccttctaactccaaccagcctcacaggagcaccaaaatcacatttaaggaacacgaagtcgactctgctctggttgtagagagtgaacaccctcatgatgaagaggaggaagctctaaacattcccccagaaaatcaaaatgaccatgaggaggaggaggggaaagcgccagtgccccccagacaccatgacaagtccaactcttaccggcatcgtgaagtctctttcttggcattggatgaacagaaagtttgctccgctcaggatgttgccagggattactccaatcccaaatgggatgaaacctcacttggcttcctcgaaaagcaaagtgatcttgaagaggtgaaaggacaagaaacagttgctcccaggctcagccaggagctgccagaggtgaaggagcaggaagtcccagaggactctgtgaatgaagtttacttgactccctcagttcaccatgacgtgtctgactgccaccagccttatagcagcaccttgtcctcattggaggatcagcttgcctgctctgctctggatgtagcctcccccaccgaggcggcctgtccccaagggacttggagtggagacttgagccaccaccagtcagaggtgcaagtttcacaggcacagctggaaccaagcaccctggtgcccagttgtctgcgactacagctggatcaagggttccactgtgggaacggcttggcccagcggggcctttcctccaccacctgcagcttctcagccaatgctgattctgggaaccaatggcccttccaagagctggttttagagccctctctggggatgaagaaccctccccagctggaagatgatgcacttgaaggctcagcaagcaacacacaagggcgtcaagtcactggccggattcgtgcctcccttgtcctgatactgaagaccatcagaagaagactcccgttcagcaagtggagactggcattcagattcgctggcccgcatgctgagagcgcagagggagaccaatgcccagatggacaaatagcattgaccggcgttagccctgtttctcaattcccatcgtgtagagaacaggagtccgcagctgctggcaggagacagcatgtcagccgggactctgccagggcagagtatgagcaatgccatgttcttgctgaaaacgcttag

SEQ ID NO: 125244 - DNA, 678 bp, Homo sapiens
  misc_feature (1)...(678): n = a,t,c or g
tgaaatcataggaagtacattatcttattagtcactctcacaaacgattcttggcaacaaggatgacatgcagaaaatcttttgaacaaaaacaaatatagttataaaactatctggactgtcatttctattttgtatcctgttcaaatgtataaaaatgtattaccacagtgagcatccagagctgcaaccagtacatttgggatgtatttgcaaatacagttttttttaaattgttctgttttagaagtgatgagagcctatttacaacagctaaggcaagagactggactgagactttgtgagaaagttttcgaccctcagaatgataaacccagcaagtggtggacttgctttgtgaagagacagttcatgaacaagagtctttcaggacctggacagtgaagggagcccgggcagccaccgtctccagagccctgggcagcattttccagcaagatgtacacaatcttttgcctttatttcgtaaagttttatacagaagagagaagagcatgtctttacttgaaaaactcttgatcaagaatttgggtgggagaaaagaaagtgggttatcaagggtgatttgaaattttctgcagcattaaagctggcgcttaataagaataagtaataataagantttctacatcaaaaanaaaaaaaaaagnggcgcag

SEQ ID NO: 125245 - DNA, 931 bp, Homo sapiens
accggaagcgctccgctgtacctggatcctgctcctctggggtgaaacccgggcgccgtcaagatgccggcttaccactcttctatcatggatcctgataccaaactcatcggaaacatgggcacctgttgcctatcagaagtcaattcaaaggacctgcccccagagagacacaaggataccagatattgtggatgaggccatctttttaccttcagggcccaatgtcttctttcaaaaactatgaaattaagaatgaaagctgataggaccttgatatatataactctctacatttctgaatgtctgaagaaactgcaaaaagtgccaattcccaaaagcccaaggtggaggaaaggaaatgttttacgctggggaatccactaatttttcccatttcctgggagagcctggtttttcccactttaaccgccattttatgcccaaaccctgcaaacaaaccaggaagatgaaagtgatgagagccctatttaccaaccagcctaagggcaagagactgggactgagactttgtgagaaaagtttttcggaccctccagaatggataaaccccagcaaagtgggtggaccttgcctttgtgaagagacagtttcatgaacaagagtctttcaggaccctggacagttgaagggagcccggggcagcccaccgtctccagaggccctggggcagcatttttccagcaagatgttacacaatctttttgcctttatctcgtaaagttttatagagacgagagaagagcatgtctttacttgaaaaactcttgatcaagaatttgggtgggagaacacagaaactgggttatcaagggtgatttgaaattttgtgcgagcattaaaactggcgcctccataagaataagtaataataaagaaatttctaacattccaaaaaaaaaaaaaaaaa

SEQ ID NO: 125246 - DNA, 831 bp, Homo sapiens
atggtgcttgcaaagaagattaaaaagtcagtggaatggatcaactctaggcttctacttgttataaaaagtggaaagtacatactggcgtacaagcagactccaaagatgatcacgcaaggcaaagcaaaattggctatccacactgaaaactgtccagctttgaggaaatccaaaatagagtactataccatgttgaccaaaactggtgtccatcactacagtgacaataattttgaattgggcatagcatgtggtaaatactgcagagtatgcatgttgtctatcattgatccagacgattctgatatcgttagaagcgtgccagaacagacaggccaccaccttgaccattcaggcttctcagccagtccagcctgtgggccttggagagcccaaactgatcaggggctgaaaggttctccaacacagcacagctgctctaccaaaaagcagccagactgcttctttaagtgggtctgtgatcccgttcctcctaactggactttcgacgaaacaattcgaaagcccatcagtttgggttgtggccatactgtctgcaagatgtgcctgaataaactccaccgcaaggcttgcccatttgaccagaccactatcaatacagacattgagctcctccctgtgaactcagcattgctgcagctcgtgggtgctcaagctctaaaaatcacaaagatactgacggaccttcacaaacacaacatgcctaaatttggctcctcaatcctgcatcataaattatcagtaacagaaaagcaaaaggatacattttcaaagcacaacatgggcaatgaacccctcttgacttaa

SEQ ID NO: 125247 - DNA, 528 bp, Homo sapiens
tcccccttccgcactcttcgaaattggacagattcaaaagtgggtgaggaggagcaaggtgtcatatatgtaactttggggtcaggggccactggggtctttaccaattcatgctggctctggaacaagctcttcgaggccagcattgaaacaggggaccgtgtctggaggatgcctctcttcaaacattggacaagacaggttgtagattgccagctggctgatgttaacaacattggaaaatatagatctgcgggagcatgtacatctgcggcattcctgaaagaattcgtgactcatcctaagtgggcacatttagacatatcaagtgtgatgaccaacaaagatgagagccatgaggacatctttctcaaatcttcaccttgggagcaaggtgtggttactggaggaagaccccacaaaaatgtgcacccccttgtgaggcaggttcacattcactttgtagtggttgccaacttgtctgagtgtggtgagactgaacacactcacatgcaacaagttacttga

SEQ ID NO: 125248 - DNA, 2142 bp, Homo sapiens
ggctcttttaaatgaccccaggcgtcgtgtattgaatcctagactcacgtccgtctcgccggcgcccgagccagtccgcgcgcaccgcgtctgcgtccccgaaagccccgcccgcaagggctgccctgcctacctggtctccgacgtgctcgtctggagggcggtgcgaggggccgagccgacgagatgttcttgctgcctcttccggctgcggggcgagtagtcgtccgacgtctggccgtagtacgttctgggagccggagtctctccaccgcagacatgacgaagggccttgttttaggaatctattccaaagaaaaagaagatgatgtgccaccagttcacmagtgcaggagagaattttgataaatygttagctggaaagctgagagagactttgaacatwtctggaccacctctgaaggcagggaagactcgaaccttttatggtctgcatcaggacttccccagcgtggtgctagttggcctcggcaaaaaggcagctggaatcgacgaacaggaaaactggcatgaaggcaaagaaaacatcagagctgctgttgcagcggggtgcaggcagattcaagacctggagctctcgtctgtggaggtggatccctgtggagacgctcaggctgctgcggagggagcggtgcttggtctctatgaatacgatgacctaaagcaaaaaaagaagatggctgtgtcggcaaagctctatggaagtggggatcaggaggcctggcagaaaggagtcctgtttgcttctgggcagaacttggcacgccaattgatggagacgccagccaatgagatgacgccaaccagatttgccgaaattattgagaagaatctcaaaagtgctagtagtaaaaccgaggtccatatcagacccaagtcttggattgaggaacaggcaatgggatcattcctcagtgtggccaaaggatctgacgagcccccagtcttcttggaaattcactacaaaggcagccccaatgcaaacgaaccacccctggtgtttgttgggaaaggaattacctttgacagtggtggtatctccatcaaggcttctgcaaatatggacctcatgagggctgacatgggaggagctgcaactatatgctcagccatcgtgtctgctgcaaagttaaatttgcccattaatattataggtctggcccctctttgtgaaaatatgcccagcggcaaggccaacaagccgggggatgttgttagagccaaaaacgggaagaccatccaggttgataacactgatgcctgaggggaggctcatactggctgatgcgctctgttacgcacacacgtttaacccgaaggtcatcctcaatgccgccaccttaacaggtgccatggatgtagctttgggatcaggtgccactggggtctttaccaattcatcctggctctggaacaaactcttcgaggccagcattgaaacaggggaccgtgtctggaggatgcctctcttcgaacattatacaagacaggttgtagattgccagcttgctgatcgttaacaacattggaaaatacagatctgcaggagcatgtacagctgcagcattcctgaaagaattcgtaactcatcctaagtgggcacatttagacatagcaggcgtgatgaccaacaaagatgaagttccccaatctacgggaaaggcatgactggggaggcccacaaggactctcattggagttcttgacttcgtttcagtcaagacaattgcttagttcagatactcaaaaatgtctttcactctgtcttaaattggacagttgaacttaaaaaggtttttgaataaatggatgaaaatcttttaacggagacaaaggatggtatttaaaaatgtagaacacaatgaaatttgtatgccttgattttttttttcatttcacacaaagatttataaaggtaaagttaatatcttacctggataagggatttttaaagatactctataaatgattaaaatttttagaacttcctaatcacttttcagagtatatggttttccattgagaagcaaaattgtaactcagatttgtgatgctaggaacatgagcaaactgaaaattactatgcacttgtcagaaacaataaatgcaacttgttgtgca

SEQ ID NO: 125249 - DNA, 276 bp, Homo sapiens
atggaagctgtctgtgattcaccctacatgaaaaacacagacaccagctgttccccacatccgccttatggggtgacctgggcccggctggcagacaagagcaagacggtgcaggaaactctgtctgacaggggtgtccaatttcccacccagacacctgcctgcagtgtcaccccattccctatgtcctgtgatctacaaggtgactgtgcttgtcgggacccccaggcccaagaacacagccggaaagacctccggggatacagccatggctaa

SEQ ID NO: 125250 - DNA, 8581 bp, Homo sapiens
ctgtccaggttgagtgagggtgtccaggatgaggaatgagggtgtccagggtgaggagtgagggagtccagggtgaggagtgagggagtccagggtgaggattgagggtgtcagggtgagtgagagtgtccagggtgaggagtgagggtatccagggtgagtgagggtgtccagggtgaggagtgagggtatccagggtgagtgagggtgtccagggtgagtgagggtgtcagggtgagtgaacgtgtccagggtgtgtgagggtgtccagggtgcagagtgaggtgtccagggtgaggagtgacggtgtctggggtgagtgagggtgtccagggtgaggagtgagggtgtcagggtgagtgagggtgtccagggttgagtgcacatgtgtggtgaggaggtgtttgcagtgcttcaggcgcagcaactctttcatctagtttaaaattgtgctctgaggttagattttagtagaacaaaggccttacaaagaatgtgaaaacattgtgcttccctgcttacaggcaattaaaaaggagaatcaagctgagggtgcctggtgtggggtggggtggagaagaccacagagactattgtgtgttttattcaacagtgtcctgggctgctttctccagaaatgtccctgacacatggatgtaagtgtggctagtttactgggagatgatcccagtgatgcaggacacgcgagccctaagattgaagcatagcccgggagggttcttagctttgcccaggaaggaactcaaggcaagccagtggtgttagcaacttttattgaagcggccggctgtgcacagcagcagcagaggcgctgctccttgcaaagcagggctgccctacaggctgtgcgcccacagtagcagctcagaggcagttctgcagtggtatttgtatccacttttaattatatgcaaatgaaggggcagtttatgcagacatttccagggtgagggtggtaacttctgggtgctgccagagccatcgtgaactgacttgacacaggtcggtgtgtcctatggaaactagcatctgccctggacctattttagctagtgctcagtttggtctgagtgcctgagccccacttccagagttgagtcccacctcctacctcattcccccttcagagattagatactcctccttaatcttaagggggcctcgagaagggcggagtcctgcttttccgtaactacttcctgctgagtttatggcacgtaggccctgcctggcactggaggacgtaaaaatttctggatacctgatctaaggagcccagaggcaggacgatttcattctccgtgtcagtggacaggatgggctggaagccttgtgccagcattgtctctggaactgtggtaatctagaatacacaaactttactaagaggttaaagaagcaaggaccaaacatttgtaacaagacagttgtcaaaggtcctagaagaggtgaaaaacaggtgagacttgggaaggcacttttgatggttgaccagatatagttggggcagtgccctggttatatctatgtaactaggtagcttgctcatagatcttttgaatgttaacctcaacctgtccagagttaatatatgtgcagcaggttttattaataactgcacaagaccccaccttgttcagctagtaaataatccaatgctagtctgttatcaacaactacattttccagagtctggggaactcttgaattctctttaatgcctgatctccgttggtggctaaggattctaggatttgagccaagttctttagcgttaactcatggtaggcaaagcaccccagggtgctgctagtcctattgccaccctgattcctgccagaaataagtaagcaagcaacaggacaatgaactccatgttgcccagatcccactgagagtgaacgtgcagtcatgcccataaccgacacacatcccagtccatgtgggtcagtccttcatcaccctccctgccttctgacaacagcagactccagccattccattatcattcacagcccaacccaagcagtcagtggctgaagaaagagaatcaggtatactctatgtccacatataccttcctgccacagggcttcaccaactggcaggattccccccagcccccaactcctcctcatcccttgttcccaggcgggtcaattggagagtgagcagagatagatggcttgcagaagggtatgcaagatggggagactccaccagaccttagggagagaatggcatctttctccaccttttaagagagacagagcctccctgaggtctcaaagatttttcagggcaacacaagaaacgtttccaagcctcagctgcaggtgttcacctttccactctggggtgtgaggagatggtaagctgaggacaagtgtgttccagatgcaggccaactctgttctccaacagtttgaaccaacttggccttggggttccaagggtaggatgaagggtgtcacggcaggacggggcctggcgtgaggcaacagcaagcagagcgaggacacaacagtggcagcagtgtacagacacaggacgtcagcttcaaacgatgcaacagcagggatatcttgggcacggctctgattcgagccactcccaactctcttgcctccaggatggaggcactgtacatgcaacagtccagagaaagattctagccagtccaagcccaggcacatccagagaaggtgggagctcttcgggttgactccaccgaggaaaacaggcatttgggtatttcagattcccgctccacaataaggcaacttttaaaaaaatattatttccaaaaacaaaacaaaaattccagggggagggaattcagcggatcagtcttaagaggagcttttttttggagcgagaaatcatataaaataaaatgaaataaaacaaggaggaaggcaaccagctgttagggggaaaataaggcagataaaggagcggggagagaaattaattgccaaccaggaggagttgggctgtatttttcaaaggtggggagagtggagcacacaccttgaggaggaaagcgagaaagaaaagaaaaaagcaagtgaaggggggctcgcccaagaagggtgaagaagcgaagaaagtcgaggcgccgaggctcccaaagctggcagctccgggtggcggtgcaggggcgaaggggggggcggggggaacgtcggacatgcggctctggagttgggtgctgcacctggggctgctgagcgccgcgctgggctgcgggctggccgagcgtccccgccgggcccggagagacccgcgggccggccgacccccgcgccccgccgccggcccggccacctgcgccacccgcggcccgcggccgccgcgcctcgccgccgccgccgccgccgccgggcgtgcctgggaagccgtgcgcgtcccccggcggcggcagcagcgggaggcgaggggcgccaccgaggagccgagcccgccgagccgggcgctctatttcagcgggcgaggcgagcagctgcgagtcctccgggccgacctcgagctgccccgggacgcgttcacgctgcaagtgtggctgcgagcggaggggggccagaggtctccggcagtgatcacagggctgtatgacaaatgttcttatatctcacgtgaccgaggatgggtcgtgggcattcacaccatcagtgaccaagacaacaaagacccacgctactttttctccttgaagacagaccgagcccggcaagtgaccaccatcaatgcccaccgcagctacctcccaggccagtgggtatacctagctgccacctatgatgggcagttcatgaagctctatgtgaatggtgcccaggtggccacctctggggaacaagtgggtggcatattcagcccactgacccagaagtgcaaagtgctcatgttagggggcagtgccctgaatcacaactaccggggctacatcgagcacttcagtctgtggaaggtggccaggactcagcgggagatactgtctgacatggaaacccatggcgcccacactgctctacctcagctcctcctccaggagaactgggacaatgtgaagcatgcctggtcccccatgaaggatggcagcagccccaaagtggaattcagcaatgcccacggctttctgctggacacgagtctggagcctcctctgtgcggacagacattgtgtgacaacacagaggtcattgccagctacaatcagctctcaagtttccgccagcccaaggtggtgcgctaccgcgtggtcaacctctatgaagatgatcataagaacccgacggtgacgcgcgagcaggtggacttccagcaccatcagctggctgaggccttcaagcaatacaacatctcctgggagctggacgtgctggaggtgagcaactcctcccttcgccgccgcctcatcctggccaactgtgacatcagcaagattggggatgagaactgtgaccccgagtgcaaccacacgctgacgggccacgacggcggggattgccgccacctgcgccaccctgccttcgtgaagaagcagcacaacggggtgtgtgacatggactgcaactatgaacggttcaactttgatggtggagagtgctgtgaccctgaaatcaccaatgtcactcagacttgctttgaccccgactctccacacagagcctacttggatgttaatgagctgaagaacattcttaaattggatggatcaacacatctcaatattttctttgcaaaatcctcagaggaggagttggcaggagtagcaacttggccatgggacaaggaggccctgatgcacttaggtggcattgtcttgaacccatctttctatggcatgcctgggcacacccacaccatgatccatgagattggtcacagcctgggcctctatcacgtcttccgaggcatctcagaaatccagtcctgcagtgacccctgcatggagacagagccctccttcgagactggagacctctgcaatgataccaacccagcccctaaacacaagtcctgtggtgacccagggccaggaaatgacacctgtggctttcatagcttcttcaacactccttacaacaacttcatgagctatgcagatgacgactgtacggactccttcacgcccaatcaagtcgccagaatgcactgttacctggacctggtctaccagggctggcagccctccaggaaaccagcgcctgttgccctcgccccccaagttctgggccacacaacggactctgtgacactggagtggttcccacctatagatggccatttctttgaaagagaattgggatcagcatgtcatctttgcctggaagggagaatcctggtgcagtatgcttccaacgcttcctccccaatgccctgcagcccatcaggacactggagccctcgtgaagcagaaggtcatcctgatgttgaacagccctgtaagtccagtgtccgcacctggagcccaaattcagctgtcaacccacacacggttcctccagcctgccctgagcctcaaggctgctacctcgagctggagttcctctaccccttggtccctgagtctctgaccatttgggtgacctttgtctccactgactgggactctagtggagctgtcaatgacatcaaactgttggctgtcagtgggaagaacatctccctgggtcctcagaatgtcttctgtgatgtcccactgaccatcagactctgggacgtgggcgaggaggtgtatggcatccaaatctacacgctggatgagcacctggagatcgatgctgccatgttgacctccactgcagacaccccactctgtctacagtgtaagcccctgaagtataaggtggtccgggaccctcctctccagatggatgtggcctccatcctacatctcaataggaaattcgtagacatggatctaaatcttggcagtgtgtaccagtattgggtcataactatttcaggaactgaagagagtgagccatcacctgctgtcacatacatccatggacgtgggtactgtggcgatggcattatacaaaaagaccaaggtgaacaatgcgacgacatgaataagatcaatggtgatggctgctcccttttctgccgacaagaagtctccttcaattgtattgatgaacccagccggtgctatttccatgatggtgatggggtatgtgaggagtttgaacaaaaaaccagcattaaggactgtggtgtctacacgccccagggattcctggatcagtgggcatccaatgcttcagtatctcatcaagaccagcaatgcccaggctgggtcatcatcggacagccagcagcatcccaggtgtgtcgaaccaaggtgatagatctcagtgaaggcatttcccagcatgcctggtacccttgcaccatcagctacccatattcccagctggctcagaccactttttggctccgggcgtatttttctcaaccaatggttgccgcagctgtcattgtccacctggtgacggatgggacatattatggggaccaaaagcaggagaccatcagcgtgcagctgcttgataccaaagatcagagccacgatctaggcctccatgtcctgagctgcaggaacaatcccctgattatccctgtggtccatgacctcagccagcccttctaccacagccaggcggtacgtgtgagcttcagttcgcccctggtcgccatctcgggggtggccctccgttccttcgacaactttgaccccgtcaccctgagcagctgccagagaggggagacctacagccctgccgagcagagctgcgtgcacttcgcatgtgagaaaactgactgtccagagctggctgtggagaatgcttctctcaattgctccagcagcgaccgctaccacggtgcccagtgtactgtgagctgccggacaggctacgtgctccagatacggcgggatgatgagctgatcaagagccagacgggacccagcgtcacagtgacctgtacagagggcaagtggaataagcaggtggcctgtgagccagtcgactgcagcatcccagatcaccatcaagtctatgctgcctccttctcctgccctgagggcaccacctttggcagtcaatgttccttccagtgccgtcaccctgcacaattgaaaggcaacaacagcctcctgacctgcatggaggatgggctgtggtccttcccagaggccctgtgtgagctcatgtgcctcgctccaccccctgtgcccaatgcagacctccagaccgcccggtgccgagagaataagcacaaggtgggctccttctgcaaatacaaatgcaagcctggataccatgtgcctggatcctctcggaagtcaaagaaacgggccttcaagactcagtgtacccaggatggcagctggcaggagggagcttgtgttcctgtgacctgtgacccacctccaccaaaattccatgggctctaccagtgtactaatggcttccagttcaacagtgagtgtaggatcaagtgtgaagacagtgatgcctcccagggacttgggagcaatgtcattcattgccggaaagatggcacctggaacggctccttccatgtctgccaggagatgcaaggccagtgctcggttccaaacgagctcaacagcaacctcaaactgcagtgccctgatggctatgccatagggtcggagtgtgccacctcgtgcctggaccacaacagcgagtccatcatcctgccaatgaacgtgaccgtgcgtgacatcccccactggctgaaccccacacgggtagagagagttgtctgcactgctggtctcaagtggtatcctcaccctgctctgattcactgtgtcaaaggctgtgagcccttcatgggagacaattattgtgatgccatcaacaaccgagccttttgcaactatgacggtggggattgctgcacctccacagtgaagaccaaaaaggtcaccccattccctatgtcctgtgacctacaaggtgactgtgcttgtcgggacccccagggcccaaggaacacagccgggaaagacctccgggggatacagccatgggttaagggaagggacaaggaagttgttcaaaggaatttccccaacgccaggggccccacattcccttttggtatttgatttcacagtcagctgctcaacggaatggcctctccacaccaggggatcctttaggcacccaaccggtcttgccttttaatttttacccaggggaagggacttcacatttgggggcgaatggaaccaagttttcgccattgttgggattgattgaattgggtttcccattccccaaagtctgagatggatttgcatatacagtgttgccagttcccagagcctcctaaaatttttaggcctttgttcacaaaaccacaggcaagaaacgtgttctatatctagagtgtgcccatctgtgtttagtacacatgcatgcatacacacccatacaaacatctgtgtgagggcagttctggagatgagcagagagagaccggcataaactcaatcttttctttcccaaaa

SEQ ID NO: 125251 - DNA, 528 bp, Homo sapiens; identical to SEQ ID NO: 125203
  misc_feature (1)...(528): n = a,t,c or g

SEQ ID NO: 125252 - DNA, 363 bp, Homo sapiens
atgaggtgcccgggtaaggcggctggccctcgcctgcaggacagaccagctgtgacagtcatcttcctggggctgaaaaccgccagtctagggagagaaaacccaggtgtagggctctgtgagcgctttagatcggagcaaagcagcagcactgaagcaacagagcccaggaagaggctgaactcagatgggcagggccggctgcacagcaagaaatttccagaattgaaattcaaatatgtggaagaggagcagcccgaggagttttttatcccctatgtctggtctcttgtctacaactcagcagtcggcctgtactggaatccacaggacatccagctgttcaccatggattccgactga

SEQ ID NO: 125253 - DNA, 820 bp, Homo sapiens; identical to SEQ ID NO: 125206

SEQ ID NO: 125254 - DNA, 210 bp, Homo sapiens
tcaagggtgctctccatggtcatcacgttttattaaaggcttgtggttccatcctgttagcatttccaagtctacgcgtaaaccgggaagccatatacttagagtagcttttagtttatcattatcatcatcatcatcatcatcatcatcatcatcatcatcatctccttcatcatgaaaggaagaagctaccaatgttgctttattcat

SEQ ID NO: 125255 - DNA, 612 bp, Homo sapiens
atggcgtgcggagccactctgaaaaggactctggatttcgacccgctgttgagcccggcgtccccgaagcgcaggcgatgtgcgccattgtcggcgcccacctcggccgctgcctccccgttgtcggcggccgcggccaccgccgcctccttctccgctgcggccgcctcgccgcagaagtatctccgaatggagccatcccccttcggcgacgtctcctcccgcctcaccacagtcgctggagccccagcggaaatgatcagagaggacgatattattcgtaaatttaggcgaaagggtcacatttcaccccaatctggatgtgtgcttgccgtaatcgattggttgcagctattaactctgggactgggtggtttgaggcgaggctacagcccctccttcagttcagacacggctgattttagtatagtgggggtggggggccagcttggcgactacagcccagaacttaggggacattggcttctagggcagaatcgtggtctccaagattacgacttcaggcgccctcttactaccaccttcagatccttgtctttcttagaacaggaggggttaaatgagtcacctaagcctgcagctattacgtga

SEQ ID NO: 125256 - DNA, 2682 bp, Homo sapiens
gactgcaatgtccagtgcagacccgtgcatttagatgtttccaaaatagcagttgtttccgcggcattatgttctgctggcctagaggtcttagttccagagggaggaatgctgccaccaagagacacaacaatgattccattaaactggaagttaagattgccacctggccactttgggctcttcttacttttaagccaacttgctaagaagggagttacagtgtttgacccagactatcaagatgaaatcagtctactactccacaatggcggtgaggcagttccagctcactgctgcatcctgtcagcttgtagccccttcttcacagagcgcctggagcgggagaggccagctcagggtgggaaggtggtgctagagctgggtggcctgaagatcagcacacttaggaagctggtggacttcttgtatacctcagaaatggaagtatctcaagaagaagcccaggatgtgctatctgctgcccgtcagctccgtgtgtctgagctggaatcccttcagcttgagggtggaaagttggtgaaggccccacagggccgaaggctgaaccgagagtgcttacaaccaacaagtgctgcaccaatctctgccagagtggtgacacccagccaccaccctcacaccccactgcccactaatcaaactccttgtcctcttggggcaataagattgaagtccttggggaaggaagaggggccccaggaaaacaaccgacagaatgcagacaatttgtctggcactcttctgctcaagaggaaggccagagcctgcccaactccacaagaaaaaaactcttcaccatcaagccatagtcaagagcctagagagaacaagaatgacactgcccttgatcctacagtgctctccccacccagcttgtacccctctgtggacaaacacctgttgcccagaaagatcaggctcagtcgctcaaagccatctcctggtatctgtacatcaaagccttccagcattttaagtggatctagctcagtgcctgcaacccctggccggcgtctttggcggcagaggagtgtaaataaagaaacaccagaggacaagccaaaaccaggcagagctagtcctctgcagagcaccccaaacccatctggtctgggaaagacaggtgggagcaggaagcggagccctgaagtcagggcacctaactcagactctgcagaggaggggcaggttgggagagttaaacttaggaagattgtcaatgggacttgctgggaagtggtacaagagactcctctcaaaaacactcaagatagcccccagatcccagatcccggaggagacttccaagagccttcaggaactcagccattctccagtaatgagcaggaaatgtcacctactagaacagaactgtgtcaggactcccccatgtgcactaagctacaagacattctggtctctgctagccactccccagaccacccagtggtgaagtcagagtttgagtccagtccagaactggtagagaaggaacctatgttggctattgactgcagagaaccctatgcatttgacacagctctgctggagcagccctgtgaggctgaggagtaccgaatcacaagtgctgctgccaccagtgagctggaggagatcctggacttcatgctctgtggctcagacattgaaccacctatagggtctctggagagtccaggggctgagggctgcagaacgcctacctaccatctgacagaaacaggaaagaactggattgaaggggaagaatggtgtctaccagacatggaactctggcccagggagctcacagaattggaaaaggaacctgctggtgagaacagagggccaactgagctccttagcccccttgtcatgccctctgaggtgagtgaagtgctttcagtaggaggccgttggacaccagaccttgaaattaccagctcccagccactggatggtcaggaagacaaacttctccatgtcagctcccttgatactccccagaggtcttatggggacctctcacctccctgctcaaactgggtggagactgggctggaagtctccttgactacagatgagttattatacccttctcccaaggcaggcaaggaggtatctggtcactctgaactactaggctcacttcctgccagctctgaagaggaagagattgatgtggtggactggacagcagaggggaggctggtacccactactgttccctccgtgtggcctgacccttcctcagagtcagaaacagagggaagaaaccatggcttcaggatcatgactgaagtttggccatgttccatcattaatgttccaacatcaccagggacacaaagctgcaaaaatgagaagggaaataaggcccctcaccaatgctcgataacaacggtcgcctcctccattccctccccgccgttcgccagcttctctcgcttctcggctacggcgaccaccgcggcctcagccttacgcttcctcccgcggggagccatggcgcctagagcccggccgagaatgcagcgggactggtgtccaggactaagcctgtatgtgtcacctgcagtgcccatctacaatgcaattatgtttctctttgtgttggccaacttcagcatggccaccttcatggacccagggattttccctcgaggtatagcatcctga

SEQ ID NO: 125257 - DNA, 678 bp, Homo sapiens
atggggcgtgcgatccaggtgctacgtgcggtgacggtgctgtttcggcgttacctggtcttccgcgggtccgtgacggggccagggtccataggttcgagccggcaaccggtgcgagcagtcgggcggtcgatcggcggtccctcaggccggccgcccatgcgcccctcatcagcagcagcattagattctaatagaagcactaaccctattgtcagctgtgcatgtgagggatctacgttgtgtgcttcttatgagaatctaatgcctgatgaactgtcactgtctcccatgacccccagatgggaccatctagttgcagaaaaacaagctcagtgttccactgattctacactatgcttcttcacccgcttctatctgatagcctttttctcccgagtgtttggtagcaaagttgcttttcctaaggggcgagaacgggagctggtggttagcaagcagacgcagttttacgcgcccctgctacgggcaggagcgagtggccctgccttctctgccagcgcgggttccctgggggtgaggaaagtgtccgagttaccggcagtgaatccgtaccggcctgcagcaacctcaattcttgcctcctcagaagaaagaattcgactgaggggcataaggcagaaaaagagactgaggcaagttttacagcagcagtga

SEQ ID NO: 125258 - DNA, 1077 bp, Homo sapiens
ttaagtctgagaagaggctttgaaacgtgggtgaataatcagagaggcgtccttgcaatgattaaacaccaagggaaggctgccttcccagtccgtgaccggcgccagagttttgggtccacagataaaacgtgtctcctttgtctcggatttgaaattggtgagttgtttcttgggctggtctgtctgaggacctgaggtcgtaggtggatctttctcacagagcaaagagcaggaggatgggggattgatctcccaagggaggtcggtcccccgatccgagtcacggcaccaaatttcatgcgcgtccgtgtgaagagaccaccaaacaggctttgtgtgagcaacatggctgtttatttcacctggagcatcgaattgagtgaaaaatgactctggtttcttctctatatcctcagtgtccaccttcacatccaccatggggttgagattctgagctcgctccaaagaggcttcagccctatttcggccaacagacccagtacgaatcaagaactgagctccgggatcttctggagttaccttctcctccaagaaaatgagctggcccacttcccattctaggctaaccctgtatccttgacccattccatcctgcttcttcagggatctcattatgtgctgagaagctggcagccactcccagagcccctggaactctggcccaaggctctccgactgactccttctcggcttggcggctgaagactgacgctgcccgatcacctcgaaagccccgtagaccatcacagacgccgagcttcgagtaacttgggcaagtgacaccttagggtgagtctccttgtctgtaaaaggggctgtggacagtgcctccttcattcggtgacaccgtttctgggcctccagtccccacaggcggatctgccggtcatactgtgccgcctcctcctcgctaatgccgccgccagcctcctccttctccaccatggcgccggctcttcctgcctcagctccggtcccgctcaagccaaccgcccgccggacccgcgcgccacctaccgccgccggcagcacgcccggagtgcttctgcgcat

SEQ ID NO: 125259 - DNA, 684 bp, Homo sapiens
atggaatctgctcctggtgaagatgctgtgaacattgttaaaaccacaacaagggatttagaatattctgtaaacttaattgatatagcattggcagggttggagaggatggactccaattttgaaagaagttttactgaaggtacacagtatgtgtatatatttatgggatacatgagttattttggtacagacatgcaatatgtaatcacatcatggaaaatcggacatccatcccctcaagcatttatcctttgtgttacaaacaatccaattatacacttatggcagagttgcagagatccaacaaaaagtaaaaagcagaaatcccagaaacgttggaaagcacaggagctaatgttagcaggagagaacatatccaagtcatacagcaccgaagtggccacaaatctgtatgggcctgcagcaacctcaattcttccctcctcagaagaaagaattcaactgaggggcataaggcagaagtgtacatgcaggagcacacttgcccagctcctgagatcttatggggaaactgcttgtcatgcctgtctgtgtgaagagaccaccaaacaggctttgtgtgagcaacaaggctgtttatttcacctggatgcaggccatctggatgtatacgtgcaggcttgggctcagaggcctgacattcgtgtcttcttatattaa

SEQ ID NO: 125260 - DNA, 1940 bp, Homo sapiens
atgtatcccattttcttttttatctgtatctctctaatccacctggcattcactcgatttccccatatttccttctttcctgttcctcaccctgatcatacttggtttattgatggcagttccaccaggcctaatcaccattcaccagcaaaggcaggctatgctatagtatcttccacacctatcattgaggctaccactctgcccccctccactacctctcagcaagttgaactcattgccctaactcgagccctcactcttgcaaaaggactacccatcaatatttatactgactctaaatatgccttccatatcctgcaccaccatactgttatatgggcagaaagaggtttcctcgctacacaagggtcctctatcattaatgcctctttaataaaaactcttctaaaggtcgctttacttccaaaggaaactggagtcattcactgcaagggccatcaaaaggcatcagatcccattgctcagggcagcacttatactgataaggtagctaaaaaagcagctagcattccaacttctatccctcatggcagtttttctccttctcatcagacactcccacctactcccccactgaaacttccacctatcagtcttcccacacaaggcaaatggttcttggaccaaggaaaatatctccttccagcctcacaggcccattctattctgttgtcatttcataacctcttccttgtagtgttggacgttctggccagggcaatcaggcaggagaaggaaataaagggtattcaattaggaaaagaggaagtcaaattgtccctgtttgcagacgacatgattgtttatctagaaaaccccatcgtctcagcccaaaatctccttaagctgataagcaacttcagcaaagtctcaggatacaaaatcaatgtacaaaaatcacaagcattcttatacaccaacaacagacaaacagagagccaaatcatgagtgaactcccattcacaattgcttcaaagagaagaaaatacctaggaatccaacttacaagggatgtgaaggacctcttcaaggagaactacaaaccactgctcaatgaaataaaagaggacacaaacaaatggaagaacattccatgctcatgggtaggaagaatcaatatcgtgaaaatggccatactgcccaagggcttaaaaaagcagcttacaaggctgttaattatgacaagcttaaagaaactacccaaggtgaagacgaaaacccagcccaggtcatggcccgcttagcagcaacccttagacgctttaccaccctagacacagaggggccagaaggccgccttattcttaatatgcattttaccacccaatccactcctgacattaggaaaaaacttcaaaaattagaatctggccctcaaaccccacaacagaacttaattaacctcaccttcaagcggctaaagtctgacaccacccaatcgcctcggaagcctacaggaccatcacagatgctctgggtaactctcacagtggaggcccgcctgcacccaggtgaaataaacagccatgttgctcacacaaagcctgtttggtggtctcttcacacggacacgcatgaaatttggtgctgtgattcggatcgggggacctcctttgggagatcaatcccctgtcctcctgttctttgctccatgagaaagatccacctacgacctcaggtcctcagaccgaccagcccaagaaacatctcaccaatttcaaatccagctgctcctcgccaggctgagctaggtcccaattcttcctcagcctctgctcctccaccctataatccttttatcacctcccctcctcacacctggtccggcttacagtttcattccgtgactagccctcccccacctgcccagcaatttactcttaaaagggtggctgaagctaaaggcatagtcaag

SEQ ID NO: 125261 - DNA, 548 bp, Homo sapiens
aacttaagtctcaggaagttattatttatgatgatgtagacctgagtgaaaaagagtcaaaagatgaagataaactgaaaatgtggaagcccaagtttctgacaccaaaggaaaaaaaagagaaaaacggtgctgaagaatcagaaagaaatttcttcaaaaccaagaagcaaaacttagaaaagaacagaatgaaaagagaagaaaaactatttagagaaaggtttaaggtacgttctcttctgaagtacgacaaagagattattgtcatcaatacagcagtggcctgttccaataattcaagaaatggaatatttgatttgccaataagtcctggagaagaattggaagtcattgataccaccgaacaaaatctagtgatatgtcgtaattctaaaggcaaattaaaaatcaatttgtattccctgagtacaaactgtctagggaataagaaaaagcaaactcagaattataaaactgtcctgaaaaacccatttgcagaaaatggagaattgttcatgctacatatagccaataccctgacatag

SEQ ID NO: 125262 - DNA, 578 bp, Homo sapiens
atgcatttctcagaacagatccccattgttaagcgatgcatgactgtaattaagattggcatcatgtcattaaataaaatccacagaactattggaaaagtcaaaagtgctaaacatgaagataaaaaaatgaaggaaaaacaaccatgtgaattgaaacctaaaaacacagaaaaggaaccatattcaaaccatgttttcaaggtagatgcctgtgaagggacacctgaaaaaattcagatgaccaacgtccacacaggtagaaggaacatgttggctggaaagcaagaggccatgattgacatcatccagacaaatccctgccctgagggcccaaagctggccaggcactcccaaggccactgtgggcatctggaggttttggagtcaactaaagaaactccagacctaggggtctctaagacaagttccatctcggaggagatatatgatgatgtcgagtactccaggaaagaggttttagatggaaaagaagcactcaaaagactgcagcaattcttcaagaaagaaaaggatagatttaaaataaagaaaaccaagtcgaaagaaaacttaag

SEQ ID NO: 125263 - DNA, 1242 bp, Homo sapiens
tcataacacatgtggctgagggttggccgtggctccacagtcacgggtgggctttcctgggctcagcttctcacagcgtctccttgcagggcccaggctgtaggagatgtcatcagggcgtgttccatttcttgtttctagactgtctccctccagtagaatgtgcgttctgctatacagcagtgctgtgtgacgcgatagcaggtcctttttaaacatctgggaactgcttaataaagtccccggcatcttgaagccacttgcagaccttggcagttgctgttgctcctgctgctgctgctgctgctgcattgtcaagactacattgatgtccagggaactaggtgacaacctgcttggcttcatgaagaaggaataatatccaattaggctaagtgtattcggtgcctgagtgacaagccctggagacctgagggcttctggggcccccagggcggtttcaggaggctgtctccagaccggggaagggggtgtaatatatgggggtatagggataaataattctgtgtgctgtgcaggccgtggagactcatcttctgcacaggtcaagttctccaaatctcttctcttttccttctctccttctctttgtttttctttctcttcctgttctcttgttttatcttgacttctctcgactgtggtgacggtttgcatatatctgcgattgtatttaaaatcgagtgtggctgtgtttgtcagtcgtggtttgtgttctttgatttgttctgcatgttcttcttttggagaggatgtgtcactttgccaatcttggtccttgctgttgtctggtggagggaaacaagcctgccaggccggctcatctgacccctctttggctatggcctgcaggctcagaatagttcttacattttcaatcatctcctggggataaggctgccttcgtctagaaagtgcctcggttccagcttggaaatatccatgtacagtcccttttttgttattccaaaacccaaagagatctggcccaaaatacctttctaacatggaggaattaggaatactgaaggcatcggcccccaagggtttgatgtgctcttgtccccaaggcctgcagatttgcatcacctctccacttcgtggactcctcgtacctgcctgattccaggatgctctaacctggccacgcatcccccgtggattctcagctgttgtgtgtttcctcctcaggtggccactgtgtctggtgctcacccacat

SEQ ID NO: 125264 - DNA, 930 bp, Homo sapiens
atggcttgcctggctagctgccctttgctcaagattgagaatgtgctgccttcttttcctgatttcgtcaccatcgaccacttcaagaaggcgatctgcagctcacttaaggcctacaaccaccacatccaggagctgcagcgggagatgaaagaggctacagccagtgcccagcgcatccggcgagacctgcaggagctgcggggccgctacggcactgtggagccccaggacaaatgtgccacctgcgacttccccctgctcaaccgccctttttacctcttcctctgtggccatatgttccatgctgactgcctgctgcaggctgtgcgacctggcctgccagcctacaagcaggcccggctggaggagctgcagaggaagctgggggctgctccacccccagccaagggctctgcccgggccaaggaggccgagggtggggctgccacggcagggcccagccgggaacagctcaaggctgacctggatgagttggtggccgctgagtgtgtgtactgtggggagctgatgatccgctctatcgaccggccgttcatcgacccccagcaagccaaaagaggagagactgggggccaattttttaacacaaggaagagcatcactaatctacgtcaacctcccccaaaggaaggggccgccgatgtcaaacccacaagggtgcagtttatgagcagcgatgggccaaggcatcacctccaacctgcaagagtcgcacatgatgtgcacaaagaggctgaggcagccgagctccggcctgaagcacctggaccagacgacaaagaggtcggcttccttagtccggaggactgtccggactgtgagcaagaggaagctacagcccacgagggccacccgcagcctgacaccttcagcagtaaacaagataaaataacttcttcaagataa

SEQ ID NO: 125265 - DNA, 1089 bp, Homo sapiens
atggacccttgcgatgttcagatatgtccggagtttcttccttctggtgggttcgtggtctcgctgacttcaggagtgaagctgcagaccttcgcggtgagtgttatagctcttaaaggcagcacgtctggagttgtttgttccttctggtgggttcatggtcttgctggcttcaggagtgaagctgcagaccttcccgaaattcctttggttacaagtttaccccataaacggcaacacactcacctccatccaagacagactcaaggtggaggaagcgtggaaatgtgcttccggacaaagctctcagtatcctgggtgccattgtttcttctactcagccgtgttttttctactgagacagacaaaccctcagcccaggatagcagaagccgtgggagttcaggccaaccggcagacctgctacaggttctctctgctggtgaccacccaccccacaaccactcaagaagcctcatcaaaacattgttggagaaaactgggtgcccacggaggagaaacggaatgcaaggagattgcaatctggttagtgaaatagaatggggtcagtgctttgaaccagatgcactattactaatagctggaggaaattttgaagatcagcttagagaagaagtggtccagagagtttctcttctccttctctattacattattcatcaggaagagatctgttcttcaaagctcaacatgagtaataaagagtataaattttacctacacagcctactgagcctcaggcaggatgaagattcctctttcctttcacagaatgagacagaagatatcttggctttcaccaggcagtactttgacacttctcaaagccagtgtatggaaaccaaaacgctgcagaaaaaatctggaatagtgagcagtgaaggtgctaatgaaagtacgcttcctcagttggcagccatgatcattactttgtccctccagggtgtttgtctgggacaaggaaacttgccttccccagactactttacagaatatattttcagttccttgaatcgtacgaataccctccgcctatcaggcaagcgtgctatgaaagctatgcggtga

SEQ ID NO: 125266 - DNA, 3922 bp, Homo sapiens
cggagaaagctccaaaagcaagccctgggccctgaacaaaatctagagacattattaaacctggcaacctcggtgttctataatagggaccaagaggaacaggtccaaaaggaaaagcgagatcagagaaaggccgcagccttagtcatggccctcagacaaacaaaccttggtggttcagagaggacagaacatgaagcaggccaatcacctggtaaggcttgttatcagtgtggtttactgggacactttaaaaaagattgtccaatgagaaacaagctgccccctcgtccgtgtccactatgctgaggcaatcactggaaggtgcactgccccagaggatgaaggttccctgggtcagaagcccccagccagacgatccaacaacaggactgagggtgcctggggcaagcgccagctcatgtcatcaccctcactgagccccgggtatgtttaactattgagggccaggaaattgacttcctcctggacactggcgcggccttctcagtgttaatctcctgtcctggacgactctcctcaacctccgttaccatccaaggaatcctgggacagcctgtaaccaggtatttctcccacctcctcagttgtaattgggagactttgctcttttcacatgcctttcttcttatgcctgaaagacccacagggttattagggagggatatattagccaaggctggagctattatctacatgaatatggggaacaagttacccatttgttgtcccctacttgaggagggaatcaaccctgaagtctgggcattggaaggacaatttggaagggcaaaaaatgcccacccagtccaaatcaggttaaaagatcccaccacttttccttatcaaaggcaatatccctaaggcctgaagctcataaaggattacagaatattgttaaacatttgaaagctcaaggcttagtaaggaaatgcagcagtccctgcaacaccccaattctggaagtacaaagaccgagactagtgcaagatcttagactcattaatgaggcagtaatttcactatatccagttgtacccaacccctataccctgctctctcaaataccagaggaagcagaatggttcacagttctggacctcaaggatgccttcttctgtgttcccctgcactctgattcacagttcctctttgcttttgaggatcccacaaaccacacatcccaacttacatggatggtcttgccccaagggtttagggatagccctcatctgtttggtcaggccctagccaaagatctaggccacttctcaagtccaggcactctggtccttcaatatgtggatgatttacttttggctaccagttaggaagccttgtgccagcaggctactctagatctcttgaactttctagctaatcaagggtacaaggtgtctatgtcgaaggcccagctttgcctacagcaggttaaatatctaggcctaatcttagccaaagggaccagggccctcagcaaggaatgaatacagcctatactggcttatcctcgccctaagacattaaaacagttgagggagttccttggaattaccagcttttgccgactatggatccctggatacagcgagacagccaggcccctctaatcaaggaaacccagagggcaaatactcatctagttgagtgggaaccagaggcagaaacaaccttcaaaaccttaaagcaggctctagtacaagctccagctttaagccttcccacaggacagaatttctctttatatgtcagagagagagccaggatagctcttggagtcctcactcaaactcatgggacaaccccacaaccagtggcatacctaagtaaggaaattgatgtagtagcaaaaggctggcctcactgtttaagggtagttgcagcagtggccgtcttagcatcagaggctatcaaaataatacaaggaaaggatctcactgtctagactacttatgatgtaaatggcatactaggtgccaaaggaagtttatggctatcagacaactgcctacttagataccaggcactactccttgagggaccagtgcttcaaatatgcacatgcatggccctcaaccctgccacttttctcccagaggatggggaaccaatcaagcatgactgccaacaaattatagtccagacttatgccgcccgagatgatctcttagaagtccccttaactaatcctgaccttaacctatatactgatggaagttcatttgtggagaatgggatacgaaggttagtgatgtaaccatacttgaaagcaagcctcttcccccagggaccagtgcccagttagcggaactagtggcacttacctgggccttagaactgggaaagggaaaaagaataaatgtgtatacagatagcaagtatgcttatctaatcctacatgcccatgctgcaatatggaaagagagggagttcctaacctctgtaggaacccccattaaataccacaaggaaattatagagttattgcacgcaatgcaaaaacacaaagaggtgggaatcttacactgacaaagccatcagaataggaaggagaggggagaacagcagcataagcagctggcagaggcagcagaaaggaaagaaagagacaggaagtcaaagaaagagacagagaggaagagacaagaagttagagagaaagagggacagacacagaagtcaaagagagggtaaaaaagagaggaagagacaaagaagaagtcaaagagagagatggaagtagtaaagaaaaaacagtgtacctattcctttaaaagccagggtaaatttctctctacccacgcaaggcaattctctattggatctcaacccatatctgcctctcaaacagttgaagaaataatgaaatctatccttactttacaatcccaaataagactctttggcagcagtgactctccaaaaccgctgaggcctagatctcctcactgctgaaaaaggaggactctgcaccttcttaggggaagagtgttgtttttacactaaccagtcagggatagcatgagatgccacccagcgtttacaggaaaaggcttctgaaatcagacgcctttcaaattcttataccaacctctggagttgggcaacatggcttctcccctttctaggtcccgtggcagccatcttgctgttactcgcctttgggccccgtatttttaaccttcttgtcaaatttgtttggtctagaatcgaggccatcaagctacagatggtcttacaaatcgaaccccaaatgagttcaactaacaacttctaccgaggacccctggactgaccagctggcacttcccctggcctagagagttcccctctgaaggacactacaactgcaaagccccttcttcgcccctatccagcaggaagtagctagagcagtcatcggccaaattcccaacagcagttggggtgtcctgttgattgaggggtgacagcatgctggcagtcctcacagccctcactcgctcgctcactctcggcacctcctctgcctgggctcccactttggcagcacttgaggagcccttcagctctgtatctagctactctgatgggtccttggagaacctttatgtctagctcagggattgtaaatacaccaatcagcaccctgtgtctagctcagggtttgtgaatgcaccaatggacactctgtatctagctactctggtggggccttggagaacctttgtgtcaacactctgtatctaactaacctggtggggatgtggagaacctttgtgtctagctcagggattgtaaacgcaccaatcagcgccctgacaaaacaggccactgggctctaccaatcagcaggatgtgggtggggccagataaggggattaaaagcaggctgcccgagccagcagtggcaaaaaaaaaa

SEQ ID NO: 125267 - DNA, 1420 bp, Homo sapiens
tcagtacaacctctgtgccaccagctccgacgatgggactatgacagtcttcaggttgtgcacgtaaatgactgcattgttggagccagaggccatcagatagctcaattctggctggctgccatgctcatgatgccagctaatggtattcacaagcttgtgatgtttgattgaattggtgtccctgatgagtttgttgatgtcaaaggcttctccactaagcttccagggattatgctgtaagacaatcccttctcctccacagctgtataaagcaagggaaggtctgtctccttctcctccaagtgacatggggggtactggtggcccccaggctaaagtatatacagtcttcttatgatatgtgctagaaatctgtggaggcttgttggagtaggtgtcatacaatcccacttttccatcatcagttccaaaagctaagcaaccttccttggttgggtgccagcacagcgctgtaaccttggacttcacgccttgccaaaaatttttcacatcatagttgttctttatggagagtgtattccatacacggatcatgccatccccaacacctatggccaaagagctattgtgtccggaattggttccttccggtgggttcttggtctctctgacttcaagaacgaagccatggaccctcgtggtgagtgttacagttcttaaagatgatgtgtccgcagtttgttccttcagatgttcagatgtgtccagagtttcttcctcctggtgggttcgtggtctcactgacttcaggagtgaagctgcagaccttcacaacagaaaagttctccaagtccccacctgtcccagaagcccaatcagcttcacctctcactggcattcactgtgggactttgcggcacctagtctgggcactctggcagcccagagggagctcgtcccagacaatcaagaggaaaagaggggaagcgagaaagagatggagacctggtattgtggccaatcatcccgtgaaaagggaatggcggtccatgcatgggattcagcctctgatcaagcccagcaggcatcagcccgctgccctgactataatcatgttctttgtggcaacatggatgcagctggaggcccttatcctaagcaaattaatgcagaaacagaaaaccaaatatcacatgttcttatttataagttagagctaaatattgggtacacaattgacataaagatgggaacaatagacactggggactccaaaagtggggagcctagtggtggcagctgcactggctgtgtcagtcctgcctcaggacaggatgcagattctaagcagcaaagttctcaggatggcaccaagaagcagctgctcagggctcagatacctgtgggactccatgtgggttccccgtctggagcgacatcttggtacagtctctag

SEQ ID NO: 125268 - DNA, 442 bp, Homo sapiens
  misc_feature (1)...(442): n = a,t,c or g
cttccgaggcgatcaggcagcatcagtcttcagccgttaagccaagaaggagtcagtcagagagccttgggccagagttccaggggctctgggagtggctgccaggtgagttgaacagtccgatttccagtggagtctggatttgaaattggtgagatgtttcttgggctggtcggtctgaggacctgaggtcgtaggtggatctttctcacggagcaaagagcaggaggacaggggattgatctccgaagggaggtcccccaatctgagtcacggcaccaaannnnnnnnnnnnnnnnnnnnnnnnnnnnnnnnnnnnnnnnnnnnnnnnnnnnnnnnnnnnnnnnnnnnnnnnnnnnnnnnnnnnnnnnnnnnnnnnnnnnnnnnnnnnnnnnnnnnnnnnnnnnnnnnnnnnncctcgtgccgaattcctgcagcgggc

SEQ ID NO: 125269 - DNA, 409 bp, Homo sapiens
  misc_feature (1)...(409): n = a,t,c or g
ccctcaaaataagtagaggcctttcctacagggtctgagaaggccaccgcagtcatttcttcccttctgtcagacataattcctcagtctngccttcccacctcaatacngtctgataacagacgagcctttattagtcaaatcagccaagcagtttttcaggctcttagtattcngtgaaacctttatatcccttatggtcctccatcttcangaaaacacacctcaccaagctcagccaccaacttaaaaaggactggacaatacttttaccactttcccttctcagaattcaggcctgtcctcgtaatgctacagggtacagcccatttaaggtcctgtatagacactcctttttattacgccccagtctcattccagacaccagaccaacttagactgtgcctca

SEQ ID NO: 125270 - DNA, 411 bp, Homo sapiens; identical to SEQ ID NO: 114508

SEQ ID NO: 125271 - DNA, 1146 bp, Homo sapiens
atgcacataaaccagaaaatctacaagaaactgatatatttttggacatatacactcccaagattggaccaggaagagattcggtccctgaatagaccaataacaagttctgaaattgaatcagcaataaatagcctaccaaccaaaaaatttccaagaccagatggattcacagttgaattctaccagatgtacaaagaagagctgacacacaacaagaaaagaaagcttcaggccaatatccttgatgaacatcaatgcaaaaaatcctcaagaaatcccggcaaactgaatccagcagcacatgaaaagctaatccaccatgatcaagcaggctttattcctgggatgcaagctcttgtctgctggataacagtcttcctcctccagtgttcaaaaggaactacagacgctcctgttggctcaggactgtggctgtgccagccgacacccaggtgtgggaacaagatctacaacccttcagagcagtgctgttatgatgatgccatcttatccttaaaggagacccgccgctgtggctccacctgcaccttctggccctgctttgagctctgctgtcccgagtcttttggcccccagcagaagtttcttgtgaagttgagggttctgggtatgaagtctcagtgtcacttatctcccatctcccggagctgtaccagatgctgctgcagggccagtacacagttgtgctcctgccagtgcccaaaacacacctacccgggctcctgcatccccttgccggcaagctgcacccccaccccaccccacccactgcatttttacagaaaaccacaagtagatattgccagcaatgcattatcaacggtgttgctgccagaaagacaacgagagctcttttctcaagccaaactcattgccttaactcgagccctcactcttgcaaaaggactacgcatcaatatttatacagactctaaatatgccttccatatcctgcaccatcatgctgttatatgggctgaaagaggtttcctcattacacaagggtcctccatcattaatgcatctttaataaaaactcttctcaaggccgctttacttccaaaggaagctggagtcattcactgcaagggccatcaaaaggcatcagatcccattgcttag

SEQ ID NO: 125272 - DNA, 456 bp, Homo sapiens
ggacgtgcatgaaatttggtgccgtgactcggatcgggggacctcccttgggagatcaatcccctgtcctcctgttctttgctccatgagaaagatccacctacaacctcaggtcctcagactgaccggcccaaggaacatctcaccaattttaatcagaccatcacggatgccgagcttcgggtaactctcacagtggaaggaccatcacagatgctctgggtaactctcacagtggaagacataattcctcggtttagccttcccacctctatacagtctgataatggaccagcctttactagtcaaatcacgcaagcagtttctcaggctcttggtattcagtggaaccttcatatcccttacagtcctcagtcttcaggaaaggtagaacggactaatggtcctttaaaaacacacctcaccaagctcagccaccaatttaaaaaggactag

SEQ ID NO: 125273 - DNA, 1131 bp, Homo sapiens
atgcatgagatttggtgccgtgactcggatcaggagacctcccttgggagatcaatcccctgtcctgctgctctttgctccgtgagaaagatccacgtacaacctcaggtcctcagaccaaccagcccaagaaacatctcaccaatttcaaatctgcgactgaagagtgacgctgcctcatcgccttggaaaccccctggaccatcacggacgccaagctttggcctcctttgcgtcttcctctcatatccccccaccttaaccacaagtataggacatctctactccttccctggcaaccgatcacatgcccattaccatcccactaaacctaatcacccttaccccactcaacgccaatatcccatcccaccgcacgctttaaaaggattaaagcctgttatcactgacctgctacagcataggcttctaaaacctataaactctccttacaattcccccattttacctgtccaaaaacccgacaagtcttacagattagttcaggatctgcgccttaccaaccaaattgttttgcctatccaccctgtggtgcccaacctgtacactcttttgtcctcaataccttcctccacaactcactattctgtgcttcatcttaaagatgcttttttcactattcccctgcacccctcatcccagcctctctttgctgtcacctggactgaccctgacacccaacagtcccagcagcttacctgggctgtgctgccgcaaggtttcagggacagccctcattacttcagccaagctctttctcatgatctactttctttccacccctctgcttctcaccttattcaatatattgatgaccttcttctttgtagcccctcctttgaatcttctcaacaagacacacttctgcttcttcagcatttattctccaaaggatatcagtctgatgacagaccagcctttactagtcaaatcacccaagcagtttctcaggctcttggtattcagtggaaccttcatatcccttaccatcctcaatcttcaggaaaggtagaatggactaatggtcttttaaagcttctgctcctacttctgactgctaatatcgatgacaccagttatctgcaaattcctcataaggggctccaatga

SEQ ID NO: 125274 - DNA, 609 bp, Homo sapiens
atgacctcaggtcctcagaccgaccagcccaaggaacatctcaccaattttaaattggatgaacaggaaagagttttttctctagcccaatctcacactgataaccgccggcttcacgagccagacctccaggaagttattagagcagttcccctaggagatccaaaatggaactatcaggctgattccccagacgtaattcctcggtttggccttcccacctctatacagtccgataatggactggcctttattagtcaaatcacccaagcagtttctcaggctcttggtattcagtggaaacttcgtaccccttaccatcctcaatcttcaggaaagtgctgggattacaggcataagtcactgcatccagccaaatgtttgctgaattcttacagccccagcaatgtccaaggctctggagacaccgtggtggacaggacaccatccctgtccttaagaaagagtagcctttggtataaggcaccccagtccagagatggagatactattggcgatgggaaaacatcaggagcacaccaactggggcagcccaataaaaagaggcatggatatcacatcatcagcttccctgactttttatcataa

SEQ ID NO: 125275 - DNA, 835 bp, Homo sapiens
  misc_feature (1)...(835): n = a,t,c or g
ttatgttgtttgtacttgccaggatacacttccatttcatatttgcaagtacacataaaggtatccttcatcagcagcacagtgcttcctttcctctgaatctgccatcagctcaggcagatttctaagcagcaaatcagcctttgccagaacactgcaggacaccagtgcagcgcccagcctgcgaccatgnnnnnnnnnnnnnnnnnnnnnnnnnnnnnnnnagtgacatttggtgccgtgactcggatcggggggacctcccttgggagatcaatcccctgtcctcctgctctttgctccatgagaaagatccacctacgacctctggtcctcagaccaaccagcccaaggaacttctcaccaattttaaatcagtcccaactccaagcgttgctgagtctttccaatcttccttttctacggacccatctgacccctcctctcctccccaggctgctcctcgccaggccaagccaggtcccaattcttcctcagcctctgctccccgaccctataatccttttatcacctcccctcctcacacctggtcgggcttacagtttcattctgcgactagccctcctccacctgcccaacaatttcctcttaaaaaggtggctcaagttaaaggcacagtcaagtggctaaagactgatgctgcccgatcgcctcagaagcctacaggaaccatcacagatgctttagataactctcacagtggaggtccgataatggaccggcctttattagtcaaatcacccaagcagtttctcaggctcctggtattcagtaaaacctttatatcccttaccatcctcaatcttcaggaaag

SEQ ID NO: 125276 - DNA, 1133 bp, Homo sapiens
gctgaggctctccctgtccagttctacttccatctttcagacattcgaggtatgctgcttcatgagccagacctccagaaaggcattaaagcagtttcccaagaggatccccaatggagctatcaggcagattccccaggtatagctaggcgagattatatggtttcccgcctagttgaagggcttaaaaaggcagcttacaaagctgttaattatgacaagcttaaaaaaactacccaagttaccattgttcctggcccggacttcaatctggcctcccacattattcctgataccacacctgacccccatgactgttatctctctgatacacctggcattcactccatttcccatatttccttctttgctattcctcaccctgatcacacctggtttattgatggcagttccaccacgcctaatcgccacacaccagcaaaggcaggctatgctatagtaccttccacatctatcattgaggctgctgctctgccgccctccgctacctctcggcaagccaaactcattgccttaactcgaaccctcactcttgcaaaggaattatgtgtcaatatttatactgactctaaatatgccttccatatcctgcaccaccatgctgttatatgggctgaaagaggtttcctcactaagcaagggtggtccaacattaatgcctctttaataaaaactcttctcaaggccactttacttccaaaggaagctggagtcatacactgcaagggccaccaaaaggcatcagatcccatcgctcagggcaacacttatgctgataagatagctaaagaagcagctagcggtccaacttctgtccctcatggccagtttttctccttctcattggtaactcccacctactctcccactaaaacctccacctatccatctcttctcacacaaggcaaatggttcttggaccaaggaaaatatctccttccagcctcaaaggcccattctattctgccgtcatttcataacctcttccatgtaggttacaagccgctagcccacctcttagaatatctcatttcctttctttcatggaaatctatcctcaaggaaatcacttctcagtgatccatctgctattctactactcctcagggatt

SEQ ID NO: 125277 - DNA, 1845 bp, Homo sapiens
  misc_feature (1)...(1845): n = a,t,c or g
atgcagcaagaagaccctgaagaaagtaccaaaagccccaacccaacgaccaataaaaaacaagaaaagaaacttagcctgtttggtggtctcttcacatggacgcgtgtgaaattcggtgccgtgactcagattgggggacctcccttgggagatcaatcccctgtcctcctgctccttcaacgtttattctccaaaggatatcgggtatccccatccaaagctcaaatttcttctccatccgttacctacctcaatagtgtctccttaataaaaactcttctcaagaccactttacttccaaaggaagctggagtcattcactgcaagggccatcaaaaggcatcagatcccattgctctgggcaacacttctgctgataagggattgttcagaccccctcccttcccttcacatcaagctcggggatttgcccctgcccaggactggcaaattgactttactcacatgccccgagtcaggaaactaaaatacctcttggtctgggtagacactttcactggatgggtagaggcctttcccacagggtctgagaaggccaccgcagtcacttcttcccttctgtcagacataattcctcggtttggccttcccacctctatagagtccgataatggaccggcctttactagtcaaatcacccaagcagtttctcaggctcttggtattcagtggaaccttcatatctcttaccgtcctcaatcttcaggaaaggtagaacagactaatggtcttttaaaaacacacctcaccaagctcagcctccaacttaaaaaggactggacagtacttttacctcttgcccttctcagaattagagcctgtcctcggaatgctacagggtacagcccatttgagctcctgtatggacgctcctttttattaagccccagtctcattccagacaccagaccaacttagactgtgcctacctccccaaaaaaaaacttgtcatccctactatcttctgtctagtcaaactcctatttgccgttctcaactactccatacatgccctgctccttgtttacactgctggtttacactgtttctccaagccacccacagctggatatctccggggtgctatccccaaaccgcccaccactcttaactccctcttaaagtaaataaataatctttactggcagggctatgctgaacctccttgggcactctctaattggatgtcctgggtcctcccaattgttagtcctttaatacctgtttttctcctcttattcggaccttgtgtcttccgtttagtttttcaattcatacaaaaccgcacccaggccatcaccaatcattctatacaacaagtgtttcttctaacaaccccacaatatcaccccttatcacaaaatcttccttcagcttaatctctcccactctaggttcccacgcctcccctaatcccgcttgaagcagccctgagaaacatcgcccattatatctccataccaccgcccaaaaattttcgccgccccaacacttcaacactattttgtgttatttttcttattaatataagaaggcaggaatatcaggcctctgaggcccagggccagggccatcgcatcccctgtggacttggcacgtgtaacatccaggatgggcctggaagttaactggaaggttccacaaaaggaagttaaaaacagcctttaactggatggacatttccaccattgtggatttgtttcctggccccacccnaactggattcaatgtactttgntaatcttcccccacccttaaggaaggttctttgttatttttccccanccttggggatgttattttttgangttccacccctgg

SEQ ID NO: 125278 - DNA, 4991 bp, Homo sapiens
atgaatccccagagggctgttgaaaagataaatctctcgaaggagacgaatgctgaccttatggatatgaactgtgaatcccatggtcctgaaatgggttttcaggctgatgctcaattagctgaccagtctcaagtagccgaaatagagcgtcagaaagtggatgttgaccttgagaataagagtgttcagtctagccgttcttctctgagttctgattctccggcttctctttatcattcagctcatgatgagcctcaagaagctttggatgaagtaaatcttaaagagttaaatattgacatggaagttaggagctatgattgctccagctctgagttgacttttgattctgacccgcctcttctgtcagttactgagcagtctcatctggatgctgaaggaaaagaacggcacattgacctggaagatgagagctgtgagtcagatagttctgaaataacttttgattctgatattcctctttattcagtaattgaccaacctgaagtagctgtttatgaggaagaaactgttgatctggaaagtaaaagtaatgaatcttgtgtctctgaaataacttttgattctgatattcctcttcattcaggaaatgatcaccctgaagtagctgttaaagaagtaattcagaaagaagagtacattcacttagaaaggaagaatgatgaacccagtggttctgaaataagttcggattcccatgcccctcttcattcagtgactaattctcccgaagtagctgttaaaaagctaaatcctcaaaaagaagagcaggtacacttagaaaataaggaaaatgaacctattgattctgaagtaagtttggattataatatcatttttcattcagtgactggacgttctgaagatcccattaaagaaataagccttcacacaaaagagcacatgtacttagaaaataagagtgtttttgaaacaagtttggattctgatgtccctcttcaggcagcgactcacaaacctgaagtaattgtcaaagaaacatggcttcaaagagaaaagcacgctgaattccaaggtagaagtactgaattcagtggttcaaaaacaagtttagattctggtgtccctcattattcagtaactgaacctcaagtagctgttaacaaaataaacagaaagaagcaatatgttctagaaaacaagaatgataaatgtagtggttctgaaataattttggattctaatgttccacctcagtcaatgactgaccaacctcaactagcttttttgaaggaaaaacatgttaatctgaaggacaaaaacagtaaatcaggtgattctaaaataacttttgattctgaacaacttcaggaagcggttaaaaaaatagaccaatggaaggaagaggttattggcctgaaaaataagattaatgaacctagtacttataaattaatacatcatcctgatgtttctgtccaatctgtggctgatcaacccaaatcagtggctgaccggctgagagaaaccgttaaagaaataagcctttggaaggatgaagaagttgacacggaagataggagaaatgaagctaagggttttgaaattatgtatgattctgatgttcttcagccagtggctggccaacctgaagaagtagttaaggaggtcagtctttggaaagagcatgttgacttggaaaataagattgtcaaacctacagattccagaataaattttgattctcatgaaccccttcagtccgtaactaataaaattccaggggcgaataaagaaataaatcttttgagggaggaacatgtttgtctggatgataagggctatgtgcccagtgattctgaaataatttatgtttcaaatatccctcttcagtcagtgataaaacaaccacacattttggaagaggagcatgccagtctggaagataagagcagtaattcttatagtcctgaagaaagttctgattccaatgactcttttcaggcagcagcagatgagcttcaaaaacctgtcaaagaaataaatctttggaaggaagaccatatttacctggaagataagagctataaattaggtgattttgatgtaagttatgcttctcatattcctgttcagtttgtgactgatcaatcttctgtacctgtcaaagaaataaacttgcaaaagaaggatcataatgatctagaaaataagaactgtcagaagttgaccaaccctcaagtgtcttacaaagaggcagaccttcagaaggaagagcatgttgtcatggaagaaaagaccgatcaacctagtgattcagaaatgatgtatgattctgatgttccttttcaaatagtagttaaccaatttccaggatcagtcaaagaaacccaccttccaaaggtggtacttgtggatctggtgcccggtgatagtgattatgaagtaatttcagatgatattccccttcagttagtgactgacccacctcagttgactgtcaaagatatcagctgtataaatacagaatgtattgatatagaagataagagctgtgacttttttggttctgaagtcagatgtaattgtaaagcctctactccctcaatgacaaaccaatgcaaagagactttcaaaataataaaccggaagaaggactatattattctgggagagccaagttgtcaatcttgtggttctgaaatgaattttaatgttgatgcctctgatcagtccatgacttacgagtcacaaggacctgatgagaaaatggtgaaatatattgattcagaagataagagctgtggatataatggttctaaaggaaaatttaatttggaagacacttctcatcgaacgactcaccgactgcagaaagctcacaaagaagccagtcttcggaaggatccaagaaatgctggcctaaaaggtaagagctgtcagtctagtgcttctgcagtggattttggtgcctcttccaagtcagcgctccatcgaagggctgataaaaaaaaacgttcgaagctaaaacatagagatctagaagtgagctgtgaaccggatggttttgagatgaattttcagtgtgctccccctcttccatctgatactgatcagcctcaagaaactgttaagaaaagacacccttgtaagaaggtatcttctgacttgaaagaaaagaaccatgattcccagtcaagctctgttctcaaggttgattctgtaaggaacctgaaaaaagcaaaggatgtcatagaggataatcctgatgaaccagttcttgaagccttgcctcatgtacctccttcatttgtggggaaaacatggtctcagataatgagagaagatgacataaaaattaatgctctggtgaaggagtttagggaaggtcgtttccactgttactttgatgatgactgtgagaccaaaaaagtttcttcgaaggggaaaaaaaaggttacctgggctgacttgcaaggtaaggaggacactgcaccaactcaagctgtgtcagagagtgatgatattgtctgtggtatttcagatattgatgacttgtcagtggccttagataaaccatgccatcgtcatcctccagcagagaggcctcctaagcaaaaggggcgtgtggcttctcaatgccagacagcgaaaatcagccatagtactcagaccagttgtaagaattacccagtgatgaaaagaaaaataattagacaagaggaagacccaccaaaaagtaagtgttcacgtttacaggatgacagaaaaaccaaaaagaaagtcaaaattgggacagttgaatttcctgcatcatgtactaaagttttgaagcctatgcaacccaaagccttagtctgtgttctttcttctttaaatattaaactgaaagagggtgaaggccttcctttccctaaaatgaggcaccatagttgggataatgatattcggtttatatgcaaatataaacggaatatctttgattattatgagcccttgattaagcaaattgtaattagtcctcccctgagtgtaatagtaccagagtttgagaggcgtaactgggttaaaattcattttaataggagcaaccaaaactccagtgcaggagataatgatgctgatggacaaggctctgcttcagcgcctttaatggcagtgccggcaagatatggatttaattcacatcagggaaccagtgactcttctctgtttctggaagaatcaaaggttctgcatgctcgtgagcttccaaagaaaagaaatttccagctaacatttttaaatcatgatgttgtcaaaatctctccaaaatcagttagaaataagcttttggaaagtcaaagtaaaaagaaaattcatggaaagagggtgacaactagtagtaataagctaggttttcccaaaaaggtttataaaccaattattctccagcaaaaacccagaaaagcttcagagaaacagtcaatttggattcggaccaaaccaagtgatatcattagaaagtatatttcgaaatactctgtctttttacgtcatagatatcagtccaggagcgcttttcttggaaggtatctgaagaagaaaaaatctgttgtcagtaggctaaagaaggcgaagagaacagctaaagtgcttttgaactcttcagttccaccagctggtgccgaagagctgtcaagcgctatggcaaatcctcctccaaagcgacctgtgcgggcttcttgccgcgttgcaagaaggaggaagaagactgatgaaagctaccatggccgacagaaaggtccttctacacctgtgagagcatatgatctgagaagctcatcttgtttacaacaacgtgagagaatgatgactcggctagcaaacaaactgagaggtaatgagcactctattgcatgtaataccgccggcggcactctacacgacttggagccgcctgcgctaccgtatgcagcactctccacggtagctccctggggactcaaacttttccagttccccat

SEQ ID NO: 125279 - DNA, 798 bp, Homo sapiens
atttcttccactgcccgtctgagggaacgctaagtagtgtgtccggcgccgtgttccaggtaactgggccaccgtggcgcgggaacgcagacgcgccaccacctcccggccggcccggaccctcaatctcctcggcgtctttggaagatccgaggcccaggactggtgccagctccgcgtttgttccgcgagaaagcgagaggccgagcccgggctggtgcgatggccgcggttggtggcaaagcagggagagggccgccagttcatcagcgaggcggccgtgcggggcaacgccgccgtccctggattattgcccggaacctcggtgtcagacgctgtcaggtggcctacggcccgggcatccttcggccttcaccggccttttacggctttcatctttttacctgcttcgcctcccgtcctgctctcccctgctccctcattctcaaaggcgggaaaggaaggtggaacaaaataatttcaaaatcaccggaaacctctctttacaaggaaggccctcatccgggggcctctttcacctacgttcctgttctggacggttcctctacggcatggtgcacgtctactgaaatgggggcccgggggactttttttaaaaaaccagatcgggaggactgtggccagcaattaacaccatgtagacttccttagttcttaagtggttgaattcgctgcttgttctgtaacgttataaataatttatatctgaagacggagagcctgtaatattcttcagattaaatggaagcgtgagacacttaaaaaaaaaaaaaaaaa

SEQ ID NO: 125280 - DNA, 1774 bp, Homo sapiens
atgtgtgatatgtcccctctaggaatccccagacttcctttcctgacatacgtgagctgtctgacgcatactccttccagtttggtcacagactacaactcttgcctgatttcatcagcttcatctgcacgaaaaagtcccggatatcccataaaagtccacgaatttaaggaggctcacatgcttttgtaagttttggtaacatctattccttgaattttcagtgacacagcaagaggtacaatttaaaccagaatccctctgtaagaagctgttctcagatcataaagaactggagggtttaatgaagaccctgatacatccttgttctcaggggattgtgatattttctagaagctgggctggtgatgttggcttcaggaaagaacagaatgtcctgtgtgatgctctcctgatagcagttaacagccccgtggtactctatacaatcttaatagaccccaattggcctggaggacttgaatatgcccgaaacacagctcatcagttaaagcagaaactgcaaactgttggtggttacacagggaaagtgtgcatcattccaaggctgatacacctgagcagcacacagagtagacctggtgagatccccctgcgttaccccaggtcctacaggcttgctgatgaggaggaaatggaagacttgctgcaggctctggtggtggtctccctgtcctccagatctcttctgagtgaccagatgggctgtgaatttttcaacttgctcataatggagcagagccagttgctttctgagagtcttcagaagacacgtgaattattcatctactgctttccaggagtcaggaagacagccctagccataaagatcatggagaaaattaaggacttgtttcactgcaaaccaaaagagatcctctatgtttgtgaaagcgactccctaaaggattttgtgacccaacaaaccacctgccaagctgtgaccaggaaaactttcatgcaaggggagtttctaaagattaaacacatagtgatggatgagactgagaatttctgcagcaaatatggcaattggtacatgaaggctaagaacatcacccatccaaaggcgaaggggactggaagtgaaaaccttcaccatgggattctctggctttttcttgacccttttcaaatccatcacgcagatgtcaatggccttccccctccatctgctcagtttcctcgaaaaacaatcaccagtgggatccactgtgctctggaaatagcgaaggttatgaaagaagaaatgaagaggatcaaagaaaatcctccctccaacatgtctccagacacattagcattgttcagcgagactgcctatgaggaagcaacgtgtgcccaggctctgcctggggtgtgtgagacaaagactaatctgacaacagaacaaatagctaactatgtggcaagaaaatgtcacagcctgttccagtgtggctatctgcccaaagatatagcaattctgtgcaggagaggggaggacagaggacgctataggcttgcactactcaaagcaatggaattaattgagacccacagaccatcagaggttgtgtttagcccggccaccggtgtttggggaagtcacattgttttagacagtattcagcaattttcaggcctggagaggactgtcgtgtttgggcttagtccagaatgtgaccagtcagaggaatttcataagctctgctttgcttcaagagccattaaacacctctacctgctttatgaaaagagggcagcctactga

SEQ ID NO: 125281 - DNA, 2599 bp, Homo sapiens
atgcttggagagatgatgtttggctcagtagcaatgagctacaaaggatccaccttaaaaattcatcagattcgttcccctccacagctcatgctcagcaaagtgtttactgctcggactggcagcagtatttgtgggagtctcaatacgctacaagatagtcttgaattcatcaatcaggacaacaatacattaaaggctgataataacacagttattaatggactgcttggaaatatagcatctctcagcagcttgctgatcactccatttccttccccaaactcctcacttacccgaagttgtgccagcagctaccagcgacgttggcgacgcagccaaacaacaagtttggaaaatggggtatttcctagatggtctatagaagaaagctttaatctctcagatgaaagctgtggccctaacccaggaattgtgcggaaaaagaagattgcaattggggtaatcttttcattgtccaaagatgaagatgaaaataacaaatttaatgaattctttttttcacattttcctctctttgaaagccacatgaacaaattaaagagtgcaatagaacaggctatgaaaatgagccggagatcagctgatgccagtcagagaagtttggcatataatcgaatagttgatgccctaaatgaattcagaacaacaatttgtaatctttacacgatgccacgaattggagaacctgtctggcttacaatgatgtcggggactccagaaaagaaccacctttgctatcgtttcatgaaggagttcacctttctaatggaaaatgcttccaaaaatcaattcttgccagctctcattactgcagttctgaccaatcatcttgcctgggttccaacagtcatgccaaatggacaaccacctataaaaatatttttagaaaagcattcctctcagagtgtggacatgttggcaaagactcatccatataacccactttgggcacaactgggagacttgtatggcgctattggctctcccgtacggttagcaaggactgtggtagttggcaaacgacaagacatggtccagaggctactttattttcttacttattttataagatgctctgaacttcaagaaacgcatcttttagaaaatggagaagatgaagccatcgttatgccaggcacagtaattactaccactttagagaaaggtgaaatagaagaatcagagtatgtccttgtcacaatgcatagaaacaaaagcagtttgctctttaaagagtcagaagaaattagaactcccaattgtaactgtaaatattgcagtcatccactccttgggcaaaatgtagagaacatttcacaacaagagagagaagatattcaaaacagctctaaggagctgctaggaatttcagatgagtgccggatgatttctccttctgactgccaagaagaaaatgctgttgatgttaaacagtacagagataaattaagaacttgctttgacgccaagttagagacagttgtttgcacaggatctgttccagtagacaaatgtgcattgtcagagtcaggcttagagtcaacagaggaaacatggcagagtgagaagttgctggattcagacagtcacacaggcaaagcaatgagatccacaggaatggttgtggaaaaaaaaacctccagataagattgtgcctgcttcattttcttgtgaggctgcccagacaaaggttactttcctgattggggattctatgtcacctgattcagatactgagcttcgaagtcaggcagtggtggatcagattaccagacatcacaccaaaccattgaaggaagaaagaggggctattgatcagcatcaagaaactaaacaaacaaccaaggaccaatctggagagtctgatacacagaacatggtttctgaagagccctgtgaacttccctgttggaatcattcagacccagaaagcatgagcttattcgacgaatattttaatgatgattcaatcgaaaccaggactattgatgatgttccatttaaaacaagtacagatagtaaagaccattgctgtatgttagagttttcaaaaatattgtgtacaaaaaataacaagcagaacaatgaattttgtaaatgtatagaaacagttccccaagattcatgtaaaacctgctttcctcagcaggaccaaagagatacactctccattcttgtcccccatggggataaagagagttcagataaaaaaattgctgtaggaactgaatgggacattccaagaaatgaaagttcagacagtgcccttggggatagtgaaagtgaagatacaggtcatgatatgactagacaagttagcagttattatggaggagagcaagaagattgggcagaagaggatgagataccttttcctgggtcaaagttaatcgaagtgagtgctgttcagcccaacattgccaacttcgggaggtccttgctgggtggctactgctcatcttatgtgcctgactttgttcttcaaggaattgggagtgatgagaggttccgtcagtgtctgatgtcagatttatctcatgctgtgcaggttaagacaattgttaaaaccctctga

SEQ ID NO: 125282 - DNA, 1629 bp, Homo sapiens; identical to SEQ ID NO: 121591

SEQ ID NO: 125283 - DNA, 969 bp, Homo sapiens; identical to SEQ ID NO: 121592

SEQ ID NO: 125284 - DNA, 1326 bp, Homo sapiens; identical to SEQ ID NO: 121593

SEQ ID NO: 125285 - DNA, 1269 bp, Homo sapiens
atgggcaaggacttcatgactaaaacaccaaaagcaattgcaacaaaagccaaaattgacaaatgggatctaattaaactaaagagctgcgcagcaaaagaaactaccatcagaattttggaggaacaggtggtatttggtgacatgatactgttgctttttgtgaagtgcagggagggggatccacctttggacccatgtgaatgggtgttggttgtggtggtgtcagctgcttgggttggtctaacctcaggccctgagaaatgtggtcaggtgccagcagacttaggatgggactccgctggtgatacccaggcaaacaggtctggagtggacctccagcaaactctaacagacccacagctgagggtcctgactgttaaaaggaaaactaacaaacagaaaggacatccacaccaaaaccccatctgtacgtcaccatcatcgaagaccaaagcctggcagagacacaacaaaaaagataattttaaaccaatatccctggtgaacatcaatgcaaaaatcctcaataaaatactggcaaaccgaatccagcagcacatcaaaaagcttatccacaatgatcaagttggcttcatccttgggatgcaagaattggaaaaaactataaagttcatatggaaccaaaaaagagcccgcattgccaagacaatcctaagccaaaagaacacagctagaggcatcacactacctgacttcaaactatactacaaggctacagtaaacaaaacagcatggtactgctatcaaaacagagatatagaccaatggaagaggacagagcccccggaaataataccacacatctacaaccatctgatctttgacaaatctgacaaaaacaagcaatggggaaaggattcccaatttaataaatggtgctgggaaaactggctagccatatgtagaaagctgaaactggatcccttccttacatcttatacaaaaattaattcaagatggattaaagacttaaatgttagacctaaaaccataaaaaccctagaagaaaacctaggaaataccattcaggacataggcatgggcaaggacttcctgactaaaacaccaaaagcaatggcaacaaatgccaaaattgacaaatgggatctaattaaactaaagagcttctacacaggaaaagaaactaccatcagagtgaacaggcgacctgcagaatgggagaaaatttttgcaatctacccatctgacaaagggctagtatccagaatctacaaagaactttaa

SEQ ID NO: 125286 - DNA, 1677 bp, Homo sapiens
atggatgtttatagcagctgtattcagaattgccagcacttggaagcaaccaagatatttttcagtaggcaaacaggatcagaagcggacctccagaaaactccagcagacctgcagcagaggggcctaatggttagaaggaaaactaacaaacagaaaggaatagcatcaatatcaacgaaaaggacatccacgcaaaaacacaatccaaaggtcaccaacattaaagaccaaagccaatatcatactgaatgggcaaaagctggaagcattccctttgaaaactggcacaagacaaagatgccctctctcaccactcctattcaacatggtattggaagttctggccaggtcaatcaggcaagagaaagaaataaaagtattcaaataggaagagaggaagccaaattgtctctctttgcagatgacatgattgtatatttagaaaaccccatcgtctcagcccaaaatctccttaagctgataagcaacttctgcaaagtctcaggatacaaaatcaatgtgcaaaaatcacaagtgttcctatacaccaataacagacaaacagagagccaaatcatgagtgaactcctattcacaattgctactaagagaataaaatacctaggaatccaacttacaagggatgtgaaggacctcttcaaggagaactacaaactgctgctcaaggaaataagagaggacacaaacatatggaaaaacattccaggctcatggataggaagaatcaatatccctccgctgctgatacccaggcaaacagggtctggagtggacctccagcaaactccaacagacctgcagctgagggtcctgactgctacaaggaaaactaaccaacagaaaggacatccacaccaaaaccccatctgtacatcaccatcatcaaagaccaaaggcagatcaacaagacagaaagttaacaaggatatccaggaattcaactcagctctgccccaagtggacctaatagatatctacagaactctccaccccaaatcaacagaaaatacattcttctcagcaccacaccacacttattccaaaattgatcacatagttggaagtaaagcactcctcagcagatgtaaaagaacagaaattataacaaactgtctctcagaccacagtgcaatcaaattagaactcaggattaagaaactcactcaaaactgctcaactacatggaaactgaacaacctgcttctgaatgacaactgggtacataacgaaatgaaggcagaaataaagatgttctttgaaaccaatgcgaacaaaaacacaacataccagaatctctgggacacatttaaagcattgtgtagagggaaatttatagcactaaatgcccacaagagacagcaggaaagatctaaaactgacaccctaacatcacaattaaaagaactagagaagcaagagcaatcacattcaaaagctagcagaaggcaagaaataactaagatcagagcagaactgaaggagatagggacacaaaaaatccttcaaaaaatcaatgaatccaggagctggttttttgaaaagatcaacaaaattgatagactgctagcaagactaataaagaagaaaagagagaagaatcaaacagatgcaataaaaaatgataaaggggatatcaccaccgattccacataa

SEQ ID NO: 125287 - DNA, 1122 bp, Homo sapiens
tcacatttgacaaagatcggatagttgtagatatgtggcattatttctgagggctctgttccattggtctatatctctgttttggtaccagtaccatgctgttttggttactgtagccttgtagtatagtttgaagtcaggtagcgtgatgcctccagctttgttctttcggcttaggattgacttggcaatacgggctcttttttggttccatatgaactttgaagtagttttttccaattctgtgaagaaagtcattggtaacttgatggggatggtgaatctataaattaccttgggcagtatggccattttcatgatattgattcttcctacccatgagcatggaatgttcttccatttgtttgtatcctcttttatttccttgagaagtggtttgtagttctccttgaagaggtccttcatgttccttgtaagttggattcctaggtattttattctctttgaagcaattgtgaatgggagttcactcatgtttggctctctgtttgtcagctcctccttgtacctctggtagaattcggctgtgaatccatctggtcctggactttttttggttggtaagctattaattattgcctcaatttcagagcctgttattggtctatgcagagattcaacttcttcctggtttagtcttgggagggtgtatgtgtcaaggaatttatccatttcttctagattttccagtttatttgcatagaggtgcttgtagtattctctgatggtagttcgtatttctttggtctttgatgatggtgacgtacagatggggttttggtgtggatgtcctttctgtttgttagttttccttccaacagtcaggagcctcagctgcaggtctgttggagtttgctggaggtccactcctgaccctgtttgcctgggtatcagcagcggaggaacagctgttggccccgtggcagttgtgatgtagttattacctgaagacacaaaaacttgccaaatctcttggtatcgaggaaagatgtgtggatttcctgtcatatctctctccttatttagggactcatcattaatagtgtcagtggatttcttctttcttctgtgtgtcaacagcagacctacacttgatagcat

SEQ ID NO: 125288 - DNA, 2139 bp, Homo sapiens
atggatgaagctggaaaccatcattctcagcaaactaacacaggaacagaaaaccaaacaccacatgttctccctcataagtgggagttgaacaatgagaacgcatggacacaaggaggggaacatcacacactgggacctgttggaagtgttggaagttctggccagggcaatcaggcaagagaaagaaataaagatattcaattaggaaaagaggaagtcaaattggccctgtttgcagacaacatgattgtatatttagaaaaccccatcatctcagcccaaaatctccttaagctgataagcaacttcagcaaagtctcaggatacaaaatcaatgtacaaaaatcacaagcattcttatacatcaataagagacaaacagagatccaaatcatgagtgaactcccattcacaactgcttcaaagagaataaaatacctaggaacccaaattacaagggatgtgaaggacctcttcaaggaggactacaaacaactgctcaacaaaataaaagaggacacaaacaaattgaagaacattccatgctcatggataggaagaatcaatatcatgaaaatggccatactgcctaagcctaactgggaggcaccacccagtaggggcagactgacacctcacacggccaggtacccctctgagacaaagattccagaggaacaatcaggcagcaacatttgctgttcagcaatattcacggttctgcagcctccgctgctgatacccaggcaaacaaggtctcgagtggacctccagcaaactccaacagacctgcagctgaggctcctgactgttagaaggaaaactaacaaacagaaaggacaaccacaccaaaagcccatctgtacgtcaccatcatcaaagaccaaaggagaactacgtgatgaatgcacaagcttcagtagccgatttgatcaactggaagaaagggtatcagtgactgaagatcaaatgaatgaaatgaagcgagaagagaagtttagagaaaaaagaataaaaagaaacgaacaaagcctccaagaaatgtgggactatgtgaaaagaccaaatctacgtctcattgatgtacctgaaagtgacagggagaatggaaccaagttggaaaacactctgcaggacattatcctggagaacttccccaatctagcaaggcaggccaacattcaaattcaggaaatacagagaatgccacaaagatactcctcaagaagagcaactacaagaaacctaattgtcagattcaccaaagttgaaatgaaggaaaaaatgttaagggcagccagagagaaaggtcgggttacccacaaagggaagcccatcagactaacagcagatctcttggcagaaactctgcaagccagaagagagtgggggccaatattcaacattcttaaagaaaagaattttcaacccagaatttcatatccagcaaaactaagcttcataagtgaaggagaaataaaatactttacagagaagcaaatgctgagagattttgtcaccactagccctgccctagaagagctcctgaaggaagcactaaacatggaaaggaacaaccgaacaacaagacagaaagttaacaaggatatccaggaattgaattcagctctgcaccaagcagacctaatagacatctccagaactctccaccccaaatcaacagaatatacattcttctcagcaccacatcacacttattccaaaattgaccacatagttggaagtaaagcactcctcagcaaatgtaaaagaacagaaattataacaaagtgtctctcagaccacagtgcaatcaaactagaactcaggattaagaaactcactcaaaactgcacaactacatggaaactgaacaacctgctcctgaatgactactgggtacaaaatgaaatgaaggcagaaataaagatgttctttgaaaacaatgagaacaaagatacaacataccagaatctctgggacacatttaaagcagtgtgtagagggaaatttatagcactaaatgcccacaagagaaagcagaaaagatctaaaactgacaccctaacatcacaattaaaagaactagagaaggaagagaaacacattcaaaagctagcagaaggcaagaaataa

SEQ ID NO: 125289 - DNA, 924 bp, Homo sapiens
  misc_feature (1)...(924): n = a,t,c or g
atggagggaagccctagngtcgncntaatgggncttangaccgaagtcccgggagttcacagtgagaatgataagaatcagaagaagaaaataagaaaactagaccctaaaaagaaacaggtggacacagtgcagataatccagggtagcaaaaaagggtctagttttcttattttcttcttctcccctcttatcattctcactgttgaactgcaagttgggaatgtagttgctcaggaactctccatccagttggagctgttttggagaactagagcttctcagtctgtgacagagccaacagcaggtctttgcttattaaatcctggtgaacaggagatgcgggcgttaagagggaggagaaagcctctgctgctgatacctaggcaaacaggatctggagtggacctccagcaaactccaacagacctgcagctgagggttctgactgttagaaggaaaactaacaaacagaaaggacatccacaccaaaaccccatcttgttggaagttctggccagggcaatcaggcaggagaaggaaataaagggtatccagttaggaaaagaggaagtcaaattgtccctgtttgcaggtgacatgattgtatatctagaaaaccccattgtctcaacccaaaatctccttaagctgataagcaactgcagcaaagtctcaggatacaaaatcaatgtgcaaaaatcacaagcattcttatacaccaataacaaacaaacagacagccaaatcatgagtgaactcccattcacaattgcttcaaagagaataaaatacctcagcaatccaacttacaagggatgtgaaggacctcttcaaggaaaactacaaaccattgctcaacgaaataaaacagaaccaaacaaatggaagaacattccagtcatgggagaagaaccaatgtga

SEQ ID NO: 125290 - DNA, 3519 bp, Homo sapiens; identical to SEQ ID NO: 120708

SEQ ID NO: 125291 - DNA, 1167 bp, Homo sapiens
ttattgatttgcatatgttgaaccaggcttgcgtcccagggatgaagcccacttgatcatggtggatagctttttgatgtgctgctggattcggtttgccagtattttatcgaggatttttgaatcgatgttcttcagggatattggtctaaaattctctttttttgttgtgtctctgccaggttttggtatcaggatgacgctggtctcataaaatgagttagggaggattgcctctttttctgttgattggaatagtttcagaaggaatggtaccagctcctccttgtacctctggtagaatttggctgtgaatccatctggtcctggactttttttgattggtaaactattaattattgcctcaatttcagagcatgttattggtctcttcagagattcaacttcttcctggtttagtcttgggagagtgtatgtgtcaaggaatttatccgtttcttctagattttctttggtctttgatgatggtgacgtacagatggggttttggtgtggatgtcctttgtgtttgttagttttccttctaacagtcaggaccctcagctgcaggtctgttggagtttgctggaggtccactccagaccctgtttgcctgagtatcagcagtggaggctgtttgcttctccaggcctgtatttcaattgtgcttaaggcccatttgaggaatgtatccatttcttctagattttctagtttatttgcgtagaggtgtttgtagtattctctgatggtagtttgtatttctgtgggatcggtggtgatatcccctttatcattttttattgtgtctatttgattcttctctctttttttctttattagtcttgctagcagtctatcaattttgttgatcctttcaaaaaaccagctcctggattcattgatttcttgaagggttttttgtgtctctatttccttcagttctgctctgattttagttatttcttggcttctgccagcttttgaatgtgtttgctcttgcttttctagttcttttaattgtgatgttagggtgtcaattttggatctttcctgctttctcttgtaggcgtttagtgctataaatttccctctacacactgctttgaatgcgtcccagagattctggtatgtggtgtctttgttctcgttggtttcaaagaacat

SEQ ID NO: 125292 - DNA, 1587 bp, Homo sapiens; identical to SEQ ID NO: 116568

SEQ ID NO: 125293 - DNA, 1763 bp, Homo sapiens
ttaggtcccatttgtcaattttggcttttgttgccattgcttttggtgttttaacatgaagtccttgcccatgcctatgtcctgaatggtattgcctacattttcttctagggtttttatggttttaggtctaacatttaagtcttcaatccatcttgaattaatttttgtataaggtgcaaggaagggatccagtttcagctttctacatatggctagccagttttcccagcaccatttattaaatagggaatcctttccccatttcttgtttttgtcaggtttgtcaaagatcagatggttgtagatatgcggcattatttctgagggctcttttctgttccattggtctatatctctgttttggtaccagtaccatgctgttttggttactgtagccttgtaatatagtttgaggtcaggtagcatgatgcctccagctttgttcttttggcttaggattgacttggcaatgcgggctcttttttggttccatatgaactttaaagtagttttttccaattctgtgaaaaaagtcattggtggcttgatggggatggcattgaatctataaattaccttgggcagtatggccattttcatgatattgattcttccaacccatgagcatgtaatgttcttccatttgtttgtatcctcttttatttcattgagcagtggtttgtagttctccttgaagaggtccttcatgtcccttgtaagttggatccctagatattttattctcagctcctccttgtacctctggtagaatttggctgtgaatccatctggtcctggactttttttggttgttaagctattaattattgcctcaatttcagatcctgttattggtctattcagagattcaacgtcttcctggtttagtttgatttcattcatttgatcttccatcagtgataccctttcttccagttgatcaaatcggctactgaggcttgtgcattcatcacatagttttcgtgccttggcttttggctccatcaggtcctttaaggacttctcgatggggttttggtgtggatgtcctttctgtttgttagttttccttctaacagtcaggaccctcagctgcaggtctgttggactttgctggaggtccactccagaccctgtttgcctgggtatcagcagtggaggctgccgaacagcggatattggtgagcagcagatgttgctgcctgatcgttcctctgaaagttttgtctcagaggagtacctggccgtgtgaggtgtcagtctgcccctactggggagtgcctcccagttaggcttctcgggggtcagggacccacttgaggaggcaatctgtccattctcagatctccagctgcgtgctgggagaaccactactctcttcaaagctgtcagacacggacatttaagtctgcagaggattctgctgccttttgtttggctattcccccatcttctcttggggacgccagtgacacgtgtggttgcattggctccaccttggactcgcccctgtccctgtttgcacttgtcctggaaagcggtgtcttctcgcaggagccccagtgctttgggaagcaggacaggccactggtccgttgtcttagaaaccagtccctgaggcttggcaaagcaggagccctccgtggcagtgcttggctgtcggggctccgaggctccggcctgacctctccacggggtcgacaggaacgtctccggatgccacgagtcgcacagaggtaggacttcatcatttcttcttc

SEQ ID NO: 125294 - DNA, 2004 bp, Homo sapiens
atggcttcatctgcaaaccaagccttcactggacaccgtaaggaaagtgaagctgcccttctgttggttcagtttgctcctccagctcaaaaaactatgaaagcatatataaagaatgaggaaacaaatgggccaagggtagatatctatgaagcaccagcatttaaggggggcagactgacacctcatatggacgggtacccctctgagatgaaacttctagaggaacgatcaggcagcaacatttgctgttcaccaatattcgcggttctgcagcctccgctgctgatacccaggcaaacagggtctggagtggacctccagcaaactccaacagacctggagctgagggtcctgacttttagaaggaaaactaacaaacagaaaggacatccataccaaaaccccatctgtacatcaccatcatcaaagaccaaagaaatacaaactaccatcagagaatactataaacacctctatgcaaataaactagaaaatctagaaggaatggataaattcctcgacacatacaccttcccaagactaaaccaggaagaagttgaatctctgaatagaccaataacagcctctgaaattgagacaataattaatagcttaccaaccaaaaagagtccaggaccagatagattcacagccgaattctaccagaggtacaaggaggaactgctgataagcaacttcagcaaagtctcaggatacaaaatcaatgtgcaaaaatcacaagtattcttatacaccaataacagacaaacagagtgtcaaatcatgagtgaactcccattcctaactgcttcaaagagaataaaatacctaggaatccaacttataagggatgtgaaggacctcttcaaggagaactacaaaccactgctcaacaaaataaaagaggatacaaacaaatggaagaacgttccatgctcatggataggaagaatcaatattgtgaaaatggctgtactgcccaaggtaatttatagattcaacaccatccccatcaagctaccaatgacttccttcacagaattggaaaaaactactttaaagttcatatgggaccaaaaaagagtctgcattgccaagtcaatcctaaaccaaaagaacaaagctggaggcatcacgctacctgacttcaaactatactacaaggctacagttaccaaaacagcatggtactggtatcaaaacagagatatagatcagtggaacggaagagagccctcagaaataataccacacatctacaactatctgatctttgacaaacctgacaaaaacaagaaatgggggaaggattccctaattaacaaatggtgctgggaaaactggctagccatatgtagaaagctgaaactggatcccttccttacatcttatacaaaaattaattcaagatggattaaagacttaaatgttagacttaaaaccataaaaaccctagaagaaaacctaggcaataccattcaggacacaggcgtgggtaaggacttcatgtctagaacaccaaaagcaatggcaacaaaagccaaaattgagaaatgggatctaattaaactagagagcttctgcacagcaaaagaaactaccatcagagtgaacaggaaacctacagaatgggagaaaattttcgcaacctactcatctgacaaagggcttgtatccagaatctacaatgaactccaacaaatttacaagaaaaaaacaaacaaccccatcaaaaagtgggcaaaggatatgaacagacacttctcaaaagaaaacatctatgcagccaacagacacatgaaaagatgctcatcatcactggccaccagagaaatgcaaatcaaaaccacaatgaaataccatctcacaccagttagaatggcgatcattaaaaagtcaggaaacaacaggtgctggagaggatgtgtacaaataggaacacttttacaccgctggtgggactgtaaagtagttcaaccattgtggaagagagtgtggtga

SEQ ID NO: 125295 - DNA, 741 bp, Homo sapiens
atgaacatcaacaaaaagggcatccacacagaaaccttatccgaaggtcaccaacatcaaagaccaaaggtagataaagccacgaagatgaggaaaaaccagcacaaaaaggctgaaaattccaaaaaccagagcacctcttctcctccaaaggatcacaactcctcaacagcaaggaaacaaaactggatggagaatgattttgacgaattgatagaagtaggcttcagaagtcttagcaaatggcacaccaggagattatatcccgcatctagctcagagggtcccacgcccacggagcctcggtcactgctagcacagcagtctgagattgaactgaaagctgggtgcccctctgagatgaagcttccagaggaaggatcaggcagcaacatttgtcgttctgcaatatttgctgtgctgcagcctctgctggtgatacccaggcaaacagggtctggagtggacctccagcaaactccaacagacctgcagctgatggtcctgactgttagaaggaaaactaacaaacagaaaggacacccacaccaaaaccccatgtgtacgtcaccatcatcaaagaccaaagagctaaaggaggatgttcgaacccatcacaaagaagctaaaaaccttgaaaaaagattagacaaatggctaactagaataaacagcatagagaagaacttaaatgacctcatggagctgaaaagcatggtacgagaactacatgacgcatga

SEQ ID NO: 125296 - DNA, 1368 bp, Homo sapiens
atggggctgaaagctctgactgggggagcagccttgactcgtcctctcactgtccctcagaggagggaggaggacaaagtgtggcctccgctgctgatacccaggcaaacagggtctggagtggaccaccagcaaactccaacagacccgcagctgaggatcctgactgttagaaggaaaactaacacacagaaaggacatccacaccaaaaccccaactgtacatcaccatcatcaaagaccaaagagctaaaggaggaagttggaacccaacgcaaagaagttaaaaaccttgaaaaaagattagacgaatggctaactagaatagccaatgcagagaagtccttaaaggacctgatgcagctgaaaaccatggcacaagaactccaaatacaaactaccatcagagaatactataaacacctctatgcaaataaactagaaaatctagaagaaatggataaattcctcgacacatacactctcccaagactaaaccaggaagaagttgaatctctgaatagaccaataacaggctctgaaattgaggcaataattaatagcttaccaaccaaaagaagtccaggaccagatggattcacagccgaattctaccagaggtacaaggaggagctgtgttggaagttctggccagggcgatcaggcaggaaaaaagaagtaaagggtattcaattaggaaaagaggaagtcaaattgtccctgtttgcagatgacatgattgtatatttagaaaaccccatcatctcagcccaaaatctccttaagctgataggcaacttcagcaaagtctcaggatacaaaatcaatgtacaaaaatcacaagcattcctgtacaccaataacagagaaacagagagccaaatcatgagtgaactcccattcacaactgcttcaaagagaataaaatacctaggaatccaacttaccagggatgtgaaggagctcttcaaggagacctacaacccactgctcaatgaaataaaagaggatacaaccaaatggaagaacattccatgctcatgggtaggaagaatcaatatcgtgaaaatcgccatactgcccaaggtaatttgtatattcaatgccatccccatcaagctaccaatgactttcttcacagaattggaaaaaactactttgaagttcatacggaaccaaaaaagagcccgcattgccaagtcaatcctaagccaaaagaacaaagccggagacgtcacgctacctgacttcaaactatactacaaggctacagtaaccaaaacagtatggtactggtaccaaaacagagatatagaccaatggaacagaacagagccctcagaaataatactgcatatctacaactaa

SEQ ID NO: 125297 - DNA, 3924 bp, Homo sapiens
atgggcagtctcctccagtcctccaaggacaaattgaggagttatttgctctgggggtggagagacaaaggagatgggttgctacccttgctgtctgcagctttttatgtgatggtaggagaagttctaagcaaagactcttgcacaggcactgctcagatacagggcactgtccccacagatgtgcctacttcatcttggtgcacaggtacctgttatggttcctgcccactgaaggcaatgtgccccccacactcttctccagcccagggaagccagacgctcaccagctcccagtcagaatggtccctctgcctttctgtcttccctgatcttgatccctccaaagcatgtggctgccctttgggctgtctgatatttgctggggctggcctggggccgccccttgggctgtctgatatcagcttgggctttgttggcagtagcactgcagtgggacatatggtccttgccaagtatctcatcaagagggatgcagtgcccctttgccccatgctggtgatgttagctttatccctgggcagaaagggtgtcgggcaagatgcaggaagtgaggctcctggggtcattctcctcaccctggttgtgtccagggtgtgtgcttactccccggtggtcccgtgggcagtaaggatggccacagtgctgcaggccactgtgttcctgcaagcaaggagacaccacactggggaactgtatgtcagattcctgcccaagccccaggtctggcacagaggaagactgtggagagcaacacctccctgccctgctctttcccaccctgctctgcgtgtcttgatgtctagcaggtgtgttctgatctctcctgatgtggaccccagtggaggcactgcttcgacaggaagcatggtgctgccagggcaggatgtgcgccaggatgcctctggctgcgctaggctgaaggggtgctttggaaggccacggtgctgcagggcatgtaggttggagggtcctggctgggagccagctaagcctcaggttcctgctgcctctgggtttgtgtggttctggccagatcctcgagggctcctgcccttggaagcccaccattatctggagaagtgcatgtccacatctggcaaagcaaggggtcagccgcaggtgactgaagagtttagttccaggcagaatgaaacccctgttgttggtgagacaaaactttcagaggaacgatcaggcagcaacatttgctgtgcaccaatatccgctgttctgcagcttctgctgctgatacccaggcaaacagggtctggagtggacctccagcaaactccaacagacctgcagctgagggtcctgaatgttagaaggaaaactaacaaacagaaaggacatccacaccaaaaccccatctgtatgtcaccatcatcaaagaccaaagagaagtccttaaaggacctgatggagctgaaaaccaaggcacgagaactatgtgatgaatgcacaagcctcagtagccgaatcgatcaactggaagaaaggatatcagtgatggaagatcaaatgaatgaaatgaagcaagaagagaagtttagagaaaaaataatagaaagaaatgaacaaagcctccaagaaatatgggactatgtgaaaagggcaaatctatgtcggattggtgtacctgaaaatgatggggagaatggaaccaagttggaaaacactctgcaggatattatccaggagaacttccccaatctagcaaggcaggccaacattcagattcaggaaatacagagaactccacaaagatactcttcgagaagagcaattccaatacacataattgtcagattcaccaaagttgaaatgaaggaaaaaatgttaagggcagccagagagaaaggtcaggaatgcagttcttcaccagcaacagaacaaagctggacggagaatgacgagttgagagaagaaggcttcagacaatcaaactactccgagctacaggaggaaattcaaaccgaaggcaaggaagttaaaaactttgaaaaaaatttacacgaatgtataactagaataaccaatacagagaagtgcttaaaggagctgatggagttgaaagccaaggctcgagagctacgtgaagaatgcagaagcctcaggagccgatgcaatcaactggaagaaaggatatcagtgatggaagatcaaatgaatgaaatgaatgacagggagaatggaaccaagttggaaaacactctgcaggatattatccaggagaacttccccaatctagcaaggcaggccaacgttcagattcaggaaatacagagaacgccacaaagatactcctcgagaagagcaactgcaagacacataattgtcagattcaccaaagttgaaatgaaggaaaaaatgttaagggcagccagagagaaagaaaagcaagagcaaacacattcaaaagctagcagaaggcaagaaataactaaaatcagagcagagctgaaggaaatagagacacaaaaaacccttcaaaaaattaatgaatccaggagctggttttttgaaaggatcaacaaaattgatagactgctagcaagactaataaagaagaaaagagagaagaatcaaatagatgcaataaaaaatgataaaggggatatcaccaccgatcccacacaaatacaaactaccatcagagaatactacaaacacctctatgcagataaaccagaaaatctagaagaaatggataaattcctcgacacatacaccctcccaagactaaaccaggaagaaattgaatctctgaatagaccaataacaggctccgaaattgtggtaataatcaatagcttaccaatcaaaaagagtccaggaccagagggattcacagccgaattctaccagagatctaccttacgacaagaagaagagaagagaaaaaatgccagtgcattgtatgaaaaaatcaggggacacttaagaagaaaagaagagcagtacaggaaagaagttgaagcaaacaaacaacttcagctgacgctgagaacacgagatacggaattgaggacagtaagaaatcatttgaaccaggttgtacaagagctaaatgacacccagaggcaactttctcgggaacagaacgccagaatattacaagatgaaattctgaccaatcacctttgcaaacaaaaggagatagcactggctcgaaggaaaaggaattctcagattcctcacagccatgacaaagtacaagatctgttgcatgaaaatcgcatgttgcaggacgaaattgccaccctcagactggaaatagacacaatagaaaaacagaacgaggaaaataaaaagaactattttgaggacattggtgacctgcaaaagacaataaaacggaatggggaaatattaacaacaatgatatccgagtatactgcacagcttggtgtcctgacagctgagaataccatgctccattctcaactggagagggaaaaacaaaagaaagaaagcctggagacagaagttgaatcacaccgttgcagactggctgctgttagacgtgattgtgaacaaagtgagacatccaaaagagacgtggaacttgctttccagggagcaaaagatgaatggtttcatttaccggagaaaatgaattttgatgacctaaaagctaacagtgtccttcgttctcagcaactgtctagaactcaaagtaacttggaaagcctaagccttaagttccaacacacaagagatgctcttacagaaaagcagaaaagaggtttgtttcagaatgcatgggaagagacctacgccaaacccagtgtcaaatccaggaaattcaacaaatgtatcaaaataaacaatgtaactgaaggaattcattggaaagcaggaatctgtagaggcgaggctgtctcaactgcagagtga

SEQ ID NO: 125298 - DNA, 2322 bp, Homo sapiens
atgactcttaacgagcatgctgctttcaagcatctgtttaacaaagcacatcttgcaccgcccttaatccatttaaccctgagtggacacagcacatgtttcagagagcacagggttggagccaaatccaacaatccaccagccagcaaaggagtctgggcgttgcagtctgcaagggtcaagtttgcagagaccacagcagggcagaaagggatgaatacaacttgggtcttttattacccaaatgtggcctccacctggtggggggccatgatacctgtacacgtggttttacctggaggctgccatgatgccagcacacttggtgacaaggaaaagagggcaggggaggctgtattgaatgtacctggcttccaggactctctcgaaagccatggaaggatagtcaactgccttatcccagatgtgcaagagaacaatccttcaacagggaacgagagctggttgaaaagtcaccagaggctgggggagcccacatcaagacgctggttaatcaccctgccagtcacatcaagatcaaactccatagggcatcttaaaggaacaccaggaaaaagcaaggaggaaataaaggcaactgtgtgtgctccaactttgaaaaatggattttggattgctgagcgggtcatgactgttagtggacacgagggggcagcctcatcccgggctctgagggaagagctacggcttcttttttcctcctgtgcacagggcagactgacacctcacatagccgggtacccctctaaggcgaagctccgagaggaacgatcaggcagcaacatttgctgttcagctatattcgctgtactgcagcctctgctgctgatacccaggggaacagggtctggagtggacctcctgcaaactccaacagacctgcagctgagggtcctgactgttagaaggaaaactaacaaacaggaaggacatccacaccaaaaccccacctgtacatcaccatcatcaaagaccaaagatagatccacgagacggaacgttaagaaggatacccaggaattgaactcagctctgcgccaagtggacctaatagacatctacagaactctccaccccaaatcaagagaatataccttcttctcagcaccacatcgcacttattccaaaattgaccacacagttggaagtaaagcactcctcagcaaacgtaaaagaacagaaattataacaaactgtctctcacaccacagtgcaatcaaactggaactcaggattaagaaactcactcaaaaccgctcaactacatggaaactgaacaatctgctcctgaatgactactgggtacataacgaaatgaaggcagaaataaagatattctttgaaaccaacgagaacaaagacacaacataccagaatctctgggacacatttaaagcagtgtgtagagggaaatttatagcactaaatgcccacaagagaaagcaggaaagatctaaaattgacaccctaacatcacaattaaaagaactagagaagcaagagcaaacacattcaaaagctagcagaaggcaagaaataactaagatcagagcagaactgaaggagatagagacacaaaaaaaccttcaaaaaatcaatgaattcaggagctgcctggcagagacacaacaaaaaaaaaagaattttggaccaatacccctgatgaacatcaatgcaaaaatcctcaataaaataccggcaaaccaaatccagcagcacatcaaaaaggttatccgccatgatcaagtgggcttcatccctgggatgcaaggctggttcaacatacgaaaatcaataaacgtaatccatcatataaacagaaccaaagacaaaaaccacacgattatctcaatagatgcagaaaaggcctttgacaaaattcaacagcccttcatgctaaaaactctcaataaattaggtattgatgggacgtatctcaaaataataagagctacttatgacaaacccacagccaatatcacagtgaatgcgcagaaactggaagcattccctttgaaaactggcacaagacagggatgccctctctcaccactcctattcaacatagtgttggaagttctggccagggcaatcatgcaggagaaagaaataaagggtattcaattaggaaaagaggaagtcaaattgtccctgtttgcagatgacatgattgtgcatttagaaaaccctatggtctcagcccaaaatctccttaagctgataagcaacttcagcaaagtctcaggatacaaaatcaatgtgaaaaatcacaagcattcttatgcaccaataacagactaa

SEQ ID NO: 125299 - DNA, 3546 bp, Homo sapiens
atgctggacaaaggcatgggcaaagactccatgtccaaaacaccaaaagcaacggcaacagaagccaaaattgacaaatgggatctcattaaactaaagagctgctgcacagcaaaagaaactatcatcagattggaaaatggatataccttatttgattatgatgttggactgaatgatataattcagctgctagttcgcccagaccctgatcatcttcctggcacatctacacagattgaggctaaaccctgttctaatagtccacctaaagtaaagaaagctccgagggtaggaccttccaatcagccatctacatcagctcgtgcccgtcttattgatcctggctttggaatatataagtccatgccacatgccaggacagagacctctgtgggcacatatgaatcccactcgacttctgaactggaggatctgacagagcccgagcaaagagagctcaaaaccaaactcactaaattggaggctgaaattgtaaccctacgccacgtactagcagccaaagagagacgctgtggggaactcaagaggaagttaggcctcaccgccttggtagggctgagacagaatctgtccaagagctggcttgatgttcaggtctccaacacctatgtgaaacagaagacatcagctgctctgtccaccatgggcactctcatctgcaggaagcttggaggcgtgaagaagtcggccacattcagatcttttgaagtccagtgcccctctgagacgaagcttccagaggaaggatcagacagcaacatctgctgttctgcaatatttgcagtcctgcagcctccactggtgatacccaggcaaacagggtctggagtggaccagcagcaaattccaacagacctgcagctgagggtcctgactgttagaaggaaaactaacaaacagaaagcacatccacaccaaaaccccatctgtacgtcaccatcatcaaagaccaaagaaatacaaactaccatcagagaatactataaacacctctacgcaaataaactagaaaatgtagaagaaatggataaattcctggacacatacaacctcctaagactaaaccaggatgaagttgaatccctgattagaccaataacaggttgtgaaattgaggcaataattaatagcctaccaaccaaaaaaagtccaggaccagatggattcacagccgaattctaccagaggtacaaagaggagctggcaccatttcttctgaaactattccaatcaatagaaaaagagggaatcctccctaattcattttgtgaggccaacatcatcctgataccaaagccgggcagagacataacaaaaaaagagaattttagaccaatatcgctgatgaacatcgatgcaaaaatcctcaataaaatactggcaaatcgaatccagcagcacatcagaaagcttatccaccatgatccagttggcttcatccctgggttgcaaggctggttcaacatatgcaaatccataaatttaatccatcatataaacagaaccaaagacaaaaaccacacgattatctcaacagatgcagaaaaggcctttgacaaaattcaacagcccttcatgctaaaaactttcaataaactagacaaacaagagagccaaatcatgagcgaactcccattcacaattgcttcaaagaaaataaaatacctaggaatccaacttacaagggatgtgaaggacctcttcaaggagaactacaaaccactgctcaatgaaataaaagaggacacaaacaaatggaagaacattccatgctcatggataggaagaattaatatcatgaaaatggccatactgccaaaggaaaggcggcgagggagagggaccagaagttctggaaacccttcgaatcttcagtttgcgcgaatcctaccacagtcaggaagcagagttagggttcttattcttgagagctcaatgcccgagtttcccctgtttgagagccgaagacgcggaagagccgcggaagccaggcgaacgctcagccgggccccgccgagcgcgggaagcgagggacctgggcacccagtgcctacggccgctgtcctaccaaatacaaacggcgagatatttgcgctccggacgccctcacttctgaccccgcgcggcgcacctccagttggggctggcagggacccactccccaccattcggcgggactgggccccgcaccccgcgcctcgcgggggctgcccacccgcagcggagccagaagaggcgctggcattcgggccgcacgtcgaacagcgcccacacccgctcgcgcagctcctcaatcgtggctttgcgagacacgtcctcaatggtgcacgtcttggagccatcaatggtgacctgctccacgtgactcgctcttccatgttctgttatcttaatgagaacaaagacaaaacataccagaatctctgggacacattcaaagcagtgtgtagagggaaatttatagcactaaatgcccacaagagaaagcaggaaagatccaaaattgacaccctaacatcacaattaaaagagctacaaaagcaagagcaaacacattcaaaagctagcagaaggcaagaaataactaaaatcagagcagaactgaaggaaatagagacacaagaaacccttcaaaaaattaatgaatccaggagctggttttttgaaaggatcaacaaaattgatagacctctagcaagactaataaagaaaaaaagagagaagaatcaaatagatgcaataaaaaatgataaaggggatatcaccaccaatcccacagaaatacaaactaccatcagagaatactataaacatctctacgcagataaactagaaaatctagaagaaatggataaattccttgacacatacactctcccaagactaaaccaggaagaagttgaatctctgaatagaccaataacaggctctgaaattgaggcaataatcaataccttaccaaccaaaaaaagtccaggaccagatggattcacagccgaattctaccagaggtacaaagaggagctggtaccattccttctgaaactatcccaatcaatagaaaaagagggaatcctccctaactcattttatgaggccagcatcatcctgataccaaagccgggcagagacacaaccataaaagagaattttagaccaatatccttgatgaacattgatgcaaaaatcctcaataaaatactggcaaaccgaatccagcagcacatcaaaaagcttatccaccatgatcaagtgggcttcatccctgggatgcagggctggttcaatatacgcaaatcaataaatgtaatccagcatataaacagaaccacagacaaaaaccacatgattatctcaatagatgcagaaaaggccttcaacaaaattcaacaactcttcatgctaaaaactctcaataaattaggtattgatgggacgtatctcaaaataataagagctatctatgacaaacccacagccaatatcatactgaatgggcaaaaactggaagcattcccttag

SEQ ID NO: 125300 - DNA, 1260 bp, Homo sapiens
ttacaatttggcatgtttttgcagtggctggtaccggttgttcctttccatgtttactgcttccttcaggagctctttcagggcaggcctggtggtgacaaaatctctcagcatttgcttgtctgtaaagtattttatttctccttcacttatgaagcttagtttggctggatatgaagttctgggttgaaaattcttttctttaggaatgttgaatattggcccccactctcttctggcttgtagagtttctgccaaaagatcagctgttagtctgatgggcttccctttgtgggtaacccgacctttctctctggctgccattaacattttttccttcatttcaactttggtgaatctgacaattatttgtcttggagttgccgttctcaaggagtatctttgtggcattctctgtatttcctgaatttgaatgttggcctgccttgctagattggggaagttctcctggataatatcctgcagagtgttttccaacttggttcccttctccccgtcactttcaggtacaccaatcagatgtagatttggtcttttcacatagtcccttatttcttggaggctttgtttgtttctttttattcttttttctctaagcttctcttctcgcttcatttcattcatttgatcttccatcactgatacccttttgaggcttgtgcattcatcacatagttctcgtgccatggttttcagctccattgggtcctttaaggacttctctgcattggttattctagttagccattcgtctaattttttttcaaggtttttaacttctttgccatgggttcgaacttcctccattagctcggagtagtttgatcgtctgaagccttcttctctcaactcgtcaaagtcattctccatccagctttgttccattgctgctgaggagctgcattcctttggaggaggagaggcgctctgctttttagagtttccagtttttctgctctgttttttccccatctttgtggttttatctacctttggtctttgatgatggtgatgtacagatggggttttgtgtggatgtcctttctgtttgttagtttcccttctaacagtcaggaccctcagctgcaggtctgttggagtttgctggaggtccactccagaccctgtttgcctgggtatcagcagcggagtctgcagaacagcagatactggtgaacagcaaatgttgctgcgtgatcgttcctctggaagttttgtctcagaggagtacccggccat

SEQ ID NO: 125301 - DNA, 762 bp, Homo sapiens; identical to SEQ ID NO: 115053

SEQ ID NO: 125302 - DNA, 986 bp, Homo sapiens
cctaactgggaggcaccacccagtaggggcagactgacacctcacacggccaggtacccctctgagacaaagattccagaggaacaatcaggcagcaacatttgctgttcagcaatattcacggttctgcagcctccgctgctgatacccaggcaaacaaggtctcgagtggacctccagcaaactccaacagacctgcagctgaggctcctgactgttagaaggaaaactaacaaacagaaaggacaaccacaccaaaagcccatctgtacgtcaccatcatcaaagaccaaaggagaactacgtgatgaatgcacaagcttcagtagccgatttgatcaactggaagaaagggtatcagtgactgaagatcaaatgaatgaaatgaagcgagaagagaagtttagagaaaaaagaataaaaagaaacgaacaaagcctccaagaaatgtgggactatgtgaaaagaccaaatctacgtctcattgatgtacctgaaagtgacagggagaatggaaccaagttggaaaacactctgcaggacattatcctggagaacttccccaatctagcaaggcaggccaacattcaaattcaggaaatacagagaatgccacaaagatactcctcaagaagagcaactacaagaaacctaattgtcagattcaccaaagttgaaatgaaggaaaaaatgttaagggcagccagagagaaaggtcgggttacccacaaagggaagcccatcagactaacagcagatctcttggcagaaactctgcaagccagaagagagtgggggccaatattcaacattcttaaagaaaagaattttcaacccagaatttcatatccagcaaaactaagcttcataagtgaaggagaaataaaatactttacagagaagcaaatgctgagagattttgtcaccactagccctgccctagaagagctcctgaaggaagcactaaacatggaaaggaacaaccg

SEQ ID NO: 125303 - DNA, 903 bp, Homo sapiens
cagctcctgaattcattgattttttgaaggtttttttgtgtctctatctccttcagttctgctctgatcttagttatttcttgccttctgctagcttttgaatgtgtttgctcttgcttctctagttcttttaattgtgatgttagggtgtcaattttagatctttcctgctttctcttgtgggcatttagtgctataaatttccctctacacactgctttaaatgtgtcccagagattctggtatgttgtgtctttgttctcgttggtttcaaagaatatctttatttctgccttcatttcgttatgtacccagtagtcattcaggagcagattgttcagtttccatgtagttgagcggttttgagtgagtttcttaatcctgagttccagtttgattgcactgtggtgtgagagacagtttgttataatttctgttcttttacgtttgctgaggagtgctttacttccaactgtgtggtcaattttggaataagtgcgatgtggtgctgagaagaaggtatattctcttgatttggggtggagagttctgtagatgtctattaggtccacttggcgcagagctgagttcaattcctgggtatccttcttaacgttccgtctcgtggatctatctttggtctttgatgatggtgatgtacaggtggggttttggtgtggatgtccttcctgtttgttagttttccttctaacagtcaggaccctcagctgcaggtctgttggagtttgcaggaggtccactccagaccctgttcccctgggtatcagcagcagaggctgcagtacagcgaatatagctgaacagcaaatgttgctgcctgatcgttcctctcggagcttcgccttagaggggtacccggctatgtgaggtgtcagtctgccc

SEQ ID NO: 125304 - DNA, 891 bp, Homo sapiens
ctagtttattgaaagtttttagcatgaagggctgttgaattttgtcaaaggccttttctgcatctgttgagataatcgtgtggtttttgtctttggttctgtttatatgatggattaaatttatggatttgcatatgttgaaccagccttgcaacccagggatgaagccaactggatcatggtggataagctttctgatgtgctgctggattcgatttgccagtattttattgaggatttttgcatcgatgttcatcagcgatattggtctaaaattctctttttttgttatgtctctgcccggctttggtatcaggatgatgttggcctcacaaaatgaattagggaggattccctctttttctattgattggaatagtttcagaagaaatggtgccagctcctctttgtacctctggtagaattcggctgtgaatccatctggtcctggactttttttggttggtaggctattaattattgcctcaatttcacaacctgttattggtctaatcagggattcaacttcatcctggtttagtcttaggaggttgtatgtgtccaggaatttatccatttcttctacattttctagtttatttgcgtagaggtgtttatagtattctctgatggtagtttgtatttctttggtctttgatgatggtgacgtacagatggggttttggtgtggatgtgctttctgtttgttagttttccttctaacagtcaggaccctcagctgcaggtctgttggaatttgctgctggtccactccagaccctgtttgcctgggtatcaccagtggaggctgcaggactgcaaatattgcagaacagcagatgttgctgtctgatccttcctctggaagcttcgtctcagaggggcactgga

SEQ ID NO: 125305 - DNA, 942 bp, Homo sapiens
atggaccagctgtgcttggaggtagagggaaaaatagttgataagacagagggtaacattgatgactcactggtggaaatgcttccactgaaggcctcaagggtgaagcctccgctggtgatacccaggcaaacagggtctggagtggacctccaacaaaatccaacagacctgcagctgagggtcctcactgttagaaggaaaactaacaaacagaaaggacatccacaccaaaaccccatctgtacgtcaccatcatcaaaggccaaagaaagggtatcagtgattgaagatcaaatgaatgaaacgaagcgagaagagatgtttagagaaaaaagagtaaaaagaaatgaacaaagcctccaagaaatatgggaatatgtgaaaagaccaaatctacgtctgattggtgtacctgaaagtgatggggataatggaaccaagttggaaaacactcttcaggatattatccagcaatacttccccaacctagcaaggcaggccaacattcaaattcaggaaatacagagaatgccacaaagatgctcctcaagaagagcagctccaagacacataattgtcagattcaccaaagctgaaatgaaggaaaaaatgttaagggcagccagagggaaaggtcgggttacccacaaagggaagcccatcagactaaaagtggatgtcttggcagaaactctacaagccagaagagagtgggggccaatattcaacattcttaaagaaaagaattttcaacccagaatttcatttccagccaaactaagcttcataagtaaaggagaaataaaatcctttacagacaaggaaatgctgagagattttgtcaccaccaggcctgccttacaagagctcctgaaggaagcactaaacatggaaaggaacaaccggtaccagccccagcaaaaacatgccaaattgtaa

SEQ ID NO: 125306 - DNA, 2976 bp, Homo sapiens
ctaggccagcagactatctaggccagcagaatgtaatgttgtgggaggaggaagcaaaaaatttgctagtggatcactaggagtgatggtgagtggtgccgcttccacttccacccgttgattcctggacccgtgaatcctggcctgaggaatggtgccatattgagggctcagtgttggtctctgctgctggcaaatggggcactcagcagtggctgtagccaggtcatccctggtgagtggaagcccatgttgctgagcccatgcataatctccatccctgccaccatggccacgttgttcatgggcccattgggcgatgacaggggtggctcttccccaaatttctttgtcaccaattttccaatcatgcttcttccaagtccctgaccatccagccaaaccactggctacagcccatgaatcagtatataattgcacatctggccatttctccttccatgcaaagcgcaaaaccaggtgcactgctctaagttctgcccactgggaagatttcccttcatggctgtccttcagggatgtcctagaaaggggctgtagtgctgcagctgtccacttttgggtggtatctggatatcgtgcagaatcatttgtgccttcaggacctacttgagaccaatcatgtatataccacttccatttgctgatggaatgctgctgtgcacggcccactctatggcacgctgttttggttactgtagccttgtagtatagtttgaagtcaggtagcgtgatacctccagctttgttcttttggcttaggattgacttggcaatgcgggctcttttttggttccatatgaactttaaagtagttttttccaattctgtgaagaaagtcattggtagcttgatggggatggcattgaatctataaattaccttgggcagtatggccattttcatgatattgattcttcctacccgtgagcatggaatgttcttccatttgtctgtatcctcttttatttcattgagcagtggtttgtagttctccttgaagaaatccttcacatctcctgtaagttggattcctaggtattttattctctttgaagcaattgtgaatgggagttcactcatgatttggctctctgtttgtctgttgttggtgtataagaatgcttgtgatttttgtacattgattttgtatcctgagactttgctgaagttgcttatgagcttaaggagattttgggctgagacgatggggttttctagatatacaatcatgtcatctgcaaacaggcacaatttgacttcctcttttcctaattgaataccctttatttccttctcctgcctgattgccctggccagaacttccaacactatgttgaataggagtggtgagagaagacatccctgtcttgtgccagttttcaaagggaatgcttccagtttttgcccattcagtatgatattggctgtgagtttgtcatagatagctcttattattttgagatacggcccatcaatacctaatttattgagagtttttagcatgaagggttgttgaattttgtcaaaggccttttctgcatctattgagacaatcatgtggtttttgtcattggttctgtttatatgctggattacgtttattgatttgcgtatgttgaaccaaccttgcatcccagggatgaagcccacttgaccgtggatatgctttttgatgtgctgctggattcggtttgctagtattttattgaggatttttgcatcgatgttcatcagggatattggtctaaaattctctttttttgttgtgtctctgcccagctttggtatcaggatgatgctggcctcataaaatgagttagggaggattccctctttttctattgattggaatagtttcagaaggaatggtaccagctcctccttgtacctctggtagaattcggctgtgaatccatctggtcctggactttttttggttggtaagctattaattattgcctcaatatcagattctgttattcgtctatttagagattcaacttcttcctggtttagtcttgggagggtgtatgtgtccaggaatttatccatttcttctagattttctagtctatttgcgtagaggtgtttatagtattctctgatggtagtttgtgtttctttggtctttgatgatggtgacgtacagatggggttttggtgtggatgtcctttctgtttgttagttttccttctaacagtcagtaccctcagctgcaggtctgttggagtttgccggaggtccactccagaccctgtttgcctgggtatcagcagcagaggctgcagaacagcggatattggtgaacagcaaatgttgctgcctgatcgttcctctggcagtgttgtctcagaggagtactcggccatgtgaggtgtcagtctgcccttactggggggtgactcccagttaggccctttcgaatcaatcactccaggtttggcattaaacttcactgtcttcaatcgggcacgttcctttctttccaccctccttttgctggggatgacccccatctcctcactgtctccctccagcatgactctcctggcttgccaccactcatcatcagaggcattgataacgtggagaatatctccatatttaaaactaagtccttgacttggcagcccactgtccttgctcttgtcgtagtcgaacatggctagagactctttacttgcagtctccttacaaatgactgtcagtgccaggatctgaaggtccatgggatgcagcatgcacaggtagagcacaagagacagggagcaggcactaaatagctcaccactaacccctctgagtcctggatgggtgggttttgtcctccaaatagcctctgctacagatttaccaaggacctccaggttccttccagtacccttatctgccattcttagggtttggtctttgtctttagcatccaatttggctgctggagtgccaggcat

SEQ ID NO: 125307 - DNA, 1878 bp, Homo sapiens
atggtccttgcgctcacgggtaacaaggcagacctggccagcaagagacccctggaattccaggaagcacaagcctatgcagacgatgacagttggctgttcatggagacatcagcaaagggtgcaatgaatgtgaatgaaattttcatggcaatagctgagaaacttcccaagaacaagccccagaatgcagctggtgctccagacagaaaccaaggatatttgtctgcttgtgaattcagtggaagaaaattaccaaagcaaactaccaaacacattaaacaatctctccggaccaagctctgtggtgcttcttacgcatcatccaatttaatcccccgaaaactctatgagcctccgctggtgatacccaggaaaacagggtctggagtggatctccagcaaactccaacagacctgcagctgtgggtcctgactgttagaaggaaaagtaacaaacagaaaggatatccacaccaaaaccccatctgtatgttaccatcatcaaagaccaaagactttaaaccaacaaagatcaaaagagacaaagacggccattatataatggtaaagggatcaattcaacaagaagagctaactgtcctaaatataaatgcacccaatacaggagcacccagattcataaagcaagcccttagagacctacaaagagacttagactcccacacaataataatgggagattttaacaccccactgtcaacattagacagatcaacgagacagaaagttaacaaggatatccaggaattgaactcagctttgcaccaagcagacctaatagacatttacagaactctccaccccagatcaaaagattatacattcttctcagcaccacatcacacttattccaaaattgaccacatagttggaagtaaagcactcctcgccaaatgtaaaagaacagaaattacaagaaactgtctctcagaccacagtgcaatcaaattagaactcaggattaagaaactcactcaaaagtgctcaactacatggaaactgaacaacctgctcctgaatgactactgggtacataatgaaatgaaggcagaaataaagatgttctttgaaaccaatgagaaccaagacacaacataccagaatctatgggacacatttaaagcagtgtgtagagggaaatttatagcactaaatgcccacaagagaaagcaggaaagatctaaaattgacatcctaacatcacaattaaaagaactagagaagcaagagcaaacacattcaaaagctagcagaaggcaagaaataactaagatcagagtagaactgaaggagataaagacacaaaaaacccttcaaaaaatcaatgaatccaggagctggttatttgaaaagatcaacaaaattgatagacaactagcaagactaataaagaagaaaagagagaagaatcaaatagatgcaataaaaaatgataaaggggatatcaccaccgatcccacagaaatacaaactaccatcagagaatactataaacacctgtatgcaaagaaactagaaaatctagaagaaatggataaattcctggacacatacaccctcccaagactaaaccaggaagaagttgaatccctgaatagaccaataacaggctctgaaattgaggcaataattaagagcctaccagccaaaaaaagtccaggaccagacggattcacagccgaattctaccagaggtgcgagaaggagctagcacaattccttctgagactattcaaatcaacagaaaaagagggaatcctccctaactcattttatgaggacagcatcatcctgttttaccaaagcctggcagagacaccacaaaaaaagagaattttagaccaatatccctga

SEQ ID NO: 125308 - DNA, 2745 bp, Homo sapiens
atggctgggtacccctctgagacgaaacttccagaggaacaatcaggcagcaacatttgccgttcaccaatattctctgttctgcagcctccgtggctgatacccaggcaaacagggtctggagtggacctccagcaaactccaacagacctgcagctgagggtcctcactgttagaaggaaaactaacaaacagaaaggacatccacaccaaaatcccatctgtacgtcaccatcatcaaagaccaaagaactagagaagcaagagcaaacattttcaaaagctagcagaaggcaagaaataactaagatcagagcagaactgaaggaaatagagacacaaaaaacgcttcaaaaaatcaatgaatccaggagctggttttctgaagagatcaacaaaattgagagaccgctagcaagactaacaaagaagaaaagagagaagaatcaaacagacaccataaaaaaagataagggggatatcaccactgatcccacagaaatacaaactaccatcagagaatgctataaacacctctatgcaaataaactagaaaatctagaagaaatggataaattcctggacacatacactctcccaagactaaaccaggaagaagttgaatctctgaatagaccaataacagcctctgaaactgaggcaataattaatagcttaccaaccaaaaaaagtccaggaccagatggatttacagctgaattctaccagaggtacaaggaggagctggtacaattccttctgaaactattccaatcaatagaaaaagagggaatcctccctaactcattttatgaggccagcatcatcctaataccaaagcctggcagagacacaacaaaaaaagagaattttagaccaatatccctgatgaacatcgatgtaaaaatcctcaataaaatactggcaaaccgaatccagcagcacatcaaaaagcttatccaccatgatcaagtgggcttcatccctgggatgcaaggctggttcaacatatgcaaatcaataaaggtaatccagcatataaacagaaccaatgacaaaaaccacatgattatctcaatagatgcagaacaggcctttgacaaaattcaacagtccttcatgctaaaaactctcaataaattaggtattgatgggacgtatctcaaaataataagagctatctatgacaaacccacagccaatatcatactgaatgggcaaaaactggaagcattccctttgaaaactggcacaagacaggggtgccgtctctcaccactcctattcaacatagtgttggaagttctggccagggcaatcaggcaggagaaagaaataaaggctattcaattaggaaaagagaaagtcaaattgtccctgtttgcagatgacatgattgtatatctagaaaaccccatcgtctcagcccaaaatctccttaagctgataagcaacttcagcaaagtctcaagatacaaaatcaatgtgcaaaaatcacaagcattcttatacaccaataacagacaaacagagagccaaatcatgagtgaactcccattcacaattgcttcaaagagaataaaatacctaggaatccagcttacagtggatgtgaaggacctcttcaaggagaactacaaacgactgctcaatgaaataaaaaagtatacaaataaatggaagaacattccatgctcatggataggaagaatcaatatcgtgaaaatggccatactgcccaaggtaatttatagattcaatgccacccccatcaagctaccaatgactttcttcacagaattggaaaaaactactttaaagttcatatgcaaccaaaaaagagcccgcattgccaagtcaatcctaagccaaaagaacaaagctggaggcatcatgctatctgacttcgaactatactacaaggcaacagtagccaaaacaacaaggtactggtacgaaaacagagatatagaccaatggaatagaacagagcactcagaaataataccacacatctacagctatctgatctttgacaaacctgacaaaaacaagaaatggggaaaggattccctatttaacaaatggtgctgggaaaactggctagccacatgcagaaagctgaaactggatcccttcctcacaccttatacaaaaattaattcaagatggattaaagacttacatgttagacctaaaactataaaaaccctagaagaaaacctaggcaataccattcaggacataggcataggcaaggacttcatgtctaaaacaccaaaagcaatggcaacaaaagccaaaattgacaaatgggatctaattaaacaaaagagcttctgcacagcaaaagaaactaccatcagagtgaacaggcaacctacagaatgggagaacatttttgcaacctactcatctgaccaagggctaatatccagaatctacaatgaactcaaacaaatttacaagaaaaaaacaaacaaccccatcaacaagtgggcgaaggatatgaacaaacacttctcaaaagaagacatctatgcagccaacagacacatgaaaaaatgctcatcatcactggccatcagagaaatgcaaatcaaaaccacaatcagataccatctcacaccagttagaatggcgatcattaaaaagtcaggaaacaacagcctgagacattcaggccagaagaacatcctggcatctgctgggggtcggaaggctttggggacagacgtgagctga

SEQ ID NO: 125309 - DNA, 1062 bp, Homo sapiens
atggcttttggcagcttcacctctgtggctatgcaggatacggcccccatcctggctgctttcatgggctggcaatctcgcagtgcacttgggacccaatcccaagaatctggaaaagggagtcctgaccaagtcctggtgccacaggactgtggcccatggcttgggagtgtagaactggtatctgtgcctggctctcaagcaggggaagaacccatactctcagaaaacaaggggcgggtcacacagatgaaaattccagaggaacgatcaggcagcaacatttgctgttcagcaatattcgctgttctgcagcctccgctgctgatacccaggcaaacacgatctggagtggacctccagcaaaatccaacagacctgcagctgagggtcctgactgttagaaggaaaactaacaaagagaaaggacatccacaccaaaaccccacctgtacgtcaccagcatcaaagaccaaaggagcactgagattcataaagcaagtccttagagacctagaaagagccttagactcccacacaataatgggagactttaacaccccactgtcaacattagacagatcaacgagacagaaagttaacaaggatatccaggaattgaactcagctctgcaccaagtggacctaatagacatctacagaactctccaccccaaatcaacagaatatacagtcttctcagcaccacatcacacttattccaaaattgaccacacagttggaagtaaagcactcctcagtaaatgtaaaagaatagaaattttaacaaactgtctctcagaccacagtgcaatcaaactagaactcaggattaagaaactcactcaaaaccactcaactacattgaaactgaacaacctgctcctgaatgactactgggtacataaggaaacaaaggcagaaataaagatggtctttgaaatcgacgagaacaaagacacaatataccagaatctctgggacacatttaaagcagtgtgtagagggaaatttatagcactgaaagcccacaagagaaagcaggaaagagtgacaccgtaa

SEQ ID NO: 125310 - DNA, 1887 bp, Homo sapiens
ttacaatttggcatgtttttgcagtggcttgtactggttgttcctttccatgtttagtgcttccttcaggagctcttttagggcaggtctggtggtgacaaaatctctcagcatttgcttgtctgtaaaggattttatttctccttcacttatgaagcttagtttggctggatatgaaattctaggttgaaaattcttttctttgagaatgttgaatattggcccccactgtcttctggcttgtagagtttctgccaagagatccgctgttagtctgatgggcttccctttgtgggtaacccgagctttctctctggctgcccttaacattttttccttcatttcaactttggtgaatctgacgattgtatgtcttggagttgctcttctcgaggagtatctttgtggcgttctctgtatttcctgaatttgaatgttggcctgccttgccagattggggaagttctcccggataatatcctgcagagtgttttccaacttggttccattctccccatcagtttcaggtacaccaatcagatgtagatttgatcttttcacatggtcccatatttcttggaggctttgttcatttctttttattcttttttctctaaatttctctgctcgcttcatttcattcatttgatcttccatcactgatagtctttcttccagttgatcaaatcggctactgaggcttgtgcattcatcacatagctctcgtgccatggttttcagctccatcaggtcctttaaggacttctctgcatcgggtattctagttagccattcgtctaattttttttcaaggtttttaacttctttgccattggctgaaacttcctcctttagctcggaatagtttgattgtcggaagccttcttctctcaccttgtcaaagtcattctccatccagctttgttccgttgctggtgaggagctcgttcctttggtctttgatgatggtgatgtatagatggggttttggtgtggatgtcctttctgtttgttagttttccttctaacagtcaggaccctcagctgcaggtctgttggagtttgctggaggtccactccagaccctgtttgcctgggtatcagaagcagaggcttattttcgatgactgcttctgtgcaagcttggagcatgcttaaatggtgagcaaaaaccagaaatttaagcgaatcattctgaagcatcatcttaatataatcctttacagcacctgccttggccttcagtgtccatcctgtccttgccaggcctgcatagcccagtctggcttcccgggcttggtcaccggttaggtttataccactgtcaccgatttgtggtcctcgactttcggatctccgaacctttccggaactcactttttcatgtctacggtgctccctgggaagatcctttaagggtttctccggcgtatacgatctcttaccattgggcaacccgtgtcggttctgcctttccctttggcgtacatgtgaccgctcaagacatttgcaccagtgtgttttggtttctgttttatcttcattgcttgtactgtacctgacacaaagtgggtacttaaatatatctgcaagtctaaagtcctctttggtgagaacactgtacatccgctgaggcagagctttggagtagggagcagggcgcggcacagtggtgcgcaaaatgaattcccggccagcagggggtgggaagtctgacacggagttctgccttctttcctctggggagcccattctcttcaattcctcctctggtggagtcatagctgcagccatttcaatcttgctgcttgttattggtctgttcagagtctctatttcttcctggtttaatctaggagtgttgtatatttccaggaatttatccat

SEQ ID NO: 125311 - DNA, 1431 bp, Homo sapiens
ttacaatttggcatgtttttgcagtggcttgtactggtttttcctttccatgtttagtgcttccttcaggagctctggtagggcaggtctggtggtgacaaaatctctcagcatttgcttgtctgtaaaggattttatttctccttcacttatgaagctcagtttggctggatatgaaattctgggttgaaaattcttttctttaagaatgttgaatattggcccccactctcttctggcttgtacagtttctgctgaaagatctgctgttagtctgatgggcttccctttgtgagtaacccgacctttctctctggctgcccttaacattttttccttcatttcaactttggtgaatctgacaattgtgtatcttggagttgctgttctcgaggagcatctttgtggcgttctctgtatttcctgaatttgaatgttggcctgccttgctagattggggaagttctcctggataatatcctgcagagtgttttccaacttggttccattctccccgtcactttcaggtataccaatcagacgtagatttggtcttttcacatagtcccatatttgttggaggctttgttcatttctttttattcttttttctctaaacttttcttcttgcttcatttcattcatttgatcttccatcgctgatacactttcttccaattgatcgcatcggctactgaggcttgtgccttcgtcatgcagctctcgtgccatggttttcagctccatcaggtcctttaagtacttttgtgcattggttattctagttagccattcgtctttggtctttgatgaaggtgacatacagatgggtttttggtgtggatgccctttctgtttgttagttttccttctaacagtcaggaccgtcagctgcaggtctgttggagattgctggaggtccactccagaccctgttttcctgggtatcagcagcggtggctgcagaacaacagatattggtgaaccgcaaatgctgctgcctgatcgttcctctggaagttttgtctcagaggagtacccatcaacatgtgggtgagtggttatgtcttctaggccgtaagtttccagcagggatggaagcgtgcacagccatgttgtgctcgtcttctgttctggaagcagcaacgctttcattctcagtccagcatagggcctgcactggtgggagctaaaagccgcagcagggaagggtctatccctctgagggtcgggaacataacggggctgcagcgttcggtcccttttgctcttctgagtgccctgcttcttgtcctgaccctggaacccaaccctgtgctcctggaacttacataccattcttttcctgtcaaacgtgagccttctgtgactcccagaaacagtagcatccatgtacctggagagcagcagccccaggtggcatcttcccat

SEQ ID NO: 125312 - DNA, 3264 bp, Homo sapiens
atggggcagcttatgtttctcactcaggtcctgaaaaatcaaggacaggaagactgcctatctaccagtgaggacccatcatatcttatcagcacctttacagtagggttgcctgatgtgaatatctgtacagtcagaaagggtcttcctggtgaccgagggcctcctggacctccagggatacgtggtcctccaggtcccccaggtggtgagaaaggtgagaagggtgagcaaggagagccaggcaaaagaggtaaaccaggcaaagatggagaaaatggccaaccaggaattcctggtttgcctggtgatcctggttaccctggtgaacccggaagggatggtgaaaaggggctgcagttatgggtcctcctggccctcctggatttcctggagaaaggggtcagaaaggtgatgaaggaccacctggaatttccattcctggacctcctggacttgacggacagcctggggctcctgggcttccagggcctcctggccctgctggccctcacattcctcctagtgacaaaggtgacacttgcttcaactgcattggaactggtatttcagggcctccaggtcaacctggtttgccaggtctcccaggtcctccagggcattccaggagctccaggtgctccaggctttcctggatctaaaggtgaacctggtgatatcctcacttttccaggaatgaagggtgacaaaggagagttgggttcccctggagctccagggcttcctggtttacctggcactcctggacaggatggattgccagggcttcctggcccgaaaggagagcctggtggaattacttttaagggtgaaagaggtccccctgggaacccaggtttaccaggcctcccagggaatatagggcctatgggtccccctggtttcggccctccaggcccagtaggtgaaaaaggcatacaaggtgtggcaggaaatccaggccagccaggaataccaggtcctaaaggggatccaggtcagactataacccagccggggaagcctggcttgcctggtaacccaggcagagatggtgatgtaggtcttccaggtgaccctggacttccagggcaaccaggcttgccagggatacctggtagcaaaggagaaccaggtatccctggaattgggcttcctggaccacctggtcccaaaggctttcctggaattccaggacctccaggagcacctgggacacctggaagaattggtctagaaggccctcctgggccacccggctttccaggaccaaagggtgaaccaggatttgcattacctgggccacctgggccaccaggacttccaggtttcaaaggagcacttggtccaaaaggtgatcgtggtttcccaggacctccgggtcctccaggacgcactggcttagatgggctccctggaccaaaaggtgatgttggaccaaatggacaacctggaccaatgggacctcctgggctgccaggaataggtgttcagggaccaccaggaccaccagggattcctgggccaataggtcaacctggtttacatggaataccaggagagaagggggatccaggacctcctggacttgatgttccaggacccccaggtgaaagaggcagtccagggatccccggagcacctggtcctataggacctccaggatcaccagggcttccaggaaaagcaggtgcctctggatttccaggtgatgatggcttgcagggtcagccaggacttcctggccctacaggagaaaaaggtagtaaaggagagcctggccttccaggccctcctggaccaatggatccaaatcttctgggctcaaaaggagagaagggggaacctggcttaccaggtatacctggagtttcagggccaaaaggttatcagggtttgcctggagacccagggcaacctggactgagtggacaacctggattaccaggaccaccaggtcccaaaggtaaccctggtctccctggacagccaggtcttataggacctcctggacttaaaggaaccatcggtgatatgggttttccagggcctcagggtgtggaagggcctcctggaccttctggagttcctggacaacctggctccccaggattacctggacagaaaggcgacaaaggtgatcctggtatttcaagcattggtcttccaggtcttcctggtccaaagctccaggcaactcagcacagagagactccatttgtttgggagaaagtaaaggaagagaacaagattctccatctggtaatgcagacaattcttttggatcttatacagaccacccaaaatggctgcaagaactacagcgttactggccttagggtgacccctaatgtggacacagcttcagtgactaaaaagttagatcacaacacccaagtcccttcaaatacctggaaagccttcccaaaaatgacaggttcgggggtacaggtgcaggtttgttacatgggtaaattgcatgtcactgaggtttggagtacaaaggatcccatcacccagcctaactgggacgcaacccccagtaggggcagactgacacctcacacggccgggtacccctctgagatgaaacttccagaggaacgatcaggcagtaacatttgctgttcaccaatattcactcttgtgcagcctctgctgctgatacccatgcaaacagggtctggagtggacctccggcaaactccaacagacctgcagctgagggtcctgactgttagaaggaaaactaacaaacagaaaggacatccacaccgaaaccccatctgtatgtcaccatcatcaaagaccaaagcaaggcaggccaacattcaaattcaggaaatacagagaacgccacaaagatactcctcgagaagagcaactccaagacacataattgtcagattcaccaaagttgaaatgaaggaaaaaaagctaagggcagccagagagaaaggtcgggttacccacaaagggaagcccatcagactaacagtggatctcttggcagaaactctacaagccagaagagagtgggggccaatattcaacattcttaaagaaaagaattttcaacccagaatttcatatccagccaaactaaacttcataagtgaagaagaaataaaatcctttacagacaagcaaatgctgagagattttgtcaccaccaggcctgccttacaagagctcctgaaggaagcactaaacatggaaaggaacaaccagtaccagccactgcaaaatcatgccaaattgtaa

SEQ ID NO: 125313 - DNA, 1251 bp, Homo sapiens
atgctcagaacgcgtaaagcaccccacagctgggtaaaatcatctagcaacacagtgcactatagagtatcagttgtttgccttcatgatcatgtaactgactgggagtggcagctcactgccactgcccgacatccaaagagagtatcacactacatattgtgggaccaggagaagaccaaaattaaaattcgaaaagatataatccgcatcctccccagtctagatgtcgaagtcaaagacatcactgattcttacgatgctaactggtttcttcagctgttatcaacagaagatctttttgaaatgactagtaaagagttccccatagtgactgaagtcatagaagcacctgaaggaaaccacctgccccaaagcattttacagcctgggaaaaccattgtgatccacaaaaagtaccaggcatcaagaatcttagcttcagaaattagaagcaattttcctaaaagacacttcttgatccccactagctataaaggcaagttcaagcggcgaccgagggagttcccaacggcctatgacctagagatcgctaagagtgaaaaggagcctcttcacgtggtggccaccaaagcgtttcattcccctcatgacaagctgtcatccgtatctgttggggaccagtttctggtgcatcagtcagagacgactgaagtcctctgtgagggaataaaaaaagtggtgaatgttctggcctgtgaaaaaatcctcaaaaagtcctatgaggctgcgctgctccctttgtacatggaaggaggttttgtagaggtgattcatgataagaaacagtacccgatttctgagctctgtaaacagttccgtttgcccttcaatgtgaaggtgtctgtcagggatctttccattgaagaggacgtgttggctgccacaccaggactgcagttggaggaggacattacagactcttacctactcataagtgactttgccaaccccacggagtgctgggaaattcctgtgggccgcttgaatatgactgttcagttagttagtaatttctctagggatgcagaaccatttctagtcaggactctggtagaagagatcactgaagagcaatattacatgatgcggagatatgaaagctcagcctcacatcccccacctcgccctccgaaacacccctcagtagaggaaacaaagttaaccctgctaaccttagcagaagaaaggacggtagacctgcccaagtctcccaagagaagaagataa

SEQ ID NO: 125314 - DNA, 2547 bp, Homo sapiens
atgtataacagccacatgtgtctggtaccaaatctctggggggagcacgtggatatgatcatcgtggcgcatgtattactcatccttttgggggccactgagatactgcaagctgacttacttcctgatgaaaagatttcacttctcccacctgtcaatttcaccattaaagttactggtttggctcaagttcttttacaatggaaaccaaatcctgatcaagagcaaaggaatgttaatctagaatatcaagtgaaaataaacgctccaaaagaagatgactatgaaaccagaatcactgaaagcaaatgtgtaaccatcctccacaaaggcttttcagcaagtgtgcggaccatcctgcagaacgaccactcactactggccagcagctgggcttctgctgaacttcatgccccaccagggtctcctggaacctcaattgtgaatttaacttgcaccacaaacactacagaagacaattattcacgtttaaggtcataccaagtttcccttcactgcacctggcttgttggcacagatgcccctgaggacacgcagtattttctctactataggtatggctcttggactgaagaatgccaagaatacagcaaagacacactggggagaaatatcgcatgctggtttcccaggacttttatcctcagcaaagggcgtgactggcttgcggtgcttgttaacggctccagcaagcactctgctatcaggccctttgatcagctgtttgcccttcacgccattgatcaaataaatcctccactgaatgtcacagcagagattgaaggaactcgtctctctatccaatgggagaaaccagtgtctgcttttccaatccattgctttgattatgaagtaaaaatacacaatacaaggaatggatatttgcagatagaaaaattgatgaccaatgcattcatctcaataattgatgatctttctaagtacgatgttcaagtgagagcagcagtgagctccatgtgcagagaggcagggctctggagtgagtggagccaacctatttatgtggtcccagaactcattgatgggaagacattcacagcgaccgtggtgggtttgaacccttgggttgaatatgaattccgcacagttgcagccaacgtgattgggattggggagcccagccgcccctcagagaaacggagaacagaagaagctctccccgaagtcacaccagcgaatgtcagtggtggcggaggcagcaaatctgaactggttataacctgggagacggtccctgaggaattacagaatggtcgaggctttggttatgtggtggccttccggccctacggtaaaatgatctggatgctgacagtgctggcctcagctgatgcctctagatacgtgttcaggaatgagagcgtgcaccccttctctccctttgaggttaaagtaggtgtcttcaacaacaaaggagaaggccctttcagtcccaccacggtggtgtattctgcagaagaagaacccaccaaaccaccagccagtatctttgccagaagtctttctgccacagatattgaagttttctgggcctccccactggagaagaatagaggacgaatacaaggttatgaggttaaatattggagacatgaagacaaagaagaaaatgctagaaaaatacgaacagttggaaatcagacatcaacaaaaatcacgaacttaaaaggcagtgtgctgtatcacttagctgtcaaggcatataattctgctgggacaggcccctctagtgcaacagtcaatgtgacaacccgaaagccaccaccaagtcaaccccccggaaacatcatatggaattcatcagactccaaaattatcctgaattgggatcaagtgaaggccctggataatgagtcggaagtaaaaggatacaaagtaggtaatttcttttttgcaaaggcacctaatcgtgctcctccgctgctgaaacccaggcaaacagggtctggagtggacctccagcaaactccagcagacctgcagctgagggtcctgactgttagaaggaacactaacaaacagaaaggacatccacaccaaaaccccatctgtacgtcaccatcatcaaagaccaaagaagttgaaaaccttgaaaaaaggttagacaaatggctaactagactaaccaatgtagagaagtccttaaatgacctgatggagctgaaaaccatggcacgagaactacatgacgaaggcacaagcttcagtagccaattcgatcagctggaagaaagggtacctgtgatggaagatcaaatgaatgaaatgaagcaagaagagaagtttagagaaaaaagaatgaaaagaaacgaacaaagcctccaagaaataagggactatgtgaaaagaccaaatctacgtctgattggtgtacctgaaagtgacggggagaatggaaccaagttggaaaacactctgcaggatattatccaggagaacttccccagcctagcaaggcaggccaacattcaaattcaggaaatacagagaatgccacaaagatag

SEQ ID NO: 125315 - DNA, 3111 bp, Homo sapiens
  misc_feature (1)...(3111): n = a,t,c or g
tcaacaagatggtgaattgactagtgggtagatccacaggacgggtgtggtcgccatgatcgcgtagtcgatagtggctccaagtagcgaagcgagcaggactgggcggcggccaaagcggtcggacagtgctccgagaacgggtgcgcatagaaattgcatcaacgcatatagcgctagcagcacgccatagtgactggcgatgctgtcggaatggacgatatcccgcaagaggcccggcagtaccggcataaccaagcctatgcctacagcatccagggtgacggtgccgaggatgacgatgagcgcattgttagatttcatacacggtgcctgacagtcaaagagccgaacgctgtgcactgggtccaggatgacttgcacaccctgttcactgcgcagtttccgaccaccatggacaggggaatcttggaacaccagtctcactcgatgatgccgcatgtccgtgctcacattgatagtaaacagagtaaatatcattcccatgacaatcggaataaagatgaaattgagggtggtgacctgcagtaggcagcagtcctggtctggattggtatgaacatcttcgtactgaacgggaggctgcaatcctcctgtacacttgctctttaacctaggggactgttttttgaacttgaagttgaattcccacattggttcctgtctgttcccaacaatctttctgcaccagaaaagtaagcatttggaattctttaatgtgctgggggtgctttctggaatggctggattcttggagattcgagcagcaaatggctcatacatatggtacagagatcggatcacacaagcccggagacagtgcagcttctccattgactctggtcgcagacgcaaaggcagggaagcatccagcgtgtagtgccttcggtacaacctggtccaaaaggcagcagtgcaagtgacagtccaggcattcttacaaatcagggaaaaattcacaatgtcctcaggacggatataggaggccagcaatagccaaatatccatgggatactcttctcctccagccccgtccagttcttctttgtgtctcttgcttttcttttttctggagacagttctctcatggatgttttcctcctgggcatccatctcatcactgctgtcgatgatgtcatagggctcaccagccccagaaagagcttcctctgcaggaacatgagaggcttccaagccacaaagagattttacttcctgccgaacagcgttgagctgatgcttttgcctcacaactcttaagattctttcctttgtcttgactttaagtaacctgatgattatgtgcctagagggtgttctttttgtgatgaatttcccaggtgttctttgagcttcttggatttggatgtctagatctctaacaaagccaaggaaattttcatcgattattagcgcaaatatgttttccagacttttagatttctcttcttcctttttttctgtggaacttttctgccacctccgggggcagatcgctttccagataaacttgagtttcacatactcctcttcttcatcttctgactctgcatcttcctccacagctactaagtgctgtccactaatatgcactggctctgaagcacacttcaaccgtaagatcaccagtggtgttatttcaaggcccccagaaaccattggctgtacagacattttcaaagttgccagtgttactttaatcggactgccttcataattcattgcctctgtttcaacaatatgcaatttatcctttgctccagtccctgaaatcaccgttcttaaagataactggtgctcattttcatcattattcaccttaaagtgataatctttgtcggccttttgttgacaactgaaaagatagttctggggcctcagagggctcatgtccatgtccatcaaatcttccatggggtggtgacacgcatcacctctaccagctctgccgacagccacattgtatgttggctccccaccttgactctttgtccggatgtccattgtgcagtcaccatcgacgtatagactatctctgatcactgagcatttcttcgcgccaagagtcaaaccgttggtaaagaaaccttcccggtcttttcctacaatcatatctatttctattggcgtaatgctctgaaagacgcccccggccgtggctgcccagacgtatttggcgtcgcagtagccgacaatggcggcctcctggcagcagccatcgcacatcaggttatccacgtagctctgccaaccggccatcttcgagcccttcgcattgnccacgacatcatgttcattaatttcattttctgcatcactactgtcagtatcttcattgtcgtcttcctcatagtctgaagattctgtcatgttctgatgtgagcgggattccgataaagccccaaatgactgggcactgacagaagctaaaggtctcagtaaaggggtatgttctgtcacttcattttcttcttgactactgtctgtgtcagagtctgaatcgccttgagaaggaacaactttttgcttgcacactggacaggtttttttggttttagttagccaagggtctacacacttgcagtgataagcatgggaacagggaaggattctgagtttgtctccatcttcatactcatccaaacaaatggcacatacatcatactcatctcctttggtctttgatgatggtgacgtacagatggggttttggtgtagatgtcctttctgtttgttagttttccttctaacagtcaggaccctcagctgcaggtctgttggagtttgctggaggtccactccagaccctgtttgcctgggtatcagcagcagaggtcgggaagtgcaaggggtcagggagttccctttcctagccaaagaaaggggtgatggacggaacctggaaaatcgggtcactcccacccgaatactgcgctttcccgacgggctagaaaaacggtgcaccacgagattatatcccacacctggctcggagggtcctacgcccacggagtctccctgattgctagcacagcagtcggagatcaaactgcaaggcagcagcgtggctgggggaggggcgcccgccat

SEQ ID NO: 125316 - DNA, 10136 bp, Homo sapiens
atgcacaaaagggagagctgtttatggtcaccagaactgcccccatctattaataatgatgaaaataataatagccgacaattactgggcatttactacacagccagtgacagcttccctggcaatgagagagggaatgggagcagcagtagttggagaagacatttcagtgaggacagctattcttcactgaaaagtctgccagcaaaattcatccccaagggaagcacaggtcttcctacactgagacagatgcccagcagcatgggacaggcacccagctggaatacagtcatcacggagggagccatcaaaggccacttggaccttgagatcaaagctgagtgttcaggatggcagaagggacagcagtctgagattgaactgcaaggtggcagcgaggctgggggcagggcacccaccaatgctgaggcttggcctccgctgctgatacccaggcaaacagggtctggagtggacctccagcaaactccaacagacctgccactgagggtcctgactgttaaaaggaaaactaacaaacagaaaggacatccacagcaaaaccccatctgtacgtcactatcatcaaagatgaaagaaatacaaactaccatcagagaatactataaacacctctatgcaaataaactagaaaatctagaagaaatggataaattcctcgacatacacaccctcccaagactgaaccaagaagaagttgaatctctgaatagaccaataacaggctctgaaactgaggcaataattaatagcttaccaactaacaaaagtccaggaccagatggattcacagctgaattctacgagaggtacaaggaggagctgataccattccttctgaaactattccaatcaatagcaaaagagggaatcctccctaactcattttatgaggccagcatcatcctgataccaaagtctggcagagacacacacacaaaaaagaattttagaccaatatccatgatgaacgtcgatgcaaaaatcctcaataaaatactggcaaaccaaatccagcagcacatcaaaaagtttatccaccatgatcaagtgggcttcatccctgggatgcaaggctggttcaatatacgcaaatcaataaatgtaatccagcatataaacagaaccaaagacaaaaaccacatgattatctcaatagatgcagtaaaggcctttgacaaaattcaacagcccttcatgctaaaaattctcaataaatttggtattgatgggaccccaaatctcattaagctgataagcaacttcagcaaagtctcaggacacaaaatcaatgtgcaaaaatcacaagcattcttatacaccaataacagacaaacagagagccaaatcatgagtgaactcccattcacaattgcttcaaagagaataaaatacctaggaatccaacttacaagggatgtgaacgacctcttcaaggaaaactacaaaccactactcaacgaaatagaagaggacacaaacaaatggaagaacattccatgctcatggataggaagaatcaatatcatgaaaatggccatactgcccaagatctattgttgcacaggatttctggctattacaagtcagttgcatcaagtaaattctgatttacttggctggtggctttgtgaacgacaattaccctcaggcgggctcaatggaaggccggagaaggtggatccttttcataccttatttggaattgctggattgtcacttttgggagaagaacagattaaacctgttaatcctgtcttttgcatgcctgaagaagtgcttcacagagtgaatgttcagcctgagctacattttatatttcaaaattacccaaagaaggagttgtcttcaaataaggaaacactaacggggtccccgctacaatttcggactccaggagactccacagagccgcccttcggtccaggtggtctctgcatccacctgtcctggcacgtcaggagctgcgggcgaccggagcagcagcagcagcagccttccctgccccgcgccaaactcccggccagctcaaggcaaggagtgattgggtggaggagtctccttgaggctagaggccggcagttcatggaggctcgggggcacgtgggtggtggttaccacagtgaagttgtgatttggttggggcgttcatactttggaaacaaaagagcttatgcagaaaacacagttgcatcaaattttacttttggtgcaagctcatcttctgcacgagatactaattatcctcaaacacttaaaactccattgtctactggaaatcctcagagatcaggttataagagctggacaccacaagtgggatattcagcttcatcctcatctgcgatttctgcacactccccatcagttattgtagctgttgtagaagggagaggacttgccagaggtgaaataggaatggcaagtattgatttaaaaaacccccaaattatactatcccagtttgcagacaacacaacatatgcaaaggtcacactgatgcaagaagtgaactcccatagccttgagcagctccacccttgtgcctttgcagggtacagccccctgaaccctgcagctgcttttaaggctggtgttgagtgtctgtggcttttccaggaacacaactcctcaccagcaagggaacaaaactggatgcagaatgagtttgacgacttgacagaagtaggcttcagaaggtcggtaataacaaacttctccaagctaaaggagcaggttctaacccatcaaaaggaagctaaaaaccttgaaaaaaaggtacaaagaggagctgggaccattccttctgaaactattccaatcaatagaaaaagagggagtcctctctaactcattttatgaaaccagcatcatcctgataccaaagcctggcagagacacaacaaaaaaagagaattttagaccaatatccctgatgaaccaattgatgcaaaaatcctcaataaaatactggcaaaccgaatccagcagcacatacaaaagcttatccactacgatcaagttggcttcatccctgcgatgcaaggctggttcaacatacacaaaatcaataaacataatccatcacaaaaacagaaccaacgacaaaaaccacatgattatctgaatagatgcagaaaaggcctttgacaaaattcaacaacacttcatgctaaaaactctcaataaattaggtattgatgggacatatctgacatatctcaaaataataagagctatttatgacaaacccacagccaatatcatactgaatgggcaaaaactggaagcattcccttttaagactggcacaagacagggatgtcctctctcaccactcctattcaacatagtgttggaagctctggccagggcaatcaggcaagagaaagaaataaagggtattcaattaggaaaagaggatgtcaaattgtccctgtttgcagatgacatgattgtatatttagaaaaccccatcgtctcagcccaaaatctccttaagctgataagcaacttcagcgaagtctcaggatacaaaatcaatgtgcaaaaatcacaagcattcctatacaccaataacagacagacagagagccaaatcatgagtgaactcccattcacaattgcttcaaagagaataaaatacctaggaatacaacttacaagggatgtgaaggacctcttcaaggagaactacaaaccactgctcaatgaaataaaagaggacacaaacaaatggaagaacattccatgctcatggataggaagaatcaatattgtgaaaatggccatactgcccaaggaatggggcttcctcagagctgaaatgtagtgattgttttgctcttatgagtctagccacccagcagagctccaggctggtgctgaagagtgtctgcaaagagtcctgtaatgttatctgtcttcaggtcttggcagccatggataccaccacctgctccagtggagcaatattcgatgttctgcagcctctgctgctgatacccaggcaaacggggtctggagtggacctccagcaaactccaacagacctgcagctgagggtcctgactgttagaaggaaaactaacaaacagaaaggacatccacaccaaaaccccatctgtacgtcaccatcatcaaagaccaaagaactagagaagcaagagcaaacacattcaaaagctagcagaaggcaagaaataactaagatcagagcaggactgaaggagttagagacacgaaaaacccttcaaaaaatcaatgaatccaggagcttgttttttgaaaagatcaacaaaattgatagaccactagcaagactcataaagaacaaaagagagaagaatcaaatagacgcaataaaaaatgataaaggagatatcaccaccaatcccacagagatacatactaccgtcagagaatactataaacacctctacgcaaataaactagaaaatctagaagaaatggataaattcctggacacatccaccctcccaagactaaaccaggaagaagttgaatctctgaatagaccaatcacaggctctgaaattcaggcaataattaatagcctaccaaccaaaaaaagtccagtacctgacggattcacagccaaattctaccagaggtacaaggcagagctcgtaccattccttctgaaactcttccaatcaatagaaaaagtgggaattctccctaactcattttacgaggccagcatcatcctaataccaaagcctggcagagacacaacaaaaaatgataattttagactaatatccctgatgaacatcgatgcaaaaatcctcaataaaatactgggaaaccgaattcagcagcacatcaaaaaacttatccaccatgatcaagtgggcttcatccctgggatgcaaggctggttcaacatatgcaaatcaataaacataatccagcatataaacagaaccaatgacaaaaatcacatgattatctcaatagatgcagaaaaggcctttgacaaaattcaacaacccttcatgctaaaaactctcaataagttaggtattgatcggacgtatctcaaaataataagagctatctatgacagacccacagccaatatcatactgaatgggcaaaaaatggaagcattccctttgaaaactggcacaagacagggatgccctctctcaccactcctattgaacacagcgttggaaattctggccagggcaatcaggcaggagaaggaaataaagggtactcaattaggaaaagaggaagtcaaattgtccctgttttcagatgacatgattgtatatctagaaaaccccattgtctcaacccaaaatctccttaagctgataagcaacttcagcaaagtctcaggatacaaaatcaatgtgcaaaaatcacaagcattcttatacaccaataacagacaaacagagagccaaatcatgagtgaactcccattcacaattgcttcaaagagaataaaatacctaggaatccaacttacaagggatgtgaaggacctcttcaaggagaactgcaaaccactgctcaacgaaataaaagaggttacaaacaaatggaagaacattccatgctcatggataggaagaatcaatatcatgaaaatggccatactccccaagaggactccattattatcgctgcctagtacattatatgaggagctgtggagacttaggtcctacttcccattgtgccctcaactttacaacatggagcagaataccacagactgggtaatttataaagaacagtgcatttggctcacagctctggagactggggagtccaagagcactgcaccagcatttggcaagggttatcccatggcagaatacatcatatggggcagattgacacctcacatggctggctactcctctgagacaaaacttccagaggaacgatcaggcagcaacatctgctgttcaccaatatccgctgttctgcagcctctgctgctgatacccaggcaaacagggtctggagtggacctccagcaaactccaacagacctgcagctgagggtcctgactgttagaaggaaaactaacaaacagaaaggacatccacaccaaaaccccatctgtacgtcaccatcatcaaagaccaaaggatcaaattcacacataacaatattaaccttaaatgtaaatgggctaaatgctccaattaaaagacacagactggcaaattggataaagagtcaagacccatcagtgtgctgtattcaggagacccatctcacgtgcagagacacacacaggatcaaaataaagggatggagggagatctaccaagcaaatggaaaacaaaaaaaggcaggggttgcaatcctagtctctgataaaacggactttaaaccaacaaagatcaaaagagacaaagaaggccattacatgatggtaaagggatcaattcaacaagaagagctaactaccctaaatatatatgcacccaatacaggagcacccagattcataaagcaagtccttagagacctacaaagagacttagactcccacacattaataatgggagactttaacaccccactgtcaacattagacagatcaacgagacagaaagttaacaaggatatccaggatttgaactcagctctgcaccaagtggacctaatagacatctacagaactctccaccccaaatcaacagaatatacattcttctcagcactacaccacatttattccaaaattgaccacatagttggaagtaaagcactcctcagcaaatataaaacaacagaaattataacaaactgtctctcagaccacagtgcaatcaaactcgaactcaggattaagaaactcactcaaaaccgctcaactacatggaaactgaacaacctgctcctgaatgactactgggtacataacaaaatgaaggcagaaataaatacattatttgaaaccaacgagaacaaagacacaacataccagaatctctgggacacattcaaagcagtgtgtagagggaaattcatagcactaaatgcccacaagagaaagcaggaaagatctaaaattgacaccctaacatcacaattaaaagaactagagaagcaagaacaaacacattcaaaagctagcagaaggcaagaaataactaagatcagagcaaaactgaaggaaatagagacacaaaaaatccttcaaaaaatcaatgaatccaggagctggttttttgaaaagatcaacaaaattgatagaccactagcaagaccaataaagaagaaaagagagaagaatcaaatagatgcaataaaaaatgataaaggggatatcaccactgatcccacagaaatacaaactaccatcagagaatactataaacacctctatgcaaataaactagaaaatctagaagaaatggataaattcctcaacacatacaccctcccaagactaaaccaggaagaagttgaatctctgaataaaccaataacaggctctgaaattgaggcaataattaatagcttaccaatcaaaaaaagtccaggaccagatggattcatagccaaattccaccagaggtacaaggaggagctggaggccagcatcatcctgataccaaagcctggcagagacacaaccaaaaaagagaattttagaccaatacccctgatgaatattgatgcaaaaatcctcaataaaatactggcaaaccgaatccagcagcacatcaagaagcttatccaccatgatcaagtgggcttcatccctgggatgcaaggctcgttcaacatatgcaaatcaataaacgtaatccaggatataaacagaacgaatgacaaaaaccatatgattatctcaatagatgcagaaaaggcctttgacaaaattcaacaacccttcattctaaaaactctcaataaattaggtattgatgggacgtatctcaaaataataagagctatctatgacaaacccacagccaatatcatactgaatgggcaaaaactggaagcattccctttgaaaactggcacaagacaggggtgccctctctcaccactcctattcaacatagtgttggaagttctggccagggcaatcaggcaggagaaggaaataaagggcattcaattaggacaagaggaagtcaaattgtccctgtttgcagatgacatgattgtatatcgagaaaaccccatcgtctcaacccaaaatctccataagctgataagcaacttcagcaaagtctcaggatacaaaatcaatgtgcaaaaatcacaagcatttttatacaccaataacagacaaacagagagccaaatcatgagtgaactcccattcacaattgcttcaaagagaataaaatacctaggaatccaacttacaagggatgtgaaggatctcttcaaggagaactacaaaccactgctcaaggaaataaaagaggatacaaacaaatggaagaacattccatgctcatgggtaggaagaatcaatatcgtgaaaatggccatactgcccaaggtaatttatagatttaatgccatccccatcaagctaccaatgactttcttcacagaattggaaaaaactactttaaagttcatatggaaccaaaaaagagcccgcattgccaagtcaatcctaagccaaaggaacaaagctggaggcatcacactacctgacttcaaactatactacaaggctacagtaaccaaaacagcatggtactggtaccaaaacagagatatagaccaatggaacagaacggagccctcagaaataatgccacatatctacaaccatctgatctttgacaaacctgacaaaaacaagaaatggggaaatgattccctatttaataaatggtgctgggaaaactggctagccatatgtaggagaaagctgaaactggatcccttccttacaccttatacaaaaattaattcaagatggattaaagacttaaatgttagacctaaaaccataaaaaccctagaagaaaacctaggcaataccattcaggacataggcatgggcaaggacttcatgtctacaacaccaaaagcaatggcaacaaaagccaaaattgacaaatgggatctaattaaactaaagagcttctgcacagcaaaagaaactaccatcacagtgaacaggcaacctacagaatgggagaaaatttttacaatctacccatctgacaaagggctaatatccagaatctacaaagaactcaaacaaatttacaagaaaagaacaaacaaccccatcaacaagtgggtgaaggatatgaacagacacttctcaaaagaagacatttatacagccaaaaggcacatgaaaaaatgctcatcatcactggccatcagagaaatgcaaatcaaaaccacattgagataccatctcataccagttagaatggcgatcattaaaaagtcaggaaacaacagaccaagctccaatgtcttctctgtgaaactttctgagatccaatccttggctctcatagagactaggtgcttaatgaatgctgatgaacagggtgtgccactgattcaagaaatgctggaatcttgggcaagtatttgcaaagttcccaagtatccaaatgccgaagcagtgcggccagaagagcaaacaccccacctgcacccaggtgaaataaacagccatgttgctcacacaaagcttgtttggtggtctcttcacacggacacgcatgaaatttggtgccgtgactcggatcgggggacctcccttgggagatcaatcccctgtcctcctgctctttgctccgtgagaaagatccacctacgacctcaggtcctcagaccgaccagcccaagaaacatctcaccaatttcaaatccgcacacaagaacttccaaacgcctgaaccgcagcggccaggcgttcctccagaacctccttccccaggagcttgctacaagtgccagaaatctgaccaccaggccaaggaatgcctgcagcccaggattcctcctaagccgtgtcccatctgtgcgggaccccactggaaattggactgttcagctcacctggcagccactctcagagcccctggaactctggcccaaggctctctga

SEQ ID NO: 125317 - DNA, 2250 bp, Homo sapiens
atgccattttatagtgagcagacttatattaaggagccagccatacagagatttgaggaagtacattttaggcagaataaaggagcagatggtgctcagatgtggaggatccaggtgtgctggctaacgggactcaagagaagtagggagcctctgctgctgatgcccaggcaaagagggtctggagtggacctccagcaaactccaacagacctgcagctgaggatcctgatggttagaaggaaaactaacaaacagaaaggacatccacaccaaaaccccatctgtacgtcatcatcaacaaagaccaaagaactggagaagcaagagcaaacaaattcaaaagctatcagaaggcaagaaataactaagatcggagcagaactgaaggaaatagagacacaaaaaacccttcaaaaattcaatgaatccaggagctggttttttgaaaagatcaagaagattgatagaccgctagcaagactaataaagaagaaaacagagaagaatcaaatagatgcaataaaaaatgataaaggggatatcaccaccgatcacccagaaatgcaaactaccatcagagaatactgtaaacacttctacgcaaataaactagaaaatctagaagaaatggataaattcctggacacatacaccctcccaagactaaagcaggaagaagttgaatctctgaataggccaataacaggctctgaaattgaggcaataattaatagcttaccaaccaaaaaaattccaggaccagatggattcacagccaaattctaccagaggtacaaggaggagcttgtaacattccttctgaaactattccaaacaatagaaaaagagggcaatcctaagcaaaaagaacaaactggaggcatcgcactacctgacttcaaactatactacaaggctacaggaaccaaaacagcatggtactggtaccaaaacagatatatagaccaatgaaacagaatagaggcctcagaaataacacgatcagacagcaacatttgctgttcagcaatactcgctgttctgcagccactgctgcctgatacccagacaaacagggtctggagtggacctccagcaaactccaacaggcctgcagctgagggtcctgactgttagaaggaaaactaacaaacagaaaggacatccacaccaaaaacccatctgtacgtcaccatcatcaaagaccaaaggtagataaaaccaccaagatggggaaaaaaacagagcagaaaaactggaaactctaaaaatcagagcgcctctcctcctccaaaggaacgcagctcctcaccagcaatggaacaaagctggacggagaatgactttgacgagttgagagaagacagcttcagacgatcaaactactccgagctacaggaggaagttcgaacccatggcaaagaagttaaaaaccttgaaaaacaattagacgaatggctaactagaataaccaatgcagagaagtcctcaaaggaccggatggagctgaaaaccaaggcacgagaactacatgacgaatgcacaagcctcagtagccgatgcgatcaactggaagaaagggtatcagtgacagaagatgaaatgaatgaaatgaagcgaggagagaagtttagagaaaaaagaataaaaagaaacgaacaaagcctccaagaaatatgggactatgtgaaaagaccaaatctatgtctgattggtgtacctgaaagtgatggggagaatggaaccaagttggaaaacactttgcaggatattatccaggagaacttccccaatctagcaaggcaggccaacattcagattcaggaaatacagagaatgccacaaagatactcctcgagaagagcaactccaagacacataattgtcagattcaccaaagttgaaatgaaggaaaaaatgttaagggcagccagagagaaaggtcaggttacccacaaagggaagcccatcagactaacagctgatctctcggcagaaaccccacaagccagaagagagtggggaccaatattcaacattcttaaaggaaagaattttcaacccagaatttcatatccagccaaactaagcttcataagtgaaggagaaataaaatattttacagacaagcaaatgctgagagattttgtcaccaccaggtctgccctaaaagagctcctgaaggaagcactaaacacggaaaggcacaaccggtaccagtcactgcaaaaacatgccaaattgtaa

SEQ ID NO: 125318 - DNA, 5421 bp, Homo sapiens
tcatgatttggctgtttgtctgttattggtgtataaaaatgcttgtgatttttgcacattgattttgtatcctgagactttgctgaagttgcctatcagcttaaggagattttgggctgagacaatggggttttctagatatacaatcatgtcaactgcaaacagggacaatttgacttcctcttttcctaattgaataccatttatttccttctcctgcctgattgccctggccagaacttccaacactatgttgaataggagtggtgagagagggcatccctgtcttgtgccagttttcaaagggaatgcttcctgtttttgcccattcagtatgatattggatgtgggtttgtcatagatagctcttattatttggagatatgtgccatcaatacctaatttattgagaatttttagcatgaagcgttgttgaattttgtcaaaggacttttctgcatctattgagacaatcatatgatttttgtcattgtttctgtttatatgctggattatgtttattgatttgcgtattttgaaccagtcttgcatcccagggatgaagcccacctgatcatagtggacaaactttttgatgtgctgctgaattaggtttgccattgttttattgaggattttagcatcgatgttcatcagggatattggcctaaaattctctttttttgttgtgtctctgccaggcttttgtatcaggatgatgctggcctcataaaatgagttagggaggattccctctttttctattgattggaatagtttcagaaggaatggtactagctcctccttgtacctctggtagaattcggctgtgaatccatctggtcctcgactttttttggttggtaagctattaactattgcttcaatttcagagcctgttattggtccattcagagattcaacttcttcctggtttagtcttgggagggtgtatgtgttgaggaatttatccatttcttctagattttctagtttatttgcatagaggtgtttatagtactctctgatggtagtttgtatttctttggtctttgatgatggtgacatacagatggggttttggtgtggatgtcccttctgtttgttagttttccttctaacagtcaggaccctcagctgcaggtctgttggagtttgcttttggtccactccagaccctgtttgcctgggtatcagcagcagaggctgcagaacagttaatactggtgagcagcaaatgttgctgcctgaacgttcctctggaagttttttctcagaggagtacctggccatgtgaggtgtcagtgtgcccctactgtggggtgcctcccagttaggatacttgggggtcatggacccacttgcggaggcagtctgtccattctcagatctccagctgcattctgggagaacctctactgtcttcaaagctgccttgggccagagtggagcccactgccctgaaaggtgtgtctcagcacagtcataagctgactgaagagccttaagagaacataagcagtagtttggcagtactctctgtggacctgtgatggtggtagccatggagttaggctcttccacaatggtagaactagtttccagtcccgccaacagtgtaaaagtgttcctatttctccacatcttctccagcacctgttgtttcctgactttttcataatcgccattgtaactggtgtgagatggtatctcactgtggttttgatttgcatttctctgatggccagtgaggatgagcattttttcacgtgtctgttggctgcataaatgtcttctttcgagaagtgtctgttcataccctttggccactttttgattgggttgtttggtttttttcttgtaaatttgtttgagttctttgtagattctggatattagccctttgtcagataagtagattgcaaaaatgttctcccattctgtaggttgcctattcactctgatggtagtttctcttttgctgtgcagaagctctttagtttaattagatcccatttgtcaattttggcttttgttgccattgcttttggtgttttagacatgaagtccttgcccatgcctatgtcctgaatggtattgcctaggttttcttctagggtttttatggtttttgatctaacatttaagtctttaatccatcttgaattaatttttgtataaggtgtaaggaagggatccagtttcagctttctacatatggctagccagttttcccagcaccatttattaaatagggaatcctttccccatttcttgtttttctcaggtttgtcaaagatcagacagttgtagatacatggcattatttctgagggctctgttctgttccattggtctatatctctgttttggtaccagtaccatgctgttttcgttactgtggccttgtagtatagtttgaagtcaggtagcatgatgcctccagctttgttcttttggcttatgattgacttggcaatgcgggctcttttttggttccatatgaattttaaagtagtgtttttccaattctgtgaagaaggttattggtagcttggtggagatggcattgaatctacaaattaccttgggcagtatggccattttcacaatattgattcttcctatccatgagcatggaatattcttccatttgtttgtgtcctcttttattttgttgagcagtggtttgtagttctctttgaagaggtccttcacatcccttgtaagttggatttgtaggtattttattatctttgaagcaattgtgaatgggggttcactcatgatttggctctctgtttgtctgttattggtatataggaatgcttgtgatttttgcacattgattttgtatcctgagactttgctgaagttgcttatcagcttaaggagattttgggctgagacaatggggttttctaaatatacaatcatgtcatctgcaaacagggtcaaaacagaagtcaaaaaaaatttgacttcctcttttcctaattgaatgccctttatttccttctcctgcctgattgccctggccagaacttccaacactatgttgaataggggtggtgagagagggcatccctgtcttgtgccagtttccaaagggaatgcttccagtttttgtccattcagtatgatattggctgtgggtttgtcatagatagctcttattattttgagatacgtcccatcaatacctaatttattgagagtttttagcatgaagcgctgttgaattttgtcaaaggccttttctgcatttattgagataatcatgtggtttttgtatttggttctgtttatatgttgatcatggtggataagctttttgatgagttgttggattcggtttgccagtattttattaaggatttttgcatcaatgttcatcaaggatattggtctaaaattctctttttttgtagtgcctctgccaggctttggtatcaggatgatgcagacctcataaaatgagttagggaggattccctctttttctattgattggaatagtttcagaaggaatggtaccagctcctccttgtacctctggtagaatttggctgttaatccatctggtcctggactttttttggttggtaagctattaattattgcctcaatttcagagcctgttattggtctattcagagattcaacttcttcctggtttagtcttgggagggtgtatgtgtcgaggaatttatccatttcttctagattttctagtttatttgcgtagaggtgtttatagtgttctctgatggtagtttgtatttctgtgggatcagtggtgatatcccgtttgtcattttttattgcgtctatttgattcttctctcttttcttctttattagtcttgctagccgtctatcaattttgttgaacttttcaaaaaaccagctcctggattcattgattttttgaagggttttttgtgtctctatttccttcagttctgctctgatcttagttatttcttgccttctgctaacttttgaatgtgtttgctcttgcttctctagttcttttaattgtgatgttagggtgtcaattttagatccttcctgctttctcttgtgggcatttagtgctataaatttccctctacacactcctttgaatgtgtcccacaaattctggtatgttgtgtctttgttcccattggtttcaaagaacatctttatttctgccttcattttgttatgtacccagtagtcattcaggagcacgttgttcagtttccatgtagttgagcggttttgagtgagttttttaatcctgagttctagtttgattgcactgtggtctgagagacagtttgttataatttccattcttttacatttgctgaggagtgctttacttccaactatgtggtcaattttggaataggtgtggtgtggtgctgaaaagaatgtatattctgttgatttggggtggagagttctgtagatgtctattaggtctgcttgctgcagagctgacttcaattcctggatatccttgttaactttctgtctcattgatctgtctaatgttgatattggggtgttaaagtctcccattattattatgtgggagtctaagtctctttgtaggtcactaaggacttgttttatgaatcttggtgcttctgtattgggtgcatatatatttaggatagttagttcttcctgttgaattgatccctttaccatgatgtaatggccttctttgtctcttttgatctttgttggtttaaagtctttggtctttgatgatggtgacatacagatgggtttttggtgtggatgtcctttctgtttgttagttttccttctaacagtcaggaccctcagctgcaggtttgttggagtttgctggaggtccactccagaccctgtttgcctgggaatcagcagcggtggctgcagaacagcggatattggtgaaccgcagatgctgctgcctgatcgttcctctggaagttttgtctcagaggagtatctggccgtgtgaggtgtcagtctgcccttattgcactgtattaaaacgatgcattcatgtggccacctctccttcatggtaagcaccgtatctccttcacctccttctccataacacagcacagcctctgaaatgaagccagtcttcagcaagtgctttgatgaacagtaaattttgaagcagctcttgaagactcccttgaggtccattttcttttgctgaagcccaaagaggtggggaatatagggaaagtccttctctaggttcccatgggaacagacattgccctttttctcctcctccaacctttgagtccaacctccgagtccaacctccatcctgatgctaccaccatctggatctctccattcaagtgaccagagaagctcacccttcacttcattcaggtgtctgctcagattcat

SEQ ID NO: 125319 - DNA, 4162 bp, Homo sapiens
  misc_feature (1)...(4162): n = a,t,c or g
atgagccgaagcagggcgaggcatcgcctcacctgggaagcgcaaggggtcagggaattccctttcctagtcaaagaaaggggtgacaggcagcaactggaaaatcaggtcactctcaccctaatactgcgctttcccaacggtcttagcaaacggcacaccaggagattatatcctgcgcctggcctggagggtcctacgcccacagagccttgctcactgccagcacaggagtctgagatcaaactgcaaggtggcagcgaggctgcgggaggggcgcccacctttgccgaggctcgacctccactgctgatacccaggcaaacagggtctggagtggacctccagcaaactccaacagacctgcagctgagggtcctgactgttagaaggaaaactaacaaacagaaaggacatccacaccaaaaccccatatgtacatcaccatcatcaaagaccaaagacagatcaatgagacagaaagttaacaaggatatccaggaattgaactcagctctgcaccaagcagacctgatagacatctacagaactctccaccccaaatcaacagaatatacattcttctcagaaccacaccacacctgttccaaaattgaccacatagttggaagtaaagctctcctcaggaaatgtaaaagaacagaaattataacaaactgtctctcagaccacagtgcaatcaaactagaactcaggattaagaaacgcacgcaaaaccgctcaactacatggaaactgaacaacctgctcctgaatgactactgggtacataacgaaatgaaggcagaaataaagatcttctttgaaaccaaagagaacaaagacacaacataccagaatctctgggatgcattcaaagcagtgtgtagagggaaatttattagcactaaatgcccacaggagaaagcaggaaagatctaaaattgacacactaacatcacaattaaaaggaccagagaagcaagagcaaacacattcaaaaactagcagaaggcaagaaataactaagatcagagcagaactgaaggagagggtcgggcgctggagaataggtgaagcagcggatttagttggggtttcttctcaggctatcagagatgccgagaaagcagggcgactaccgcacccggatatggaaattcgaggacgggttgagcaacgtgttggttatacaattgaacaaattaatcatatgcgtgatgtgtttggtacgcgattgcgacgtgctgaagacgtatttccaccggtgatcggggttgctgcccataaaggtggcgtttacaaaacctcagtttctgttcatcttgctcaggatctggctctgaaggggctacgtgttttgctcgtggaaggtaacgacccccagggaacagcctcaatgtatcacggatgggtaccagatcttcatattcatgcagaagacactctcctgcctttctatcttggggaaaaggacgatgtcacttatgcaataaagcccacttgctggccggggcttgacattattccttcctgtctggctctgcaccgtattgaaactgagttaatgggcaaatttgatgaaggtaaactgcccaccgatccacacctgatgctccgactggccattgaaactgttgctcatgactatgatgtcatagttattgacagcgcgcctaacctgggtatcggcacgattaatgtcgtatgtgctgctgatgtgctgattgttcccacgcctgctgagttgaatgactacacctccgcgagggaggnggaaaactctgactcaacacagcagtcacctgaaaatatttcccaaactcttcctcaaagggagctgctaccatattcagagtacctgaacacagtcgcgtacattatggagcctcaccaaatgcctcttggactaaattactcagggaaggaggaggaagagaatgagtggaagctgactttctcaagggattttgccgatttcggaaccaccatcaaacaggattttcgcctgctggggcaaaccagcgtggaccgcttgctgcaactctctcagggccaggcggtgaagggcaatcagctgttgcccgtctcactggtgaaaagaaaaaccaccctggcgcccaatacgcaaaccgcctctccccgcgcgttggccgattcattaatgcagctggcacgacaggtttcccgactggaaagcgggcactcgagacagcattcagcacgaagtggtttactaaaagccaatgtgctagaaaacttcagacagggacgttactcacacttttatggtggtataggatgtggaagtccaaatcatcccctggctggctctgtgtggataggggattctgggtacaagggtggcagaatgctgctgaacatttcaggaggagcgactcaagccttcgcgaaagaaaataaccaaaaagcatacaaagaaacgtacggcgtctctcatattacacgccatgatatgctgcagatccctaaacagcagcaaaacgaaaaataccaagtgcctcaattcgatcaatcaacgattaaaaatattgagtctgcaaaaggacttgatgtgtgggacagctggccgctgcaaaacgctgacggaacagtagctgaatacaacggctatcacgttgtgtttgctcttgcgggaagcccgaaagacgctgatgacacatcaatctacatgttttatcaaaaggtcggcgacaactcaatcgacagctggaaaaacgcgggccgtgtctttaaagacagcgataagttcgacgccaacgatccgatcctgaaagatcagacgcaagaatggtccggttctgcaacctttacatctgacggaaaaatccgtttattctacactgactattccggtaaacattacggcaaacaaagcctgacaacagcgcaggtaaatgtgtcaaaatctgatgacacactcaaaatcaacggagtggaagatcacaaaacgatttttgacggagacggaaaaacatatcagaacgttcagcagtttatcgatgaaggcaattatacatccggcgacaaccatacgctgagagaccctcactacgttgaagacgagggatcctntagaggattttgccgatttcggaaccaccatcaaacaggattttcgcctgctggggcaaaccagcgtggaccgcttgctgcaactctctcagggccaggcggtgaagggcaatcagctgttgcccgtctcactggtgaaaagaaaaaccaccctggcgcccaatacgcaaaccgcctctccccgcgcgttggccgattcattaatgcagctggcacgacaggtttcccgactggaaagcgggcagtgagcgcaacgcaattaatctctgaatcatttctcctggaaaacccagatgacctggctgacagcttcgtgtttctactgaaacctggtattccaacagacctgcagctgagggtcctgtctgttagaaggaaaactaacaaacagaaaggacatccacaccaaaaacccatctgtacatcaccatcatcaagaccaaaagtagataaaaccacaaagatggggaaaaaacagaacagaaaaactggaaactctaaaatgcagagcgcctctcctcctccaaaggaacgcagttcctcaccagcaacggaacaaagctggatggagaatgactttgacgagctgagagaagaaggcttcagacgatcaaattactccgagctacgggaggacattcaaaccaaaggcaaagaagttgaaaactttgaaaaaaatttagaagaatgtataactagaataaccaatacagagaagtgcttaaaggagctgatggagctgaaaaccaaggctcgagaactacgtgaagaatgcagaagcctcaggagccgatgcgaccaactggaagaaagggtatcagcaatggaagatgaaatgaatgaaatgaagcgagaagggaagtttagagaaaaaagaataaaaagaaatgagcaaagcctccaagaaatatgggactatgtgaaaagaccaaatctacgtctgattggtgtacctgaaagtgatggggagaatggaaccaagttggaaaacactctgcaggatattatccaggagaacttccccaatctagcaaggcaggccaacgttcacattcaggaaatatag

SEQ ID NO: 125320 - DNA, 1074 bp, Homo sapiens
atggcctgcacgctgtcagttctctgtcccaccttaggggccgggtggcaaagagggtctttggtgcaatgctgccaagtcgctgtttctgggtctcctgccctgcaccccctccccactgtcctgtctcagcagccgtgtgataggggctgttacacggtgatcctcaacaccttcgagacctacgtctacttggccggagcccttgccatcggggtactggccatcgagccccagtgttcccacccgaaatggagctgggccctccttgaagtgtttagcatgcagttgctgaatccccaaatctccaacagcaataaggaggcacagattttcctggaggttgtgcgggagaccaacgagagagacacaggctggctgggcggggcctgcctgctggccatcggcatctgggtcatggtggaccccaccggcttccgggagatcgtggctgccaatcctctgctcctcacgggcgcctacatcctcctggccatggggggcctgctctttctgctcggcttcctgggctgctgcggggccgtccgtgagaacaagtgtctgctgctattttccccttttgtggaacaaaagttcttctgttttctgttccttatcccatacctcagtgacctgtgccccggggactgggagaagatcaccctggctcattccccagatgaacaaagctctgaagcaatggagagcctggggccagagggcacgaggatttcctggctcagcaccccagctgtccagagagcatcagcaggggcccgatcctgtgtccttgcctgggttctctgtttccagctgatcagggcagatgaacaggaaggggaaactgaggcaccaagttacctgtgcttccctgctgccagaaggagctttccagaaagcacatgtcaccacagccctctcttgctggaacccaacctctacaggagaccaagctgcctcctacagaccacaggacctccaagactcaccatcgccacctcttgttattcctgccctgactttcctatcaccaccatcaaaggagagtcccccagaggtcttcctgaggcctga

SEQ ID NO: 125321 - DNA, 1501 bp, Homo sapiens
  misc_feature (1)...(1501): n = a,t,c or g
atgggaataatcggggaagtggttggcaatgcagatgccaagacctcgccccacaacactggatcagtgggtctggtgtggagcccaggtatcagcattataggacgatacccaagaggccgggctggaggagaagatggcggccaacagcccccgcctctgatgaagaagcacagccagacggacctcgtgagccgcctgaagacccgcaagatcctcggcgtgggcggggaggatgacgacggggaggtgcatcgctccaagatcagccaggtcttaggcaatgaaatcaagtttaccattcgggagcctttggggctcagggtctggcagttcgtctctgctgtgctcttctccggcattgccatcatgctctatgatgcggtctttgatggagcccaggtgaccagcaagacccccatccgcctctacgggtgccctcctcaatgctgcgcccacaccccggcctctgatgaagctctctgctggggatgtgctgccatcttgtggccattggtggaatacacccagtgggttggagcttgcagtcgccaccatctgcaaggagcgctcataagggacttccttaaagcgagtccttaccgggctcaggttttctgtctgggagtccgtgtaaaagaaaacccaatcataggaccaggcatctccctgatcatgtggaacgctctctacacggctgagaaggtcatcattcgatggaccctgctcaccgaagcttgctatttcggggtccagttcttgggctgggaacctcccatttgcctaaggatctccttaccccccatcaccaagcacagcccacatttcaccagccagcaaaatgcaaatgtcattagcgctctgcaagctgctcacccgagaattcttcaccaaggagctcaccaagcactaccagggcaataacgacacagacgtcttctctgccacctggaactcggtcatgatcacatttggttgctgcggggtcaacgggcctgaagactttaagtttgcatctgtgtttcgactcctgaccctggatagtgaagaggtgcgcgagttcgctcgccggattttacttccaaagtcgggacggggtcctgctgagcccgggaggaagtgcctcctgggaaggagcctattcctaaacaagcagggctgttacacggtgatcctcaacaccttcgagacctacgtctacttggccggagcccttgccatcggggtactggccatcgagcttttcgccatgatctttgccatgtgcctcttccggggcatccagtagagggtatggcctgaagcctggaagacttcgccccacccaccacttgcccagcacccaatgtcctcccgtgcccctccccgctgtcctcttggccccaaggggaagaagatgaggccatcagagatcgaaggggagaaggggccaggggaattagagctattttttttaacaaaaacaaaattgaaggacaaaaattntgggattnatgtnttc

SEQ ID NO: 125322 - DNA, 456 bp, Homo sapiens
tcctggaagacaccctgcatgttgtggacatggaagcgaggctgcgtcaacgatcggaagaaacaactgaggcagctcttctgctcccttcaagttcagaagaaagcttccagttgatccccagctgccaggaggaaatcagccttagcaggtgccacccaggcctccccaccactcccagatcccagcacagcacctcacagcattcgcctccccacctccagcctggcaccagctttgctggcttagcagctgcagcttactacctgaattgggccccttggatacctccagcccatccccaggcatctttgcaccaggagacagccaatcactgggactgggggaggtttaaccttgacaaactgacttggcagttaggcccaaagagaacaaatacagcaagttctgctacccccaggagatcatatctaataaatgagcacaggccctaaa

SEQ ID NO: 125323 - DNA, 981 bp, Homo sapiens
atgctctgtgagctgcaaagtgctgctgatgtcactggtggtgacgatggtgatgatgttcacctcaccaacgtggctgtgcaaaaaacatctcccgactaccacccaaagaagctccatcccacagtggggcccttgtgcatacacagccctgaaaatggcagcctgtcggtcactccttggccttgggatgcacacatgggctgcaagtggacgctgcagcgcttccggcagtacctggcgtccaaacacgggcccgaggcagtggagacactcttcagggacatcgacaacatctttgtcaaaagcctgcagagtgtgcagaaggtgatcatcagtgacaagcactgcttcgagctgtacggctatgacatcctcatcgaccaggacctcaagccgtggctcctggaggtcaatgcgtccccatcactgacagccagcagccaggaagactatgagctcaagacctgcctcctggaagacaccctgcatgttgtggacatggaagcgaggctcacgggaagggagaagcgagtcgggggctttgacctcatgtggaatgatggccctgttagcagagaggagggggctcctgacctgtcgggaatgggaaactttgtgaccaacacacatctcggctgcgtcaacgatcggaagaaacaactgaggcagctcttctgctcccttcaagttcagaagaaagcttccagttgatccccagctgccaggaggaaatcagccttagcaggccttgagtttgagattgggagctgagccagaaaccggaaaaccctgggctcatgggcaggacagcttcgggagttgagtgtcaagcccgaagggaagacttttggaaggaaaatactggcaaatccaagaagtgaaccagccgactttaggaaagccagaagccaggctactctagaccttctgccttcagagcatgaggacttctcccactcatccctgtacctgaggcac

SEQ ID NO: 125324 - DNA, 645 bp, Homo sapiens
tcgtgcttgtccttgaaactaaagaacatcaaagaacaattccctttgcatccatgaattatggttagtgcctggttttgaatcattgcctctacttgggactcttgcccctttgggttttgctggttctgaaatttctgatgcctgtagccaaagtgggacatttgagtgggcttctggaaatccaacattctagaagaaagccaaccaccaaaaacttttgaggaggaggagaaaacttctcctacccctggtaccttttggttggttgtgggtggttttcttccagtcccattgtacctgatgttccacctttttccctcctccttcctgcccaaaaaaagaaacctgctcctcccaaagccagagcccaagcctaaaaaggcccctgcaaagaagggagagaaggtacccaaagggaaaaagggaaaagctgatgctggcaaggaggggaataaccctgcagaaaatggagatgccaaaacagcccaggcacagaaagctgaaggtgctggagatgccaagtgaagtgtgtgcatttttgataactgtgtacttctggtgactgtacagtttgaaatactattttttatcaagttttataaaaatgcagaattttgttttttaaaaaaaaaaaaaaaaaaa

SEQ ID NO: 125325 - DNA, 2100 bp, Homo sapiens
atctaatggtgggaaccacagtcactcaactacaaaatttaaatacaatgggaataattggatctcaaggtctcaggagccaagtggcagtattcaactgtcaaaagcaaggagacttccagcctttcaccagggtaactgagcactggggaaggggaaataatcagacatttcagggactactggacactggctctgagctgatgttgattccaggggaccaaaaacatcactgtggtcctccagttaatgtaggggcttatgggggtcaggtgttactttggcccatttatcaagtgacccaaatggctgccagttttgaattgggttcagaagagaagaaggctctgcaacaggtccaggctgttgtgcaagctgctctaccacttgggccatatgacccagcagatccaatggtgcttgagaaaggaaagaggtttgtactcactggaatagacacttactctggatatgggtttgcctatcttgcacacaatgcttctgccaagactaccatccatggactcacagaatgccttatccaccattatgatgcttcctgccctggaacactggactccaagttcttcagtttagggactcagactggctctccttgctcatcagcttgcagacagcctattgtgggaccttgtgatcatgatatggatgaaaaattttacagagaaatagatatcataaagaaaaagcaatcacaacttctggaaataaaagacacacttagagaattacaaaatacaatggaaattttcaacaatagactagaacaaatagaagaaataactttagagctcaaagacaaggcttttacattaacccaaccagagaaagacaaagaaaaaggaattttaaaaaatgaaccaagcctccaagaaatttgggattatgttaaacagccaaacctaagactaattggtgttgccgagcacctacgtcccgcttggcgtcgaccttcgccaccatgccctttaaaaaggctgaatgtgttggtgacgcacatcctgcgacggtgaaggacgaaccacagagaatatccgcgaggttgtcgtgctaaacctgctcctccaaagccagagcccaagcctaaaaaggcccctgcaaagaagggagagaaggtacccaaagggaaaaagggaaaagctgattgctggcaaggagggggaataaccctgcagaaaattggagatgccaaaacagaccaggcacagaaagcttgaaggtgcttggagatgccaagtgaagttgtgtgcattttttgataacctgtgtacttctgggtgactgtacagtttgaaaatactattttttatccaagttttattaaaaatgcagaatttttgttttactttttttttttttttttaaaagctatgttgttagcacacagaaacactttcattgttgtttttttgggggaaagggggcataatgtcactaataagaatgtctccaaagctggattgatgtgggagaaaacacctttcccttctaagttttgagagacttcctcttggctcccaggaggagggattccctgactttgacacacatggccaccttggcacaaaaagccttgtggtatagaaaaacaaatttgtttttatgtcctcttctccctttccatctttcagcatagacttaactcccttaagcccagacatctgttgagacctgacccctagtcattggttaccagtgtgtcaggcaatctggactttccagtgatgccactgagatggcacctgtcaaaagagcagtggttccatttctagattgtggatcttcagataaattctgccattttcatttcacttcctgaaagtcagggtcggcttgtgaaaagttgttaaacaacatgctaaatgtgaaatgtcaaccctcactctaaactttccctgttcagagcatcagatgaagacttcattgggttttatagtggctttctgatttttggtagtccattgaagaagggagtttgaaagttgttgtatactgttaacgattgtctgcccatgtcctgcctgaaataccatgattgtttatggaaagtatctttaataaagctggatacagtttggc

SEQ ID NO: 125326 - DNA, 393 bp, Homo sapiens
agaacgacccccggaccgaccaaatttttcttttcgctgcatcccgcgtccagcacctacgtgccgctgccgtctccgccggcaccatgcccaagagaaaggctgaaggggatgctaacggagacaaagcaaaggcgcaggacgaaccacacagaagatccgcgaggttgtctgctaaacctgctcctccaaagccagagcccaagcctaaaaaggcccctgcaaagaagggagagaaggtacccaaagggaaaaagggaaaagctgatgctggcaaggaggggaataaccctgcagaaaatggagatgccaaaacagaccaggcacagaaagctgaatgtgctggagatgccaagtgaagcgagtgcatttatgataactgtgtacttctgg

SEQ ID NO: 125327 - DNA, 645 bp, Homo sapiens
atggccacaggtaccgtggagatcacgggctgtgacccaccagttgtattagcaaatgtcaatggcagacccagatacagggatgagctgggaaatccaacaaagctgacatatctaggacatagaaggaagctggtgcagccaggatacccagaagtgagatcaacaacagcgggagaggtggggcctttggatcccttcaaaaggcttccccaaggagacacagctgtggatgatgagtctgagtggcttcaatctgactgtaacctcatgaaatacccctgtgagatccagaagaaccacccagctgtcaccgtcaacccacagaatggtctggaggctgggaagtccaagatcaaggtactagcagatctggtgtctggtgacagtcagcttcctggtttgcagatggccctcttctcactgtatcctcacatagtggaaagcagagagagaggaaatagagcccaggccaaaaaagcccctgcaaagaagggagagaaggtacccaaagggaaaaagggaaaagctgaggctggccaggatggggataaccctacagaaaatggagatgccaaaacagaccagggacagaaagctgaaggtgctggagatgccaagcgaactgtctctcaccagaactaa

SEQ ID NO: 125328 - DNA, 843 bp, Homo sapiens
aggtccggatttccctggtcgaccatttcgttgcatcccgcgtccagcacctacgtcccgctgccgtcgtcgccgccaccatgcccaagagaaaggctgaaggggatgctaagggagataaagcaaaggtgaaggacgaaccacagagaagatccgcgaggttgtctgctgtaagtgtacgcttttgaattttcgtgcttgtccctgaaactaaaaaacatcaaaaaacaattccctttgcttccatgaattatggttagtgcctggttttgaatcattgcctctacttgggactcttgcccctttgggttttgctggttctgaaatttctgatgcctgtagccaaagtgggacatttgagtgggcttctggaaatccaacattctagaagaaagccaaccccacaaaaacttttgaggaggaggagaaaacttctcctacccctggtaccttttggttggttgtgggtggttttccttccagtcccattgtacctgatgttccacctttttccctctccttccctgcccaaaaaaagaaaccctgctccctcccaaagcccagagccccaagcctaaaaaggcccctgcaaagaagggagagaaggtacccaaagggaaaaagggaaaagctgatgctggcaaggaggggaataaccctgcagaaaatggagatgccaaaacagcccaggcacagaaagctgaaggtgctggagatgccaagtgaagtgtgtgcatttttgataactgtgtacttctggtgactgtacagtttgaaatactattttttatcaagttttataaaaatgcagaattttgttttttaaaaaaaaaaaaaaaaaaa

SEQ ID NO: 125329 - DNA, 1302 bp, Homo sapiens
tgaaatccggttctaaccggtccggggctcccagcgctataaaaactttataaaccccccggagcccgagcagtgtgaaggagaagaggcaagaacgacccccggactgaatcaaagcccgcgcgccgctgycatgcccgsgtkccagcacctacgtcccgctgccgtcgccgccgtcatccatgcccaagagaaaggctgaagggcatgctatgggagataaagcaaaggtgaaggacgaacctcagagaagattcgcgaggttgtcgtgctaaacctgctcctccaaagccagagcccaagcctaaaaaggcccctgcaaagaagggagagaaggtacccaaagggaaaaagggaaaagctgattgctggcaaggagggggaataacccttgcagaaaaatggagatgccaaaacagaccaggcacagaaagcttgaaggtgcttggagatgccaagtgaagttgtgtgcattttttgattaactgtgttacttctgggtgactgtacagtttgaaaatactattttttatccaagttttattaaaaatgcagaatttttgttttactttttttttttttttttaaaagctatgttgttagcacacagaaacactttcattgttgtttttttgggggaaagggggcataatgtcactaataagaatgtctccaaagctggattgatgtgggagaaaacacctttcccttctaagttttgagagacttcctcttggctcccaggaggagggattccctgactttgacacacatggccaccttggcacaaaaagccttgtggtatagaaaaacaaatttgtttttatgtcctcttctccctttccatctttcagcatagacttaactcccttaagcccagacatctgttgagacctgacccctagtcattggttaccagtgtgtcaggcaatctggactttccagtgatgccactgagatggcacctgtcaaaagagcagtggttccatttctagattgtggatcttcagataaattctgccattttcatttcacttcctgaaagtcagggtcggcttgtgaaaagttgttaaacaacatgctaaatgtgaaatgtcaaccctcactctaaactttccctgttcagagcatcagatgaagacttcattgggttttatagtggctttctgatttttggtagtccattgaagaagggagtttgaaagttgttgtatactgttaacgattgtctgcccatgtcctgcctgaaataccatgattgtttatggaaagtatctttaataaagctggatacagtttggc

SEQ ID NO: 125330 - DNA, 439 bp, Homo sapiens
ccgaggcccagcagagcgctgccaacgtgaaagaccagaaaggcgaggacttccggcctccccgttggccagggtctcatgttccggtgcagcgccagctgttgtgaggacagccaggcctccatgaagcaggtcaccagtgcatcgagcgctgccatgtcgctctgctcaagcccaggctttggtcaccagtgagctggagaagttccaggaccgcctggcccggtgcaccatgcattgcaacgacaaagccaaagattcaatagatgctgggagtaaggagcttcaggtgaagcagcagctggacagttgtgtgaccaagtgtgtggatgaccacatgcacctcatcccaactatgaccaagaagatgaaggaggctctcttatcaattggaaaataaaagtatttgccagtggccatcagggctgagggcaagaat

SEQ ID NO: 125331 - DNA, 773 bp, Homo sapiens
cggacgcgtggggccatggctgagctgcagcagctccgggtgcaggaggcggtggagtccatggtgaagagtctggagagagagaacatccggaagatgcaggtgagcggcccgaggcccagcagaggcgctgccaacgtgaaagaccagaaaggcgaggacttccggcctccccgttggccaggtcatgcctgcttctcttgcgcccaacctcgcttcacacagcgcgggtttctacactgttcttctctgagccccgcaatgcctctggtctcatgttccggtgcagcgccagctgttgtgaggacagccaggccttccatgcagtaggtgcaccagtacatcaaagcactgcaatggcgcctctggctcaagcccgggctttgctcaccagtgagttggagaagttccggcaccacctggcccggtgcgccatgcattgcaacgacaaagccaaagattcaatagatgctgggagtaaggagcttcaggtgaagcagcagctggacagttgtgtgaccaagtgtgtggatgaccacatgcacctcatcccaactatgaccaagaagatgaaggaggctctcttatcaattggaaaataaaagtatttgccagtggccatcagggctgagggcaagaatatattttttataaggaattgggaattttagtcttttaagcaaagtttacgaatgaagaaatgaaggatggccacaagcgtaaggcatatgtcacttgcctctggacactggttattttatgtttcagtccct

SEQ ID NO: 125332 - DNA, 441 bp, Homo sapiens
ttagtggaggcccagagagcttgtgtgtaaggggctgtgaccagactgctcagcaagggcttttgcttcgcagagtgctgcgcgtacattagaaagctgctgagtggaaatcttattccctgggattttaaacagccacatttcctggcgtttgacatcaatgggacatttagcaaatggagtgccagatggagctcctggctctattttattcaatacgagtgcttctaagaaaatcgcacttttcttataagcttccggataagaattgtgcaaggacagttgtattgcatcaaaacatgtggttttcacacgcattgctgtgcagatcacaggatttttgcacctgacaagaacatcttcaaaatcttccaagattccttcctgcaggcccctagttttattactagccagcgttccctcggattcacaccctgtcat

SEQ ID NO: 125333 - DNA, 927 bp, Homo sapiens
  misc_feature (1)...(927): n = a,t,c or g
tttggccttgacagnacatcagcccaaaaaagacctcaccggctttgtgaaatggccccgctatatcaggttgcagcggcagagagccatcctctataagcggctgaaagtgcatcttgcgataaaccagttcacccaggccctggcccgccaaacagctactcagctgcttaagctggcccacaagtacagaccagagacaaagcaagagaagaagcagagactgttggcccgggccgagaagaaggctgctggcaaaggggacgtcccaacaaagagaccacctgtccttcgagcaggagttaacaccgtcaccaccttggtggagaacaagaaagctcagctggtggtgattgcacacgacgtgggtcccatcgagctggttgtcttcttgcctgccctgtgtcgtaaaatgggggtcccttactgccaatatcaagggaaaggcaagactggggacgtctagtccacaggaaagacttgcaccacttgtcgcttcacacaaggtgaactcgggaagacaaaggcgctttggctaaaactggtggaagctatcaggaccaattacaatgacagatacgatgagatccgcctgtcactggggtggcaatgtcctgggtcctaagtctgtggctcgtatcgccaagctccgaaaaggcaaaggctaaagaacttgcccactaaactgggttaaatgtacactgttgagttttcatgtacataaaaataattgaaatatatacaaattttccttcnnnnnnnnnnnnnggggggcccctttaaaaagaaaaaattttaatacccgggggtgggaaaggaaaacttttttttagggggccccaaaataaatttccggggccgggttttaaaaacgggggagggggaaaaacccgggggtacccaaattaaaaccccttggaaaaaaaa

SEQ ID NO: 125334 - DNA, 400 bp, Homo sapiens
  misc_feature (1)...(400): n = a,t,c or g
cctgcgccggaatttccgggtcgacgatttcgtgtctggtgtgggtttcccaagcaaggttccttggaagaagatgtctgcagaggagctggagaatcagtactgtcccagccgatgggttgtccgactgggggcagaggaagccttgaggacctactcacagataggaattgaagaccctgtgtcaaggagagtggaaagcctcatttgaagagctccacgatgtggaccactttgaaattgttgagaatctgacccagaaggacgacgtgctcacccagattatcttgaaaacaatcttccagtagttctgacgatacttggagcctggtccacgtgcatcccaccttgggaagcctctccaaagagctttcggagctgacactgacagcttcagttn

SEQ ID NO: 125335 - DNA, 436 bp, Homo sapiens
tttttttttttttaccaagcaaatgttcacatttattaatacaggttatgtttttaagaatgaacataaaaacagtgacatactattttgtaagtacattaatgatatcatattttaatatatacagactaataaacaatgacagtaaatcttcactgatttagataaaatgaatagtcactaaattaataaaaccagtgctagcttctacttacaatacagttatattacttttatgtaagttattctatggtatttggaaatagtttgctcttttatttttttattttttatttatttttattttttgagatggagtcttgctctgttgcccaggctggagcacagtggagattttcatgagtgtcccagcagtgagaatggactcttgccgggcagacagacacagcaaggctctcctgggtgctgggggaaa

SEQ ID NO: 125336 - DNA, 432 bp, Homo sapiens
cagggtttcaccatgttggccaggctggtctcgaactcctgacctcgtgatccgcctgcctcagcctcccaaagtgctgggattacaggtgtgagccaccacgcctggccccagtccaaaatatttaaagattgtttccttagtgtcttgaagttttgcacaaaattcttttttttgagatggagtctcactctgtcacccaggctggagtgcagtggcgtgatcttggctcactgcaacctctgcctcctgggttcaagcaattctcccacctcagcctcccaagtagctgggattagaagcatgcgccaaaaaggccgggctaatttttttgtatttttagtagagatgggttttcaccatgttggccaggctgatctcgaactcctgaccttgtgatctacccacctcagcctcccaaagtgctgggat

SEQ ID NO: 125337 - DNA, 550 bp, Homo sapiens
gaaacttaatggaaattttattttctcacagttctgcaaactggaagtccaagatcaaggtgccagcagggttggtgtctgataagccccagggctgcagacctgccaccaatcctttgctgaaagccatctgggctgtctcccaggccatgctaccacaaacacccctgctgtgaatagctttgtacatccattaccataccacttgcaagcatctgtaggacgcactctcaggggtagaattctgggtcaaaaggcagacgcatttgtcactgtgaggccattgccggctgccatccatgggggtttgccaacaaccctgccccagcacagtgtgaagacaatgtgcctcacaggctcatcggagtggcttcatcagaaggtcgtgatttaattcacacaggagttctcaagcctataaatggacttcaattcctatctgtgagtaggtcctcaaggcttcctctgctcccagtcggacaacccatcggctgggacagtactgattctccagctcctctgcagacatcttcttccaaggaaccttgct

SEQ ID NO: 125338 - DNA, 882 bp, Homo sapiens
tttttttttttttgagatggagtcttactctgtcacccaggctggagtgcagtggcgtgatctttgtcatgctctgtcagcaggtagatgggccagacgagtctaagaggcagctccgggcatctctgagcattgacttgcggacgttccccagccctggagctccatccaggctgggaagagggaggacgtggagattttcatgagtgtcccagcagtgagaatggactcttgccgggcagacagacacagcaaggctctcctgggtgctgggggaaactgaagctgtcagtgtcagctccgaaagctctttggagaggcttcccaaggtgggatgcacgtggaccaggctccaagtatcgtcagaactactggaagattgttttcaagataatctgggtgagcacgttgtccttctgggtcagattctcaacaatttcaaagtggtccacatcgtggagctcttcaaatgaggctttccactctccttgacacagggtttgttgcttggataccgcttctggacaaacgcaacgctgcgggtcacctggtctaccatgtggtccagggtgccttccgctctgccagtatcctccgtgaaagaacaggaagaaaggcaaggcttcagacgactcgtcggggaagtaaatgtccactttctccccttcgccgtctccataggggacatgcagcaggctcttcctggtggcccgggcccttgtggtggcttcaattcctatctgtgagtaggtcctcaaggcttcctctgctcccagtcggacaacccatcggctgggacagtacatgattctccagctcctccgcagacatcttcttccaaggacccttgcttgggaaacccacaccagacacatccatcat

SEQ ID NO: 125339 - DNA, 474 bp, Homo sapiens
tcctcccctttcccgtctcctctgtcctcggcaccctcacagtggctggcctgagggctactctccggagcatttgcgctgtggcctgcgctctggcaccctcaggtctaggcaggctcttcactgccaggtgagttctaacccctagcctccctctctgtggttttgaggttgtggaaatgttctctgagaattaatggaatacttagtgtaaaagaaaaaaaggaacaaaacacacgacagtcagatcagctgctgagtaagaggaggacctccctggcctgacctccattttctgaagggaaatggagtccttggcaggtggggctgtgcggtcgccctttccagcaccatgggtgggtggaactgtgcctttttgtcctaccggtttcagtcaatctttatcaagttttgctttccgaaatttgggaattccaccgcacggactagtgtcatcgatctcaaggggggccg

SEQ ID NO: 125340 - DNA, 2441 bp, Homo sapiens
cccgctggtcgctgccggacggcgtgggcggtggccgcgcagcagctgatgctgagcgcggcgctgcggaccctgaagcatgttctgtactattcaagacagtgcttaatggtgtcccgtaatcttggttcagtgggatatgatcctaatgaaaaaacttttgataaaattcttgttgctaatagaggagaaattgcatgtcgggttattagaacttgcaagaagatgggcattaagacagttgccatccacagtgatgttgatgctagttctgttcatgtgaaaatggcggatgaggctgtctgtgttggcccagctcccaccagtaaaagctacctcaacatggatgccatcatggaagccattaagaaaaccagggcccaagctgtacatccaggttatggattcctttcagaaaacaaagaatttgccagatgtttggcagcagaagatgtcgttttcattggacctgacacacatgctattcaagccatgggcgacaagattgaaagcaaattattagctaagaaagcagaggttaatacaatccctggctttgatggagtagtcaaggatgcagaagaagctgtcagaattgcaagggaaattggctaccctgtcatgatcaaggcctcagcaggtggtggtgggaaaggcatgcgcattgcttgggatgatgaagagaccagggatggttttagattgtcatctcaagaagctgcttctagttttggcgatgatagactactaatagaaaaatttattgataatcctcgtcatatagaaatccaggttctaggtgataaacatgggaatgctttatggcttaatgaaagagagtgctcaattcagagaagaaatcagaaggtggtggaggaagcaccaagcatttttttggatgcggagactcgaagagcgatgggagaacaagctgtagctcttgccagagcagtaaaatattcctctgctgggaccgtggagttccttgtggactctaagaagaatttttatttcttggaaatgaatacaagactccaggttgagcatcctgtcacagaatgcattactggcctggacctagtccaggaaatgatccgtgttgctaagggctaccctctcaggcacaaacaagctgatattcgcatcaacggctgggcagttgaatgtcgggtttatgctgaggacccctacaagtcttttggtttaccatctattgggagattgtctcagtaccaagaaccgttacatctacctggtgtccgagtggacagtggcatccaaccaggaagtgatattagcatttattatgatcctatgatttcaaaactaatcacatatggctctgatagaactgaggcactgaagagaatggcagatgcactggataactatgttattcgaggtgttacacataatattgcattacttcgagaggtgataatcaacttcacgctttggaaaaagaaaccttaacacttaatttcttctccaaggggtttcctgaggctttcaaaggacacttgctaaccaaaagtggaaaaaacccagtttttggcaatagcatcactcattgtttgtgggcattccagttaagagcacaacattttcaagaaaattcaagaatgcctgttattaaaccagacatagccaactgggagctctcagtaaaattgcatgataaagttcataccgtagtagcatcaaacaatgggtcagtgttctcggtggaagttgatgggtcgaaactaaatgtgaccagcacgtgggaacctgggcttcgcccttattgtctgtcagcgttgatgagcactcagagggactgttccagtgtctttctcgagaagcaggtggaaacatgagcattcagtttcttggtacagtgtacaaggtgaatatcttaaccagacttgccgcagaattgaacaaatttatgctggaaaaagtgactgaggacacaagcagtgttctgcgttccccgatgcccggagtggtggtggccgtctctgtcaagcctggagacgcggtagcagaaggtcaagaaatttgtgtgattgaagccatgaaaatgcagaatagtatgacagctgggaaaactggcacggtgaaatctgtgcacttgtcaagctgtgagacacagttggagaagggggatctgctcgtggagctggaatgaaagggatttataacctttcagtcatcacccaatttaattagccatttgcatgatgctttcacacacaattgattcaagcattatacaggaacacccctgtgcagctacgtttacgtcgtcatttattccacagagtcaagaccaatattctgccaaaaaatcaccaatggaaattttcattgatataaatacttgtacatatgatttgtacttctgctgtgagattccctagtgtcaaaattaaatcaataaaactgagcatttgtct

SEQ ID NO: 125341 - DNA, 2602 bp, Homo sapiens
atggcccaagtcattcatgaggaatccacccccattgttgcaggactttttcttggtttagctaaggatggggttctttcgtcccatggccatgaaaattcaggcccacagacaatttgaatgggctttgacccgaagcttggaattgagtcgggaacacaaatgtgtctcgaggggagttgtgtggactccttaccataagtggaatactaaggtggaagttgatgggtcgaaactaaatgtgaccagcacgtggaacctggcttcgcccttattgtctgtcagcgttgatggcactcagaggactgtccagtggctggctgagggctactctccggagcatttgcgctgtggcctgcgctctggcaccctcaggtctaggcaggctcttcactgccaggtggaggagcttcctggggactgcatgccggcctcccaaacacccacccagcccttcctctgcaggcatctgagggcccaggactggccagagccccgtccccccgccaagtacattggcttcacatgggtggcacagcccctaccctctctgccagtaggatcttcaagtgagtgcgttagcaactcaactgcaaatatgaagaaatgcggcctggggatttcccaaggtcacgctaggggcaaaggccagcctgacctggctacagctctactctgggccccgccagggcctgggagcaagtgggtggtggacaggagcttaaggggctctgctgtggctgccactgaccatctttctggctggctctgtgcttctaatgtgggtgatttgcaaagaggtaacgcacaggatgtctccaatgttgggcttacaaaatggtcacaagcctcacaagtctttttgatgaacctagtgggcctgatgtatctccccgctccctgtctaattggtgtaaagtttgaaggcctgaatcctgtatctttcatccagcttattgcgtcctctcctttgacacgaggtcaaggttcacgttcgcatccgattatcagagcggcactcattaagcaggagtcggccttgccccaaacaaggcttgagagaaacctcggcccatttactcagcagattttcgcatgtcgtgggggcccgagtgtcacccagcattgctctgtgctgaagagctgcagacacctccagctgatgatgaattttctcttcactccttccacaaagattaaaagacagagaaccttctcccgcacatgccccctctcagaaaacatgctaagacagggacacatttggcaatgccgatcattcaaactgcagactgccatgaccacgaagaacgctcaaagaaagtgcaggaagaaaaagaagagaacgggggaaaaaagaccaccaaacataaaaggaagcccccacaagcacaggcttgaaagcggtgctcaagaccagatattcatcagaagacagaaggctcggagggcttaccagcccgctgcagtttccacttctgcaacgccggaccaccggaaaaacacggatcaatatcagccctggtgtctacgccacaaaagtgaaaatcccaccatttcattgttaaaggctgactcctttaatggcccatgcacgagcggcctcactctggagggcgcgggaacccaggggccacccgtccagccccgctgccggctcgggacttcaggcacacgtgccgtctgcctggtgctccccttgtctctcaagtggggctccccagaactgggcagcacccaaggggctaaggaagccaatgccaactacctgattttttcctcaatgttaagcagatattttatctgtactattgagaaatcaggaggcactaaaataaaaacatctcaaaacgttataaagaaaactgagaattttacttgtattcccttcaccacctacaaacttatccctatcaaggaaaatcccatgagctgggcagacccaggggatggaggaggtgacatgtggacaggcgccagtagatggcagcagatggctgttgcagcttcccacagccctccaagagcggctgcactacgtatcacctgtagaagtagcagtaatgtaattctgcagaccccatgcgctaaatgttgcaatgatcccgaggtctgcggctgctcccgagaatgtggagagcctggtgattccatccattttaacactgatcgcctcaatctgaagacagtctcaggggaaaatggactgagccacaattgtttagcttttttcctgggtggtaaatgtgcagataagccatttctctctgcccaacacctgaatggaacaatgattatcttccgggatacaaaactatctcctagtttcaccagttatgtgagcgcggatgctgacaaaggagaagtcttatttttcaaacgtcttttgggaacagcaaaggctatgaatattttagaactaataaatggaaaaaggaaagtagtaacttcagagtggagaaagggacaaacaccacctgaaccaaatgatcaaagtgatgccattaacagtgggacaaagagaaacgtgaacatgcgcctcccgagaggggacaacgaggacaacgcagcagcaccaccgttacgttcctgccaaaaatga

SEQ ID NO: 125342 - DNA, 508 bp, Homo sapiens; identical to SEQ ID NO: 117199

SEQ ID NO: 125343 - DNA, 1440 bp, Homo sapiens
gttgaagccctaactcccaatgtgactgtatttgaatgtaaagcctttaaggaagtaattaaagttaaatgtggccagaaggatgctgacaacatgagcctcccgtggtcggaacgggcttgtgaaggcggtgctggggtgcaccagggcagcagctacaggaagggctccatcctgtgctcaaccctggggatgctggacagctttgaggaggtcacagaaccaggccagtgttcgaactcaggagccgaatgtggagcctgtgctcggctgttcaacccgctagcagcaccaaccagcccgtcaaccccacacctagcctgctctcacaactgcttggggaacttttacaagagacaaattttctgctatgcagccatgatgaaaaaggaaatagatgtccacgtgctgatgtggaacagtttccaagatacatatggctataaagaaggacaagttgaaaaggacatggagcaaccagaagttctgtatgctgatggtgggagtggaaatcagtgcaaccactttggaaaactggcaatatcttctttgaggtttgtaagccacagaaaggcacagggttcctggagctcactggaaccagagaacttcaaaactcaggtactcagagataatccttgcatttctgagcatgctggggacttcctcacaggacaggctgtctgtggctttggtgacaagatcaggctgttgggggctttgcctgctttgacagcatcttcagcacctggaacagtgcctggtgcacagtgggtgctcactaaatattcagaggtacttacatgcacgtccaccttcttccaggaggaggaaaggaaagggaaggaagctttttctccattgcccaaagtctttgatatttgtattagtctgttctcacactgctataaagaactgcccaaggcttctgaggagctgtctggtacggaggcacctcagacccgccaggacgttctgtctgacttgacgtctgacttgacatctgccctttgttctgaggggccaagcccatttgcagctggcagaaaaaccctcccaatctgcagggaggagcttcacagggaccctggagagaatgttgtgcttcagcgagttcacataaaatcatctctgacggtgttgaggaaagtgccagggaactttggtctctcagtcactcatggattcagcagatacttcggagcagctgttatggaccaggtgctcatagctctcacatcactaggtactgaggagaaccctgtcaggaattatgattctcattgtgtagttggggaagctgagacatggaaggctgagctgtctgacgtgacgcagctggggagtggccgagctggaaatggagcccaggtctgtctgactctggagtctgtgcctttgactgatgcagaaattcagaacatccgtgctgaggcgtag

SEQ ID NO: 125344 - DNA, 409 bp, Homo sapiens
gtatatggattcttctttaagataaagggactcaaacatgatactacctcttatagtttttacatgcagagaataaagcacacagacctggaatctccctctgcggtctacgagcacaaccacgtcagcctgcgagccggcacgcctggtgaagtatgagatcagagcagaggccctggttgacggcaagtggcaggagttcaggacaaaccagatcaagcagaagtttgggttgaccacgtcatcctgcaaaagccataccttgaaaatccaaactgtgggcatcccaatctatgtaagttttgcattcatcttcccagcatcttgacagtttccagaatgaatctatgggattttccccccactggtctgcataaaagaaaataaaatgacataaaaggggaaaaag

SEQ ID NO: 125345 - DNA, 1971 bp, Homo sapiens
tggagtttgactattctgaggacaagagtagttgggacaaccagcaggaaaacccccctcctaccaaaaagataggcaaaaagccagttgccaaaatgcccctgaggaggccaaagatgaaaaagacacccgagaaacttgacaacactcctgcctcacctcccagatcccctgctgaacccaatgacatccccattgctaaaggtacttacacctttgatattgacaagtgggatgaccccaattttaaccctttttcttccacctcaaaaatgcaggagtctcccaaactgccccaacaatcatacaactttgacccagacacctgtgatgagtccgttgacccctttaagacatcctctaagacccccagctcaccttctaaatccccagcctcctttgagatcccagccagtgctatggaagccaatggagtggacggggatgggctaaacaagcccgccaagaagaagaagacgcccctaaagactgacacatttagggtgaaaaagtcgccaaaacggtctcctctctctgatccaccttcccaggaccccaccccagctgctacaccagaaacaccaccagtgatctctgcggtggtccacgccacagatgaggaaaagctggcggtcaccaaccagaagtggacgtgcatgacagtggacctagaggctgacaaacaggactacccgcagccctcggacctgtccacctttgtaaacgagaccaaattcagttcacccactgaggagttggattacagaaactcctatgaaattgaatatatggagaaaattggctcctccttacctcaggacgacgatgccccgaagaagcaggccttgtaccttatgtttgacacttctcaggagagccctgtcaagtcatctcccgtccgcatgtcagagtccccgacgccgtgttcagggtcatagttttgaagagactgaagcccttgtgaacactgctgcgaaaaaccagcatcctgtcccacgaggactggcccctaaccaagagtcacacttgcaggtgccagagaaatcctcccagaaggagctggaggccatgggcttgggcaccccttcagaagcgattgaaattacagctcccgagggctcctttgcctctgctgacgccctcctcagcaggctagctcaccccgtctctctctgtgggtgcacttgactatctggagcccgacttagcagaaaagaaccccccactattcgctcagaaactccagagagaggcttgttcacccaacagacgtctccatcttccaaaacagccttgtactcccgcatcaggaccactgaggtggagaaacctgcaggccttctgttccagcagcccgacctgggactctgccctccagatcgccagagcagagatcattaaccaaggagagagaggtctcagaatggaaagataaatatgaagaaagcagggcgggaagtgatggaaatgaggaaaatagtggccgagtatgagaagaccatcgctcagatgatagaggacgaacagagagagaagtcagtctcccaccagacggtgcagcagctggttctggagaaggagcaagccctggccgacctgaactccgtggagaagtctctggccgacctcttcagaagatatgagaagatgaaggaggtcctagaaggcttccgcaagaatgaagaggtgttgaagagatgtgcgcaggagtacctgtcccgggtgaagaaggaggagcagaggtaccaggccctgaaggtgcacgcggaggagaaactggacagggccaatgctgagattgctcaggttcgaggcaaggcccagcaggagcaagccgcccaccaggccagcctgcggaaggagcagctgcgagtggacgccctggaaaggacgctggagcagaagaataaagaaatagaagaactcaccaagatttgtgacgaactgattgccaaaatggggaaaagctaa

SEQ ID NO: 125346 - DNA, 2204 bp, Homo sapiens
gcggccgccccggctcccggctgcaggaatcgcgccaggacgctggccccgctcgcggctagcttgcacgccagggcacagcgaggatgggagggtcgcagtccctgcagccagccccagccagcgacctgaacctggaggcttccgaggcaatccttggaaagctttacctggggctgctctgggaggagcatctggtagccccaagttactgctgtgggcagaaacgattccctggaattcagttttggtcgctcagcagtgggtgcatggctggggggcttctcctgccgtcagcatctttcctctgcacccccggcacagtggtatttcctgcaagggaacagccaggcatcagcgactgcctcctcctaggaagaacccatgagcgtggcagctccgtgcccggggcgacagcccagtttccgggcagctgcgcttgtggctgggcagatggcgtggagaatacaacttattcgaaaacgattgctctatatggattcttctttaagataaagggactcaaacatgatactacctcttatagtttttacatgcagagaataaagcacacagacctggaatctccctctgcggtctacgagcacaaccacgtcagcctgcgagcggcacgcctggtgaagtatgagatcagagcagaggccctggttgacggcaagtggcaggagttcaggacaaaccagatcaagcagaagtttgggttgaccacctttcttgagaactgttgctttctggaccgggacataggacgaagcttgaggccgctcttcctctgcttgcgtctgcacggcatcaccaaaggagaaaacagcaccacagccatcaaatatgagcatcaactgatctggttccaaattcatgagagctgctgtgatcacactttcacagatgaggacattgcagctgcggggcagttaagcaactcacaggaggttccacagccagtctggaaaatagtggccgagtatgagaagaccatcgctcagatgataggtaggtgtcctgacctgcgggggctcaggccggccccgatgtttctgaactatgaggaggccttggaagataggaggctcagaacagctcccgagggctcctttgcctctgctgacgccctcctcagcaggctagctcaccccgtctctctctgtggtgcacttgactatctggagcccgacttagcagaaaagaaccccccactattcgctcagaaactccaggaggagttagagtttgccatcatgcggatagaagccctgaagctggccaggcagattgctttggcttcccgcagccaccaggatggccaagcagggaactgtcgacaagggggctacgatgccacccccagctgccagcaggaaggaccccaggcacagcctgcaggtctgaagtgggtgacagtggccagaggttctcacaggtcgcaggacttcagtggagtgaagagagaggctgctcacccaacagacgtctccatctccaaaacagccttgtactcccgcatcgggaccgctgaggtggagaaacctgcaggccttctgttccagcagcccgacctggactctgccctccagatcgccagagcagagcacaaagctcggctggaacgccgggtcactggctcaaccaaccggtggcgtttgcccaaacagcctttctctggggacctgctctcactttcccagatgtgcaaggctctgagcatagactttgaggaagctttgaggaacccagacagttccttcctccaggacaacaccttcctccagcacaacaggggcagaggagccggtcttctggggagaagcttttacacatctggccctctcctttgtgatattgggaagctgcatgtccagaggcagcagatactctcaggtgttctgggctcaggtccagcaccacctcctcttggaagtcaccctgattgctcctccccacatactgccttagttttgatttccatgccttccttcttctacctggttccttacctccctccacctcccatgaaacaacagactgccgggaagcagcgctccccatacaaatccatcctgagtgccagctctgtgctgacctgtgctgctggttctggaaatgccaccagggacaggtggaggccttttcgtcctggagctcatggcctcaccggtcagcagagggtgaagcccaagctgtga

SEQ ID NO: 125347 - DNA, 587 bp, Homo sapiens
ggcacgaggaggcgcgtggggcttgaggccgagaacggcccttgctgcgcaccaacatggagactgtgtaccgtgtcccgatcttagtgctcgaatgtcccaacctgaagctgaagaagccgccctggttgcacatgccgtcggccatgactgtgtatgctctggtggtggtgtcttacttactcatcaccggagggatttatggagaattgacttcatgcaataattgtggtgccatcgctgtaaagcagggcaagctttgggaaagggaagatgagtgtaaggtggataggacaacaaactgggatccaaagcataacatgagccatgaggacagattgaaccccagagagccttatattcttagtcaagtgaatgcgtgccttgttggaggacgtgagcaggaaaattcactgctcctcaaggcttcactaatcaagaccacctatgtcatttccgcagcccctgaatgcatgattgggatggacacacagacactccctaacataccattgttcgcttggaattccccaggaagccttcttgatctaacttatgctacagaatatcagatatcagatgagtga

SEQ ID NO: 125348 - DNA, 569 bp, Homo sapiens
ggcacgagaagcagtgaacctgaggctgtctctgtgggcagggacttgaggaggaaacaggtggggaacaaagccatctctactttgatttttgaaaagtctggctaagggtgctgaagaaatgcttgatgatttgttggttacagttagagaaaagattggccccattgccacaccagactacatccagaatgcacctggcttgcctaaaacccgctcaggtatgttcagaggcctccatggattgggatgggctgaggcctggtggtggtggggtgtgcgtggatgaaagcctttggcagggctagggtgggtcagtgctttcaccaagtaactagaggtctgtggttccccagggaaaatcatgaggcgagtgcttcggaagattgctcagaatgaccatgagcttaataccctgaccaaaagcactgctgacagagcatgatgaagatggaagaaaagcaacaaaataaaacaagatagaatagtgtaacaaggtactcagaagttgcaatttctaagcaaatcttaagtgtcattctaggtccgatcttcatatcttggaagac

SEQ ID NO: 125349 - DNA, 822 bp, Homo sapiens
cacgaacgctttgagacaacctactttaagaagtttcctcggatactatgttacaggagatggctgccagcgggaccaggatggctattactggatcactggcaggattgatgacatgctcaatgtatctggacacctgctgagtacagcagaggtggagtcagcacttgtggaacattgaaggctgttgcaagaggcaagctgtggtgggccaccctcatccctgtgaaggggtgaatgcctcctactgctttgtcaccttgtgtgatggccacaccttcagccccaagctcaccgaggagctcaagaaagcagattatgagaaaaagattggccccatttgccacaccagactacatccagaatgcacctggcttgcctaaaacccagctcagggaaaatcatgaggcgagtgcttcggaagatttgctcagaatgaccatgacctcggggacatgtctactgtggctgacccatctggtcatcagtcacctcttcagccaccgctgcctgaccatccagtgaacatgattcttgaccttttaccttaggattcctccttgctccaaacttttggcccatcctcttttgcccccttcaggagtgctgagggccagtgttgacccacactacccttcccttgaccagctgtctgggaccggaaaccagctttgtctccaggtagagacaacatcctgtgactgccaggcagaaaggacagggcccaggtcagcctcagtctgctgtgcctccagactgcagagctctcagaacccagaacagagacgaaaaggctacctctcctacccaagttaagtgttc

SEQ ID NO: 125350 - DNA, 569 bp, Homo sapiens
ggcacgagagcatctgcattcaaaaggcttccttgtgtttgctggctgcttgatgaaggacaaaggccatgatggggtcaaggagctggacagcctaaacagtgaccgattgagaaccgtccagctcaatgtctgcagcagcgaagaggtggagaaagtggtggagattgtccgctcgagcctgaaggaccctgagaaaggcatgtggggcctcgttaacaatgccggcatctcaacgttcggggaggtggagttcaccagcctggagacctacaagcaggtggcagaagtgaacctttggggcacagtgcggatgacgaaatcctttctccccctcatccgaagggccaaaggccgcgtcgtcaatatcagcagcatgctgggccgcatggccaacccggcccgctccccgtactgcatcaccaagttcggggtagaggctttctcggactgcctgcgctatgagatgtaccccctgggcgtgaaggtcagcgtggtggagcccggcaacttcatcgctgccaccagcctttacagccctgagagcattcaggccatcgccaagaaga

SEQ ID NO: 125351 - DNA, 990 bp, Homo sapiens
atgattgatcttgacctccagttcctagcacagtgccggaacacgataggggcccaagaaatgtttgccgagcgagtgacgcctttctcctgtttagcagtacctgaatttgtgtggtgctttagactctttaacaggcttcttacaaatccatttccttactccattaatctgagcaggtcaggacaggacaaaggccatgatggggtcaaggagctggacagcctaaacagtgaccgattgagaaccgtccagctcaatgtctgcagcagcgaagaggtggagaaagtggtggagattgtccgctcgagcctgaaggaccctgagaaagtctggccactggctcaggccacagcggacaccctgttcacagcctgcatcaccctcctgagacagaaccttctccaagtgtttgcctttgggcaggtcccaaggtaccacctggagctgctggaaaggtgtccactggagcaagaaggggaggctctcacctctttgctttctgttatgtcttccatcgtccatagggcagtgaccctcatggcttggccacaagaaaagcaggcatcttctctaaactatggaagaaatcatgaggctctttcacctaaggatgtaaataaaaatggattttccactggaaacaggtcaaatgacttaatacagccacagacaattcggagcaagctggtcaggaggcccaaattcagcaaggctcagcaacttgcttcttcaacctcaacaccagagtctgtcattctcctcactgcttcccactccctcactgaaaagcctgcatccaaagcccattactggctccagggtgtggaccttgcagggaagaactgtgtaaggacaagacaaagagcagggctgagtgccgagtgcccgcatcccgagaccctaggcgacctggctgctgtctacctctcccacaatgagcttctcttccttcaggctcaacaccacatggaagctgccaagtcttag

SEQ ID NO: 125352 - DNA, 255 bp, Homo sapiens
atggagcataaaaaagaagaagaagaagaagaagaagaagaagaagaagaagaagaagaagaagaagaagaagaagaagaagaagaaactaagtttcagaaaattttaataaagtgggtctttgattcacttggctgcgacactcatttcatctatttatgcaattgcacgttcatatgtacgaaagccagctcagatttttcttcctccaaagtcctccttcaaggacttctcagagccttaagtaaaggctaa

SEQ ID NO: 125353 - DNA, 174 bp, Homo sapiens; identical to SEQ ID NO: 118056

SEQ ID NO: 125354 - DNA, 379 bp, Homo sapiens
ggcgtatttcagtagatattagatacatcacccatgagatggacacaaaaaaatttttcaatgattttggcgcagcccgagcaacagtgcaagactctgtctcaaaacaaaaacaaagacagaagaataaagaagaaggaggagaagaagaagaagaagaagaagaagaagaagaagaagaagaagaagaagaagaagaagaagaagaagaagaagaagtaggagaaggagaaggagaaggagaaggagaagaagaaggagaaggaggaggagaagaagaagaagaagaagaagaagaagaagaagaagaagaagaagaagaagaagaagaagaagaagaagaagaagaagaagaagaagaagaaagaagaagaagaag

SEQ ID NO: 125355 - DNA, 252 bp, Homo sapiens; identical to SEQ ID NO: 118012

SEQ ID NO: 125356 - DNA, 353 bp, Homo sapiens; identical to SEQ ID NO: 118053

SEQ ID NO: 125357 - DNA, 847 bp, Homo sapiens
gaagtaaaagatctgtatgataaaactttcaagtctctgaagaaagaaattaaagaagatctcagaagatggaaagatctcccatgctcatggattggcaggatcaacattgtaaaaatggctatcttgccaaaagcaatctacagattcaatgcaatccccatcaaaattccaactcaattcttcaacgaattagaaggagcaatttgcaaattcatctggaataacaaaaaacctaggatagcaaaaactcttctcaaggataaaagaacctctggtggaatcaccatgcctgacctaaagctttactacagggcaattgtgataaaaactgcatggtactggtatagagacagacaagtagaccaatggaatagaattgaagacccagaaatgaacccacacacctatggtcacttgatcttcgacaagggagctaaaaccatccagtggaagaaagacagcattttcaacaattggtgctggcacaactggttgttatcatgtagaagaatgcgaatcgatccatacttatctccttgtactaaggtcaaatctaagtggatcaaggaacttcacataaaaccagagacactgaaacttatagaggagaaagtggggaaaagccttgaagatatgggtacaggggaaagattcctgaacaggacagcaatggcttgctctaagaagaaagagaagaaggaggaggaggaggacgaggaggagaaggagaaggagaaggagaaggaggagaaggagaaggaagaagaagaagaagaagaagaagaagaagaagaagaagaagaagaagaagaagaagaagaagaagaagaagaagaagaagaag

SEQ ID NO: 125358 - DNA, 224 bp, Homo sapiens
tgcaggagaaaaagagaaggaaagagaagaagaagagaggaagaagaagaagaagaagaagaagaggaggaagaggaggaggaggaggaggaggaggagaagaagaagaagaagaagaagaagaagaagaagaagaagaagaagaagaagaagaagaagaagaagaagaagaagaagaaaggaaggaaaactgaccttgctgtggatccggtcgtgggaagcag

SEQ ID NO: 125359 - DNA, 417 bp, Homo sapiens
atatggcagggctgtaactgccaagaaagtgactccttaagacttccaaaacttgtacataaagggttatacaacttctttctggtcctcttggaacactggctcctggaacgtagtccctatgccataaggaagctgaaggaggccatggaaaggcccatgtggaaggaaagagagccccctccaatctgcaaccctcggccccagctgagctttcaggaaacaatagcattagctttcaatcatgaggaggaggaggaggaggaggaggaagaggaggaggaggaggaggaggaggaggaagaagaagaagaagaagaagaagaagaagaagaagaagaagaagaagaagaagaagaagaagaagatttattatataatttcatttatataatattctcaaaaatgccaactaag

SEQ ID NO: 125360 - DNA, 1317 bp, Homo sapiens; identical to SEQ ID NO: 120423

SEQ ID NO: 125361 - DNA, 159 bp, Homo sapiens; identical to SEQ ID NO: 117049

SEQ ID NO: 125362 - DNA, 939 bp, Homo sapiens
atgacacctgtcttcgggggcctgggggctgtgggccggaataagtcaagacgacggaacggacgaacgaccgacgaacggacgaacgaaggagaagagcatacgacggaacggacgagcgaacgacggaacgaacgacggaacgacggatacgaacgacggaagaccggaagaagaagaggaagaggaagaggaagaaagaagaagaagaagaagaagaagaagaagaagaagaagaagaagaagaagaagaagaagaagagtaacatatttttggaattccaagaggagttggagcaagtctataaggtctactgtgccagctacgaccaggccttgctactggtggacacgtaccggaaggagccggagctgcagcggcacatccagggcatcgttgaggcggtggtcgattggtgttttatccgctactggcgcctaacgcctaactggcagcgcttcagaagggttgggcgtacggagcgggccacaacgcataatcgcctgcaggcgtttgggggttgcacccacgagcgcacaccagaaccgtcccagccgcaaacccggtatccagaccgccaaacacccaacgggttgcgaggcgcaaacactatgcactcgcagatggatacactgaacggagatggacgaacgcaccttgcagggcagagagctcgttccccccgaactgcccgtccggagcgccaataccggattcatacgacaagtgtgatcagctcgaggatcaccaggtacccactgctgctgcagaaaatcctggagaacacagtccctgatgccagtgcctatcctgtccttcagagggctgtctctgccctccaggacgtgaacaccaatatcaatgagtacaagatgcgcaaggaagtgggtgctatgcctgaaatttctgcagttttggtagatgccatcaagggttaa

SEQ ID NO: 125363 - DNA, 1239 bp, Homo sapiens; identical to SEQ ID NO: 121407

SEQ ID NO: 125364 - DNA, 391 bp, Homo sapiens
gaaaatacaaagaacagtgttgacgaacaggaagaaactgttattccttacgaatcaactcctgaggtttctagaggaaatcaaacaatggcagtgaaaagtctgtccccatctcctgagtcctcggcatcgccagtcccatccactcagccgcagctcacagaaggctcacatttcatgtgtgtgtagtcttagaagaactatactgacttctgttgaaaccattcaaagctaaagacatggaccttcagcagtgtaagacgatattgtacagtatatttcaaatctatgaaattcatagctctgatgcttttggtcacagaggattcatttttatcacttctgggaaaattgtttatttccaaaaacagcttttaattggcccatatgg

SEQ ID NO: 125365 - DNA, 582 bp, Homo sapiens
atggcacagaagaaggaggaggaggaggagaagaaagaagaagaagaagaagaagaagaagaagaagaagaagaagaagaagaagaagaagaagaagaaaagaagaaaaaaaaagaagagaaaagagaaagaagtaaaaaatataaacaacaacaacaacaaaacaccaaaagaaacaagaacctaaccagccctcaagatgaaacacagaccgcaaatcataaaccagaagagcatcctgaagaaaatacaaagaacagtgttgacgaacaggaagaaactgttatttcttacgaatcaactcctgaggtttctagaggaaatcaaacaatggcagaagtaacacagctatcacaagaagcacagagaatagttgagaaacttgaaaagtccacaaagcctattgtggctgccatcaatggatcctgcctgggaggaggacttgaggcacttggagtacagcaggacattcagggtgaacaaaaacgacaaagatccctgtcttggtggagcttacattccaggtcagcaggggatatgatatctgggaagaatcagttcctactcagtgaagataaatga

SEQ ID NO: 125366 - DNA, 673 bp, Homo sapiens
  misc_feature (1)...(673): n = a,t,c or g
tcgcaattcccgggtcgacgatttcgtcaagatggtggcctgccgggcgattggcatcctcagccgcctttctgccttcaggatcctccgctcccgaggttatatatgccgcaattttacagggtcttctgctttgctgaccagaacccatattaactatggagtcaaaggggatgtggcagttgttcgaattaactctcccaattcaaaggtaaatacactgagtaaagagctacattcagagttctcagaagttatgaatgaaatctgggctagtgatcaaatcagaagtgccgtccttatctcatcaaagccaggctgctttattgcaggtgctgatatcaacatgttagccgcttgcaaagacccttcaagaagtaacacagctatcacaagaaagcacagagaatagttgagaaacttgaaaaagtccacaaagccctattgtgggctgccatccaatggatcctgcctgggaggaggacttgaggttgccatttcatgccaatacagaatagcaacaaaagacagaaaaacagtattaggtacccctgaagttttgctgggggccttaccaggngcaggnggcacacanaggctgccccnantnggnggtgtgcctgctncttttgacangntnctnnctggtaggagnatttgtgcaggncagggc

SEQ ID NO: 125367 - DNA, 358 bp, Homo sapiens; identical to SEQ ID NO: 84983

SEQ ID NO: 125368 - DNA, 924 bp, Homo sapiens
atgggggctgcgctcaggaacagaggaaacagccagtggctgtggaggatgagaaacttggatgagtgtgaggtgtgccgggacggaggggagctgttctgttgcgacacttgttcaagagtcttccatgaggactgccacatcccacctgtggaaagtgagaaggaccttccacctgccatgcgcactctccagcagaatgtctgcttgtgtctagatggggaaggagcaggttcatcgggtactgggacccagcagtgtgatccagagagcagtgggagacgctggcagcaggagaaatgtgagttcctcctcttgaaagtctattgctgttctgagagctccttttttgccaagattccatactattattatattagagaggcgtgtcaaggcctgaaggagcccatgtggttggataaaatcaagaaaaggctgaatgagcacggttacccccaagtggaggggtttgtacaagacatgcgcctcatcttccagaaccacagggcctcttacaaggtcttttcatccccagctgctgagtggtggctgctgatgccagcagtccccagagtattacccttcgttaaatggaatcagcttcacctggaagtgacgccccgtggcctgaggccggcccctttgcctcaaagcaggaccaagggtgtggactacaagtacaaaaataaaagtagagaaaaggaggatgaggtgcataacatggggagagcgtggctctgttatgtgtcaaatgtgattattggagcagtgtctagtgaactagaaaatcacccaatgaatgaagaaggagaatcagaagagcttgcttctagcctgctatatgataatgtaccagatactgtggatattgcaaacaactccactttgggaaaacccaagaggaaaagaagtaagaataaataa

SEQ ID NO: 125369 - DNA, 3252 bp, Homo sapiens
tcttttccttttcctctttgactgagcaccgaggggcagttggcagcttcacctcagagctgcaggaaggaacggggcagtgaaaatcgaatcgggtgtgatcctaggccaagctcatggcccagcagggccagcaggggcagatggcaagtggagacagcaatctcaacttcaggatggtcgcagagatccagaacgtagagggtcagaacctgcaggagcaggtttgccctgagcccattttcaggttcttcagagaaaacaaggtggagattgcaagtgcaataacaaggccatttcctttccttatgggcctccgagaccgctccttcatctccgagcagatgtatgaacattttcaagaagcttttagaaacctggtcccagtgacaagagtgatgtattgtgtactcagtgaactggagaagacatttggctggtcacatctggaagcattgttcagcaggattaacctgatggcctatcctgatttaaacgagatttacagaagcttccagaatgtatgctatgaacactcacctctccaaatgaataatgtaaacgatttagaagatagacccagattactaccatatggtaaacaagagaacagcaatgcctgtcatgaaatggatgatatagcagtgcctcaggaagccttgagctcctcggcaaggtgtgagccaggtttctcttcagagtcttgtgagcagttagctctcccaaaggctggtggaggagatgctgaagatgcacccagcctactaccaggtgggggagtgtcctgtaaacttgctatacaaatagatgaaggagaatcagaagaaatgcccaagttactgccttatgatacagaagttctagaaagcaacgggatgatagatgcggcaaggacatacagcacagcaccaggggagaaacagggagaggaggaaggcaggaacagtcccagaaaaagaaaccaagacaaggagaagtaccaagagagtccagagggaagagacaaagagacctttgatctaaaaactccccaagtcactaatgaaggagaaccagagaaggggctctgtctactaccaggtgaaggagaagagggcagtgatgactgttcagaaatgtgtgatggagaagagccccaggaagcctctagctccctagcaagatgtgggtcagtttcttgtttctctacagagacctttgatctaaagactccccaagtcactaatgaaggagaaccagagaaggagctcagtctactaccaggtgaaggagaagagggcagtgatgactgttcggaaatgtgtgatggagaagagcgccaggaagcctctagctccctagcaagacgtgggtcagtgtctagtgaactagaaaatcacccaatgaatgaagaaggagaatcagaagagcttgcttctagcctgctatatgataatgtaccaggagcggagcaatcagcatatgaaaatgagaagtgttcctgtgtcatgtgtttctcagaagaggtgccaggaagcccagaagcaaggacggaaagtgatcaagcgtgtggcacaatggatactgtggatattgcaaacaactccactttgggaaaacccaagaggaaaagaagaaaaaagagggggcatggctggagcagaatgagaatgagaaggcagaaaaacagccaacaaaatgataatagcaaagccgacggccaggtggtctccagtgaaaagaaggcgaacgtgaatctgaaagacctttccaagattagggggagaaagagaggcaaacctggaacccgcttcactcagagtgacagagctgcacagaaaagagtccgatcaagagcttcaagaaagcacaaagatgaaactgtggattttaaggctcctttgcttccagtgacctgtggtggggtgaagggaattttacataagaagaaattgcagcaaggaatcttggtgaagtgtatacagactgaggatggaaaatggttcacccccacggaatttgaaatcaaaggaggccatgcaagatcaaagaactggaggctgagtgtgcgctgtggcgggtggcccctacgatggctgatggagaatggatttctgcctgatcctccaagaatacgttacaggaaaaaaaagagaatactgaagtctcaaaacaatagctcagttgacccttgtatgagaaacctggatgagtgtgaggtgtgccgggacggaggggagctgttctgttgcgacacttgttcaagagtcttccatgaggactgtcacatcccgcctgtggaagctgagaggaccccgtggaattgcatcttctgcaggatgaaggagtctccgggaagccaacagtgttgtcaggaatctgaggtcctggagaggcagatgtgtcctgaggaacagttgaaatgtgagttcctcctcttgaaagtctattgctgttctgagagctccttttttgccaagattccatactattattatattagagaggcgtgtcaaggcctgaaggagcccatgtggttggataaaatcaagaaaaggctgaatgagcacggttacccccaagtggaggggtttgtacaagacatgcgcctcatcttccagaaccacagggcctcttacaagtacaagggttttggccaaatgggatttagactggaggctgagtttgagaagaatttcaaggaagtgtttgctattcagggaaacaaatgggaacaattgactggattagtggatgctgaaagcattcagcaaatggcaccctaaaatatgccgctggtttgccactgacttcaaaatgaggtcacttgggcacagcacatgcagggaggggcttttctctgagcctccttcatctgcccaaagacaaatcctcaaaaggaaattcaatcatcatgaatcacaaccccaagtatctcatcagccagggaagagtaagtgggatcacagggaaggatgttggcagcgacaccatcccatacaggctcttacctcttctcctgagggctgctccagacaacatttattacccagaagaccttttgtctgaaaaccagccaagctttattcaggacacacttcttgccttcactttcccacttccgtggccacctccatgcagaagccctaagcccacattctttcgatagctcacggtggtgcatgagtgtccatcatctgactcttctcggagtctcatattttgtgggactcctgtgcaaacatatgttattaaaatttttttcctcctgtt

SEQ ID NO: 125370 - DNA, 2911 bp, Homo sapiens
gtgctctttgactgagcaccgaggggcagttggcagcttcacctcagagctgcaggaaggaacggggcagtgaaaatcgaatcgggtgtgatcctaggccaagctcatggcccagcagggccagcaggggcaaatggcaagtggagacagcaatctcaacttcaggatggtcgcagagatccagaacgtagagggtcagaacctgcaggagcaggtttgccctgagcccattttcaggttcttcagagaaaacaaggtggagattgcaagtgcaataacaaggccatttcctttccttatgggcctccgagaccgctccttcatctccgagcagatgtatgaacattttcaagaagcttttagaaacctggtcccagtgacaagagtgatgtattgtgtactcagtgaactggagaagacatttggctggtcacatctggaagcattgttcagcaggattaacctgatggcctatcctgatttaaacgagatttacagaagcttccagaatgtatgctatgaacactcacctctccaaatgaataatgtaaacgatttagaagatagacccagattactaccatatggtaaacaagagaacagcaatgcctgtcatgaaatggatgatatagcagtgcctcaggaagccttgagctcctcggcaaggtgtgagccaggtttctcttcagagtcttgtgagcagttagctctcccaaaggctggtggaggagatgctgaagatgcacccagcctactaccagtgtcctgtaaacttgctatacaaatagatgaaggagaatcagaagaaatgcccaagttactgccttatgatacagaagagacctttgatctaaaaactccccaagtcactaatgaaggagaaccagagaaggggctctgtctactaccaggtgaaggagaagagggcagtgatgactgttcggaaatgtgtgatggagaagagcgccaggaagcctctagctccctagcaagacgtgggtcagtgtctagtgaactagaaaatcacccaatgaatgaagaaggagaatcagaagagcttgcttctagcctgctatatgataatgtaccaggagcggagcaatcagcatatgaaaatgagaagtgttcctgtgtcatgtgtttctcagaagaggtgccaggaagcccagaagcaaggacggaaagtgatcaagcgtgtggcacaatggatactgtggatattgcaaacaactccactttgggaaaacccaagaggaaaagaagaaaaaagagggggcatggctggagcagaatgagaatgagaaggcagaaaaacagccaacaaaatgataatagcaaagccgacggccaggtggtctccagtgaaaagaaggcgaacgtgaatctgaaagacctttccaagattagggggagaaagagaggcaaacctggaacccgcttcactcagagtgacagagctgcacagaaaagagtccgatcaagagcttcaagaaagcacaaagatgaaactgtggattttaaggctcctttgcttccagtgacctgtggtggggtgaagggaattttacataagaagaaattgcagcaaggaatcttggtgaagtgtatacagactgaggatggaaaatggttcacccccacggaatttgaaatcaaaggaggccatgcaagatcaaagaactggaggctgagtgtgcgctgtggcgggtggcccctacgatggctgatggagaatggatttctgcctgatcctccaagaatacgttacaggaaaaaaaagagaatactgaagtctcaaaacaatagctcagttgacccttgtatgagaaacctggatgagtgtgaggtgtgccgggacggaggggagctgttctgttgcgacacttgttcaagagtcttccatgaggactgtcacatcccgcctgtggaagctgagaggaccccgtggaattgcatcttctgcaggatgaaggagtctccgggaagccaacagtgttgtcaggaatctgaggtcctggagaggcagatgtgtcctgaggaacagttgaaatgtgagttcctcctcttgaaagtctattgctgttctgagagctccttttttgccaagattccatactattattatattagagaggcgtgtcaaggcctgaaggagcccatgtggttggataaaatcaagaaaaggcttatatgatcacggttacccccaagtgggaggggtttgtacaagacatgcgcctcatcttccagaaccacagggcctcttacaagtacaaggattttgggccaaatggggatttagactggaggctgagttttgagaagaatttcaaggaagtgtttgctattcaggaaacaaatgggaacaattgactggattagtggatgctgaaagcattcagcaaatggcaccctaaaatatgccgctggtttgccactgacttcaaaatgaggtcacttgggaaatagcacatgcagggagaggcttttctctgagcctccctcatctgcccaaaaacaaatcctcaaaaggaaattcaatcatcatgaatcacaaccccaagtatctcatcagccagggaagagtaagtgggatcacagggaaggatgttggcagcgacaccatcccatacaggctcttacctcttctcctgagggctgctccagacaacatttattacccagaagaccttttgtctgaaaaccagccaagctttattcaggacacacttcttgccttcactttcccacttccgtggccacctccatgcagaagccctaagcccacattctttcaatagctcacggtggtgcatgagtgtccatcatctgactcttctcggagtctcatattttgtgggactcctgtgcaaacatatgttattaaaatttttttcctcctgtaaaggaa

SEQ ID NO: 125371 - DNA, 1210 bp, Homo sapiens
atgaaagcattcctgggttggtggctggcagcccgtgccaggcccaggccagcatctggtgcaggggtgatgttggctcaagttcctcctgtggccccaaggctcagggatggcttggggcaccccctctcctggcttgtgaccctgcctgggggaaacctccaggaccggattgcctccccagtctcagctgctgaaagcaccaggcacagcagtcactctaactcggggcagatcctagggacacggcctctggcggccctttgttcagcctcctgtgaggggcgggaacctggcgctgtgggcaggacccacggccagcgcctgcacctcactgcagccagcttcatggcagcagccacttcagactgcctgccgctgccgtcagtagtgggattgctggatgaaatgggatgggcttcccgagagccaaactgctgtgattgttattgctcttctgggtctagccacccagaagagctactgggttctgggctggtactggggagtatctgcaaagggtcctgtgatgtgatctgtcttcagttctcccagtcatgggtaccagcacgtgctccagtggagatgagaaacctggatgagtgtgaggtgtgccgggacggaggggagctgttctgttgcgacacttgttcaagagtcttccatgaggactgtcacatcccgcctgtggaagctgagagggatcttccacctgccatgcgcactctccagcagagtgccggcttgtgtctagatggggaaagagcaggttcatcgggtactgggacccagcagtgtgatccagagagcagtgggagacgctggcagcaggagaaatgtgagttcctcctcttgaaagtctattgctgttctgagagctccttttttgccaagattccatactattattatattagagaggcgtgtcaaggcctgaaggagcccatgtggttggataaaatcaagaaaaggctgaatgagcacggttacccccaagtggaggggtttgtacaagacatgcgcctcatcttccagaaccacagggcctcttacaaggtcttttcatccccaactgctgagtggtggctgctaattaatgccagtagtccccagaatattacccggggtcaagtggaaccagcttcacctggaagtgacaccccgtggcctgaggccggcccctttgcctcaaagcaggaccaagggtgtg

SEQ ID NO: 125372 - DNA, 774 bp, Homo sapiens
atgagatacaagaaggaacagcctcttttcctacctaaatatgacttgggggctgatgctgccatcttgcaaccacaagaggaagactgtggatcaactcaagtcagaggaggacaccaccgcaccaaaacggaggaaacagggctcttggtaacgtcattgaaccagggaattaaacctcacgactctgtcaccaaacttctatctccccagaggtcatcagtgctgttcttactactgatcacctcaggagtccacactgactcttctaaggcagtgctggaaagccggaggtctctggggtatgaggcctcctttcttgagtactttcagtccttctacaaattgtttcctgtggataggctctatgcttggcactgcagtgaccacaggaacaccacagtcactgccatcaacacagacagaccaggattgctgaccctgtcactgacagttacaattgggcaagggagtaaaaaagcacccagtgggttctcacatatttctcctgctcccacggtgaaacagcagcccattctctgcgatgatcgggatttctctcctagttcgttcccttctactaacacaccatcccaattcgcaactaatgaagtgttaacaacaggaccaccacctggtgcaggggctgtcagtactccactatcaccagaaaaacaggccctaattgccaggcaggtggctgccctggaggagcaagaccagcgaaatggcttcgcagctgaagctgatgctggagctgatactggctgctag

SEQ ID NO: 125373 - DNA, 626 bp, Homo sapiens
atggaggctcagaaagaccagtcagtggccccagatactctggcaagacttcatgccgggtctttggagtctgtatccagtgcgctggcacaacccagggggcagtctgtggccacggggactgcttcccttgaaaaggggttgcgtgctgcaggtcgcactctagagggaccccaattcgcaactatgaaagtgttaacaacaggaccaccacctggtgcaggggctgtcagtatccacctatcaccagaaaaacaggccctaattgccaggcaggtggaggaacaaggcgagggctcttcgtgtccagtgagccagctgcagcacatcagtgagcgtgggcagcggcgtggtgtggtggtctctgtgcgtgatggtgactcttctttgtttgcaggtcaacgaagtgacggtggaacagctggtgcagcagtacccccacattactttcagcactgtcctgcaggactgcaagaggaccttgtagagagcctatcatatgggctggacccccaacatgtctggcgcctcctcctagtgctcctgcctcgcctagtccactgggatcattcagcagagcagaggagaattgtacatttggggagctgatctctcggaaggtttaa

SEQ ID NO: 125374 - DNA, 246 bp, Homo sapiens; identical to SEQ ID NO: 118051

SEQ ID NO: 125375 - DNA, 289 bp, Homo sapiens
aagccagtcacctttgaggatgtggcagtgaatttcacccaggaagagtgggactgtctagatgccagccagagggtcctttaccaggatgttatgtcggaaacctttaagaatctaacatctgtggcctgggtccgaaaaaaagaagaagaagaagaagaagaagaagaagaagaagaagaagaagaagaagaagaagaggaagaggaagaagaagaggaagaggaagaggaagaggaagaggaagagggagaggaagaagaagaagaagaagaagaaggagagaaca

SEQ ID NO: 125376 - DNA, 402 bp, Homo sapiens
atgggccaaagtaaagggatgggttgggctagttatctgcaggaggatcatgtccttaaggcacagatcgttcatgctattgtttgtggtttaagaatgcctttaagcggttttccaccctgggtgggccaggtgttccttgccctcattcagcctaggcgacagagcaagactccatcaaaaaagaaagaagaagaagaagaagaagaagaagaagaagaagaagaagaagaagaggaagaggaagaggaagaggaagaggaagaggaagaggaagaggaagaagaagaggaagaggaagaggaagaagaagaagaagaagaagaggaagaggaagaagaagaagaagaaggatctaaaatcaataatttaagcttctaccattggaaattagtaaaataa

SEQ ID NO: 125377 - DNA, 259 bp, Homo sapiens; identical to SEQ ID NO: 118473

SEQ ID NO: 125378 - DNA, 372 bp, Homo sapiens
atgccagctacctgggaggctgaagcaagagaatcccataaacgggagttcgagactcacctaggcaacatagcgaaaccccatctgaaaaagaagaagaaagaagaagaagaagaagaagaagaagaagaagaagaagaagaagaagaagaagaagaagaagaagaggaagaagaagaggaagaagaagaggaagaagaagaagaaggagaagaagaagaagaagaagaagaagaagaagaagaagaagaagaagaagaagaagaaggggaggaggaggaggaagaggaagaggaagaagaagaagaagaagatgaggaggaggaggaggaggaagaggaagaggaagaagaagaagaagaactgctctag

SEQ ID NO: 125379 - DNA, 441 bp, Homo sapiens
atggggttctctttcattttgaatgatgatgagatgacttacgataacaagtctgacttcaaagtgagcgagacactgtcgaagaagaagaaggagaagagggagaagaagaagaagaagaagaagaagaagaagaagaagaagaagaagaagaagaagaagaagaagaagaagaaggaggaggaggaggaggaggaggaggaggaggaggaggaggaggaggaggaggaggagaagaagaagaagaagaagaagaggaagaggaagaggaagaagaagaagaggaagaggaagaggaagaggaagaagaagaagaagaagaagaagaagaagaaggagaagaagaagaaggggaaggggaaggggaggaagaggaaaaagaagaagaaggaaattctgccattttcgacaacatggatggagctggaaacattatactaa

SEQ ID NO: 125380 - DNA, 267 bp, Homo sapiens
cttgaagaagaagaagaagaagaagaagaagaagaagaagaagaggaagaggaagaagaggaggaggaggaagaggaagagaaggaagaggaagaggaagaagaagatgaagaagaagaagggcaacttctacaacactgcgccccaaaaagcatgattaatcagcgtatctcaatatctcctgctacaagcttccaaaaagcagaagtattatcatttcacttgactaatgaggaagcagtaaatggaggaggagataggtgtggg

SEQ ID NO: 125381 - DNA, 234 bp, Homo sapiens
atgctgaagaagaagaagaaggagaaggagaaggaagaagaagaagaagaagaagaagaagaggaagaagaagaagaagaagaagaagaagaagaagaagaagaagaagaagaagaagaagaggaagaggaagaggaagaggaagaggagaaggaagaagaagaagaagaagaagaagaggaagaggaagaggaagaggaagaccatttgcacctagctgttttctcctattaa

SEQ ID NO: 125382 - DNA, 2502 bp, Homo sapiens
atggtgagaccctttctctacaaaaaaataaaagaagaagaagaagaagaagaagaagaagaagaagaagaagaagaagaaggagaagaagaagaagaagaagaagaagaggaagaggaagaggaagaggaagaggaagacaaagacgacgaagaagaaagaagaagaaagaagaagaagaagaagaagaagaagaagaagaagaagaggaagaagaagaagaagaagaggaagaagaagaagaagaagaagaaaaaaaacattctttataggatccagatctgggagagaaagaaaacaaaggacaaaggaaaagaaaacttgcccgtgggacttcccagccatccctttcacctggaggctccgatcccctgggcgcttgataattctctgaggtcatggagatcagatacatggacactcatccaccaacaaaggctttcagacacaaaccaagctgcctcccagagtacagaggtagcaactctgctcatcactacagaggcactgatgtcactcggtgtccctctggaggagcaaatggacccacaaccccactgctttgctccccaccagctcctcccacacgctggtcctaacgctttgctgagcacacagtggactctccacgaacacttgctgcttgatcccttcagccttgcaaatgccgccatccgcctggacagcccaaagaggttatgtgccccttttcccctcctggtcctggaagactgcactgttaacaccatctccacagggttaacgagaattacatgccagactttagataaagcatcaaaagactctcttcaagcatctcacaatgaaactctgagcatttgcagcttacctcttacatggccccattctgagaaagctgaaagaaaccctcagtgtggcaagaagcactgtttaaaaacccctgcccactccactgcctcttggggtacaaagcccttgcagagaatcaacaatagcaagaccctggaagaaggaggaggaggagaagggcggggggaggagggggaggaggaaggggaaagggaagcggaaggggaaggggaaggggaaggggaaggagaaggagaaggaaaaggggaaggagaagtaggagaaggagaaggaggggaaaactatcctaccgttttctgcagtggctacaccattcccaacagtaacgatatcaacttgtcttcatgctccacaagaggcactcaatcactaaaggctatgactaatgatagcacagtggcccagactgaagaaatggggcaaaagaaaaactgtggcaaagaggatgtagctaaaaggacaaattcaaggtggacatgcatcccagagtgtggagatcatcttggcaacactaagggacaagcacgaagcattccattgttcctgggaatgtatgtccctgggaccaattactgccaacgcatgtgtgtggaagtgatggtgtcacttctgggtcaaagtgtggctcccccatctctctgctgctggctggatgacgctctccaaagttctaagggatggcagagccataagagagggggagcctgggatcctgaatcccccccaagaaagaaagatacccatggaccagcttcttggctgctgggtgagaatgggttgcagacctgcaggggcacatctgaagcagagatgcagggggaaggccacaaagggcagtcaggcctggagagggaggaactcttcagaaggcggatgattggaagtgagaagcgggcagcagagaggtggcagcaaggatcatacaggggattctggcttggccattggggaggtggaggtgttgtttaccaagatgcagagccccagagcaggaagggttttgtgaaggaagatgctcagttagggacgcagtgggccagaggacaggcacttcaaaccttagaaccaaataacggtttgggagcaatgcgagaagaggaagcaaggaagaggggattggagaagaagaaagagggggaggaagacagaggagaagaagaggaagggaagagaaagaaaaggagaaagaagagaaggaggaggagaaggaagcaaaattggaagctatcagcattaaaaatgatgatccataaagaagctctatcaaaaatcaacacagaaaacatcactctgcagccagcggtaattcctgaaccggagaacctcacacaggagaaatccaaaaaatacaggctagccagagttccaagtgtgaaggggggaactaaagcagtcctattttcacatcatcaactgctcagctggattgtagcagttaaacatgagaagtttcaggtgaagcccacagcagctgtcctacaaagtcatagctctgtttcacatgagcagaggcatttgttcctggagtccaagttggaggccatcttggtctggactccctcaaaagcaaagcctgtgatatggactggggtacagatcgtttatttgggaggtgatcctcggtacagggatgaggcagtaggaaagtga

SEQ ID NO: 125383 - DNA, 657 bp, Homo sapiens; identical to SEQ ID NO: 119144

SEQ ID NO: 125384 - DNA, 501 bp, Homo sapiens
attaagcagagccacatgactagatctggccaatgtgtttctggaaccaataacttatttacttgcagaagaccgtccagcaccctccaccaagaagatgcccaagtagggttggtgcctaggccctatggttgcggctcaattcgtgcaacctcagttaccagggggtcccggggccagcgcggaattcgcggaattcaccaagccgcagctgcctgccgctgaatgcgaagagggcgcaggagactggcaggtacgctgcaaggctaaggcggaatacagatccgtgttaggcttttgacaaacagcccagggggcggggtagggtcgtgaaggaggaggttttgaaaaaaaaaaaaaaagaagaagaaaaagaagaagaaggagaagaagaagaagaagaagaagaagaagaagaagaagaagaaaagaagacgaagaagaagaagaagaagaagaagaagaagaagaagaagaagaagaagaagaagaagaagaaga

SEQ ID NO: 125385 - DNA, 966 bp, Homo sapiens; identical to SEQ ID NO: 119455

SEQ ID NO: 125386 - DNA, 400 bp, Homo sapiens
  misc_feature (1)...(400): n = a,t,c or g
atggctgctgcactccagctgggagacagagcaaaaccctgttttaaaaaagaaaaagaaagaagacagagaagaaagaaaagaaaagaaagagagaaaggaaggaaggagaaggagaaggagaagaagaaagaagaagaagaagaagaagaagaagaagaagaagaagaagaagaagaagaagaagaagaagaagaagaagaagaagaagaagaagaggaagaagaggaagaagaagaggaagaggaagaagaagaagaagaagaagaagaagaagaagaagaanaagaagaagaagaagaagaagaagaagaagaagggaaagacactgagttaacagggctgccccagggctcagacaggaccagaatagacctggaggatccacaagctggccaag

SEQ ID NO: 125387 - DNA, 708 bp, Homo sapiens; identical to SEQ ID NO: 119447

SEQ ID NO: 125388 - DNA, 420 bp, Homo sapiens
atgcccttagaaggaggagtcatcccagaggagggggatgaccaagtgggcaggagaccgagccaagaaagcctgaccatcccaagtgttagtgaggatgcaatggaaagcagtaaaagcaccttgcaaaacagtttgacaattacttcagaaattaaaaacacacctaacttacggcccagacagtccatgcctatgaatctattggcagagaagctatctcctctctgcagctggttatccatcatctgctcagctctggctgagcccagggcttttatagacctcagagtggaagaagtgcatgctgattcatccatgggcagccatgggcagtcctggaaaaggcaccacaagttccaaatacagtccatgggactggtagcccagctcccagccttcaggtcctccctggcctga

SEQ ID NO: 125389 - DNA, 642 bp, Homo sapiens; identical to SEQ ID NO: 121062

SEQ ID NO: 125390 - DNA, 2347 bp, Homo sapiens
tctaatgctggtggttatattcaatgggactgagagaatagaggatcttaggaaacctccatcctttgatgccattcttggtggggggcttagagtcctcttcttccagaacgaagcacatccccctttcgccagctggcgtaataacgaagaggcccgcaccgatcgcccttcccaacagttgcgcagcctgaatggcaaatggcgcctgatgcggtattttctccttacgcatctgtgcgaaacgctggtgaaagtaaaagatgctgaagatcagttgggtgcacgagtgggttacatcgaactggatctcaacagcggtaagatccttgagagttttcgccccgaagaacgttttccaatgatgagcacttttaaaggtctgctatgtggcgcggtattatcccgtattgacgccgggcaagagcaactcggtcgccgcatacactattctcagaatgacttgggtgagtactcaccagtcacagaaaagcatcttacggatggcatgacagtaagagaattatgcagtgctgccataaccatgagtgataacactgcggccaacttacttctgacaacgatcggaggacccaacgagctaaccgcttttttgcacaacatgggggatcatgtaactcgccttgatcgttcggaacccgagctgaatgaagccataccaaacgacgagcgtgacacccgatgcctgggacaatggcaacaacgttcgcaaactattaactggccaactactactctagctcccggcaccattaataactggatggaagcggataaagtctcacatccaggtcatgctgatataagaggtgggttcacagtcttgggcagctctgcccttgtggctttgcaagaaatacaaaaaactgtcagagactattatgaacacttctatgcatgcgagctagacaacatagtagaaatggaaaaattcctggaaacatacaaccacacaagattgaaccgagaagagattgaatccctgaacagaccaataacaagttccaaaattgaatcattaataaaaaccctacaaactagaaataacccaggaccagatgaatttacagccaaattctaccagatgtataaggaagagctgggcaatgaacagcatttatcaattctctcttccaaagagaaagaagagctaaaccatggcaaatctccaaatacaacctcctcaggagtaggaggagcagaaggagaaggagaagaagaagaagaagaagaagaagaagaagaagaagaagaagaagaagaggaagaagaggaagaagaagaagaagaagaagaagaagaagaagaagaagaagaagaagaagaaagaagaaagaagaaagaagaaagaagaaagaagaagaaagaagaagaaagaagaagaaagaagaagaaaagaagaagaaaattagccgggtctgtgggtcagacctcagcaggtggtgcctcgtgtgaggaacgctgcagcggcctggtgattgtgacgtatcccttgacatcgaaggtgaaaagggctgtgcagtcatcttcacaaccggcagaccaggagactccctctggtgcctatgctaccagggccctgggtttcaagcacaaaactgggcagccttttggggaagccactgagctagctgcagaaggatcacaactccttgcagcaagggaacaaaactggatgaacaatgagtttgatgaattggaagaagtaggcttcagaagaataaccagtttagagaagaacataaatgacctgatggagctgaaaaacacagcaagaaaacttcatgaagcatacacaagttgcaacagccaaatcgatcaagcagaagaaaggatatcagagattgaagatcaactcaatgaaataaagcaagaagacaagattagagaaaaaagagtgaaaagaaatgaacaaagtctccaagaaatgtgggactatgtgaaaataccaaatctaggtttgattgttgtacctgaaaatgatggggagaatggaaccaaattggaaaacactctgcaggatattatccaggagaacttccccaacctaacaaggcggatcaacattcaaattcaggaaaaacagagaacaccacaaagatactcctcgagaagagcaaacccaagacacataattgtcagattcaccaaggttgaaaagaaggcaaaaatgttaagggcagccagagagaaaggtcgggttacccacaaaaggaagcccatcagactaatgatggatctcttggcagaagagggtggggaccaatattcaacattcttaaagaaaagaattttcagtcgagaatttcatatccagccaacctaa

SEQ ID NO: 125391 - DNA, 338 bp, Homo sapiens
tccagctgggcttctgtagcacctgccgttctccactttgtgttatgagtgttgatatagctgtctcatgtttcctcaagatggggagtaactggagaaggaagaagaagaagaagaagaagaagaagaagaagaagaagaagaagaagaagaagaagaagaagaagaagaagaagaagaagaagaagaagaagaagaagaagaagaagaagaagaggaggaggaggaggaggaggagaactagaatgtggaaagatataagaaggaagggcaatggtaaaagcaaaggaggcaagaaaaagggctcatccttccagacggtgtcggctctccaccgg

SEQ ID NO: 125392 - DNA, 567 bp, Homo sapiens
atgaagcatcagcattttgcccttcttgttccagagaaatttttaatagcacaaagcacagcctcccgtgttgatcggagacagatctggagggatgtgtcctcggagcggggtgagatttcacaatgtttgaaggtaggaacatctcttaatagcactgacgtgagtgcagttgaagctgtcagagccacggttctgggaagtggcacgctcacccccacagtcctccggagtaatgctgggccatatactcgcatttccactgtcccagcttgcctgctgggccaagaagaagaagaagaagaagaagaagaagaagaagaagaagaagaggaagaggaagaggaagaggaaggaggaggaggaggaggaggagaaggagaagaagaaaagaagaagaagaagaagaagaagaagaagaagaagaagaagaagaagaagaagaagaagaagaagaagaagaagaagaagaaggagaagaagaagaaagaagaaagtcataaattattttcaaagcagggcatctggagtccgatcagcattgccacagatggacccagagcctga

SEQ ID NO: 125393 - DNA, 654 bp, Homo sapiens; identical to SEQ ID NO: 119453

SEQ ID NO: 125394 - DNA, 2187 bp, Homo sapiens
atgaacattgatgcaaatatccccaataaaatactggaaaatcgaatccagcagcacatcaaaaagcttatccaccatgatcaagtgggcttcatccctgggatgcaaggctggttcaatatacgcaaatcaataaatgtaatccagcatataaacagaaccaaagacaaaaactgcatgattatctcaatagatgcagaaaaggcctttgacaaaattcaacaatgcttcatgctggaaactctcaataaattaggtattggtgggacgtatctcaaaataataagagctatctatgacaaacccacagccaatatcatactgaatgggcaaaaactggaagcattccctttgaaaactggcacaaggcagggatgccctctctcaccactcctattcaacatagtgttggaagttctggccagggcaattaggcaggagaaggaaataaaaggtgttcaattaggaaaagaggaagtgaaattgtccctgtttgcagacgacatgattgtatatctagaaaaccccattgtctcagcccaacatctccttaagctgataagcaacttcagcaaagtctcaggatacaaaatcaatgtacaaaaatcacaagcattcttatacaccaataacagacaaacagaaaaccaaatcatgagtgaactcccattcacaattgcttcaaagagaataaaataccgaggaatccaacttacaagggacctgaaggacctcttcaaggagaacgacaaaccactgctcaaggaaataaaagaggatacaaagaaatggaagaacattccatgctcatgggtaggaagaatcaatatcgtgaaaatagccatgctgcccaagaattggaaaaaaactactttaaagttcatatggaaccaaaaaagagcccgcattaccaagtcaatcctaagccaaaagaacaaagcgggaggcatcatgttacctgacttcaaactatactacaaggctacagtaaccaaaacagcatggtactggtaccaaaacagacatatagatcaatggaacagaacagatccctcagaaataatgccacatatctacaactatctgatctttgacaaacccaagaaaaacaagcaatggggaaaggattccctatttaataaatggtgctgggaaaactggctagccatatgtagaagcctgaaactggatcccttccttacaccttatacaaaaatcaattcaaggtggattaacgacttaaacgttagacctaaaaccataaaaaccagagaagaaaacctaggcattaccattcaggacatcggcatgggcaaggacttcatgtctaaaacaccaaaatcaatggtaacaaaaaccaaaattgacaaatgggatctaattaaactaaagagcttctgcacagcaaaagaaactaccgtcagagtgatcaggcaacctacaaaatgggagaaaattttcacaacctactcatccgacaaagggctaatatccagaatgtacaatgaactcaaacaaatttacaagaaaaaaacaaacaaccccatcaaaaagtgggtgaaggacatgaacagacacttctcaaaagaagacatttgtgtagtcaaaaaacacatgaaaaaatactcaccatcactggccatcagagaaatgcaaatcaaaaccacaatgagataccatctcacaccagttagaatggcaatcattaaaaagtcaggaaacagcagaaagcatatccagaaaaaagaagaagaagaagaagaagaagaagcagaagaagaagaagaagaagaagaagaagaagaagaagaagaagaagaagaagaagaagaagaagaagaagaagaggaagaggaagaagaagaagaagaagaagaagaagaagaagaagaagaagaagaagaagaagaagaagaagaaaagtgctcactgaagcacactgaagctccctgtgtaaaaggaatagaaactattttctggaacaaattctcactgtgtgacatcacaaagagttatttatctggggtccaaaaacttgaggaacgtgcacacaaagtgaagttagcactgaagtttaagaaggaaattaaaatggctctccacggtggaaacccaatttggttgtccagtgtcaccctggtgtttggggtcctcatgtactgggagatggaagaatgtgatgattga

SEQ ID NO: 125395 - DNA, 873 bp, Homo sapiens; identical to SEQ ID NO: 119143

SEQ ID NO: 125396 - DNA, 443 bp, Homo sapiens
cgggtcgacgatttcgtgtgctcggtgcgctgagctccgcggctccgcgagccggttccgtccccttcccgccgccgccatgaagtggatgttcaaggaggaccactcgctggaacacagatgcgtggagtccgcgaagattcgagcgaaatatcccgacagggttccgcctaactatgggacagctttacgagaaggaaaaagatgaagatggattcttatgtgtggcctacagcggagagaacacttttggcttctgagggccattgctgggctaggtgcaccgtaactgcttgtgtatcttgtaaatagccagccattttcagttattataccagaacctcttcacatagacctattagtgcatttgtaactggatttatttcttaatatattggaaggttttggttccttagactagtaaattatcatacagagttcta

SEQ ID NO: 125397 - DNA, 989 bp, Homo sapiens
  misc_feature (1)...(989): n = a,t,c or g
ggctgccgctgccgctgccgccgtcgttgttgttgtgctcggtgcgctgagctccgcggctccgcgagccggttccgtccccttcccgccgccgccatgaagtggatgttcaaggaggaccgctggcgtggaacacagatgcgtggagtccgcgaagaattcgagcgaaatatcccgacagggttccggtgattgtggaaaaggttctcagggctctcagattgttgacattgacaaacggaagtactttggtcccctcggacatcactgtgggctcagttcatgtggatcatcaggaaaaggatccagcttccttctgaaaaggccgatcttcctgtttgtggataagacagtcccacagtccagcctaactatgggacagctttacgagaaggaaaaaagatgaagatggattcttgtatgtggccctacagcgggagaggaacactttttggcttctgagggccaattggtgggctaggtgcacccgtaactgcttgtgtattcttgttaaattagccagccattttcagttattataccaaaacctcttcacataaacctattaggtgcatttggaacctggatttatttcttaatacattgaaagggtttgtttccttagactagtaaaattnatccatacagagttttattttgaagttttgtctttttgtgcattgtcctccatgcctggtattctcccaggaaacttgtcccttctggaaatcataatgaatgatatttctatatcgaagtgaggtaggtgcggtattaaagtgaaagggaaggtgatgcatttattctgggttatgcttgaagtgttagatggctaagtattaaaattatccaaattaaatccttagcagtcagaacacttgcttcactagaatatgccaactgccaatcatgttggactgagctaatttgttcctctttctgaaacaattaaggtaaataattaacaataaaaattctacttataaagg

SEQ ID NO: 125398 - DNA, 969 bp, Homo sapiens
atggtcgtgctttcggtccccgccgaagtcaccgtgatcctgttagatatcgaaggtaccacaaccccgatagctttcgtgaaggttggtgaaggaggaccaaagaaacagaaatacccaacagggagaaaaagagcaggggaaacaggaaacgaacgccagacagcgggggaaaaaaaccaaactaaggacgcgagagggaacacccaagagcacggggaagggaagagaaccccagggggcagggcaagtaggagaaacagagaaagggaaagcctagacaagaacaggagcaaaagtggccatcgagctccccacaaagagttgggcaatggaaagaaaccaagcagaagtcgccagcgccgggcgcagacagccaccatccggagcagactggccacggagctagtcggaagcagcggccgccgcagcggctccgcactggcgaaccgagggcagaaaaaggcggggttgacggctttttgggattttgccgagttcggaaccaccatcaaacaggattttcgcctgctggggcaaaccagcgtggaccgcttgctgcaactctctcagggccaggcggtgaagggcaatcagctgttgcccgtctcactggtgaaaagaaaaaccaccctggcgcccaatacgcaaaccgcctctccccgcgcgttggccgattcattaatgcagctggcacgacaggtttcccgactggaaagcgggcaggattttgccgatggcggaaccaccatcaaacaggattttcgccagctggggcaaaccagcgtggaccgcatgctgcaactctctcagggccaggcggtgaagggcaatcagctgttgcccgtctcactggtgaaaagaaaaaccaccctggcgcccaatacgcaaaccgcctctccccgcgcgttggccgattcattaatgcagctggcacgacaggtttcccgactggaaagcgggcagtga

SEQ ID NO: 125399 - DNA, 2082 bp, Homo sapiens
  misc_feature (1)...(2082): n = a,t,c or g
cggccgccttttccagttccaggtgtgcagaagtgtcctctccccacgcgcggcgggctgcacattggtcgctggctccgagatcgcgcggggccgccggaagcccaagacggtaccgggggccgcagccgcagccggcgccgccctccagccctccccaacagcaggccgagtcccgtagcatccggtagggaaatggtcgtgctttcggtccccgccgaagtcacccgtgatcctgttagatatccgaaggtaccacaaccaccgattgctttcgtgaaaggagcattttatttccttacatcgaaagaaaaatgttaaaagatgtatctgcagacacattggggaagaagaggagttccaagcaggatgtcagtctttttgaaggaaacaaggcttgaagaggacgcccacctggatgggggctgttcctatccctggcaagcatctgggaattggagttggatgattctgcaacagatgattccaagccgtggtagataatgtgtgctggcagatgtcccttgatcgaaagaccactgcactcaaaacagctgcagggccacaatgtggagggcggcattcacagctgggcgcatgaaaagcagagttctttgcagatgtagttccagcaagtcaggtaagtggagagaggccggaaatgaaggtgtacatctattcctcagggagtgtggaggcacagaaactgttattcgggcattctacggagggagatattcttgagcttgtttgatggtcacttttgataccaagattggacacaaacgtngacgagtgaaagttacccgaaagacttgcagacagcattgcggtgctcaaccaaacaaacattttgttttctggacagatgttacttcgaggagggccagtgctggcttgagggaagcaggatgttgcacgttagctgtggtgggtgagaccagggcaacgcagggattaacagatgattgaggaagacttactacagcctcatcacatcctttcagtggaactattacctgccttcctcaacctaggagaagggtttgtttaagggcagaccgccctgttccccagagttgtccctgtagtgtctaggtttattctaatggtaaaagtaacttacttaaaaaacatatgtacacatatgtatgcaaggtatgtatatatgtgtatgctccagattaacttccataggtacataagtgaaaggaagtcttcagtttcagtgaacacaaaactttatttaaagatgctttataatgtagaaattggtttcaaatcatactctaacccttagtgagggcaaagtgtagttggtaaaagaaattgctaaatacctatctaatgtgctatgttcatcaaatcgtgtactaaaatggaaagctagttttgagaaattattcacaagccttgttattttaaaaatgaaatatttcaaagactgaatattttcaaagaaaaggaataattcattgcccttgtgatttagaagattataacagctgtatttcatatttgcctccttatatatatcaaagaccaaggtatttccttccggcttcaaaaggaaccaaaattgggaaagaaaactccacttgagtcttgatcaaaccaagtgtccttttacttaaggaaggaaacttgggtaaatcaattgtgggcaccccacagccaagccagttgcccttacccagtgaaaaaaggtggcactggaggtaacatcttaaaaccagagatgtggttcttaaatgtttaacagaacagttcctaatcctgcccacggtgttatcattagtagattttatagttgccctttcctaacctacttaggcacagtttgaggaatacggttaattggctatttacctatttaaaaagttttactgaaattcagtcccataacctttagggtggggccctaatatgtaaagattttcctctgggaatgggatgtgagaaatcgtaaattttgataacagcagtatttatcctggtttaattctaatacggatgtcatgttaatttcatgttgtgattaataaaagcattttttcttccctcaaaaaaaaaaaaaaaaaa

SEQ ID NO: 125400 - DNA, 858 bp, Homo sapiens
aagaccttgggaataaaggacaaccttacaggcttagtcctcctgttcttccactgtgctccttaaaggaaattcaattgtctactgataaatttttcagaatggaaccatctgaaattaccaatggttgttttctttctattttaacaagggagtaaatgcttctttaattgcagcgggacccttctgagacagtgtctgtgaatgatgttttggcccgagctgcagccaagggtctgctggatgggattgagttgggtaaatcatcaaaacgggagaagaagaagaaaaaatcaaaaacatcattgacaaaaggtgccactactgataatggcatccaaatgaaaattgcttgagttcctgaatcgagaaactaaagccagtgctaatctatcagagactgtaacaaaaccacctcttccccagaaaaatactgctcaagtgggggcttcctcacagaccagaaaacccaacaagctggccccccatcctgcagtgcctgcatttgtgaagaacacttgtccctccagaccgcgtgaacggcagacacacttcttaagacctcggccagaagacagaatggttgctctgaaacccatcaagattgttctgcctccagtctttatgccattttcaagtccccaagggatcagatctcggatgccaactcaacatttgtactgtcgttgggttgcacccaaggcacttgtgcccacctgccttcccacacactcactatccagaaaagaggaaaagcctaaaagaatggacacacctttcctcccttactccaggcctccctcgggcgaatggcttttgattgtcttgtggttttttaataggagccaaagaagcagg

SEQ ID NO: 125401 - DNA, 237 bp, Homo sapiens
atggagaccagcagcttaaggatcaccccagacctgctgaacgctagagctaccgaaagagaaagtcctaaggtggggccaataattggtgttttaccaagacctccaggtaccctggcatccatctgtggtggcctcgtgatgcttttgcctgaaatcacgggtattgccttgccagaaacagtggatgatgtagaaaaacttggcaggcattgtccaaaattcaatgcaccctaa

SEQ ID NO: 125402 - DNA, 3229 bp, Homo sapiens
  misc_feature (1)...(3229): n = a,t,c or g
ctgcgggcggcgggcggcgggcgcaccatgccctccttcgacgaggcgctgcagcgggtgggcgagttcgggcgcttccagaggcgcgtgtttttgctgctgtgcctgacgggcgtcaccttcgccttcctcttcgtcggcgtggtcttcctgggcacgcagcccgaccactactggtgccgcgggccaagtgccgcggcgctggccgagcgctgcggctggagcccggaggaggagtggaaccgcacggcgcccgcctcccgcggcccagagccccccgagcgccgcggccgctgccagcgctacctcctggaggcggccaacgacagcgcctccgccactagcgctctcagctgcgcggacccactcgccgccttccccaaccgttcggctccccttgtgccgtgccgcggcggctggcgctacgcccaggcccactccaccatcgtcagcgagtttgaccttgtctgtgtcaatgcgtggatgctggacctcacccaagccatcctgaacctcggcttcctgactggagcattcaccttaggctatgcagcagacaggtatggcaggatcgtcatttacttgctatcctgccttggtgttggcgtcactggggttgtggtggcctttgcaccaaacttccctgtgtttgtgatcttccgcttcctgcaaggtgtatttggaaaggggacgtggatgacttgctacgtgattgtgacagaaatagtaggttcgaaacaaaggaggattgtgggaatcgtgattcaaatgttctttacccttggaatcataattctccctggaattgcctacttcatccccaactggcaaggaatccagttagccatcacgctgcccagctttctcttcctcctttattactgggtggtccctgagtctccccgttggctgattactcggaagaaaggagataaagcattacagatcctgagacgcattgctaagtgcaatgggaaatacctctcatcaaattactcagagatcactgttacagatgaggaagttagtaatccatcctttttagatctggtgagaactccccaaatgaggaaatgcacacttattcttatgtttgcttggttcacaagcgcagtggtgtatcaaggacttgtcatgcgcctgggaattatagggggcaacctctatatagactttttcatctcgggcgtggtggaactgccaggagctctcttgatcttactaaccattgagcgccttggacgacgcctcccctttgcggcaagcaatatagtggcaggggtggcatgccttgtcactgcgttcttaccagaaggaatagcatggttgaggaccacagtggctacattgggaagactagggataaccatggcctttgaaattgtttatttggtaaattcagaattgtacccaacaacattacgaaatttcggagtttcgctctgttcaggtctgtgtgattttgggggaatcatagccccatttctgctctttcggctagcagccgtgtggctagaactacctctgatcatctttggtatcctggcatccatctgtggtggccttgtgatgcttttgcctgaaaccaagggtattgccttgccagagacagtggatgatgtagaaaaacttggcagtccacattcctgtaaatgtggcaggaataagaaaaccccagtttcccgctctcacctttgaggcccccgacaaagacagaaagaaggagctatccagggagctgatcctccttgcaaagctgtgccttgcaggagatgcacgtgtgcatttcagcttacattcatgccgcgctgtttgttaatactgtattaaaggaccttcaattctattccagagttatttttnattattaatgttgggatgagttaggatttgtaatgctgttgaagtttctgggaacacataatatgtagccagtttaacaaagaagctgtcaggtgcacagcccttcctgggtttttttcttgtgttccctgtggtctctgacccattaggctaaagagagacaagagaagcccccaacctgattctcatgacagctccatcaagaatgtgggatgtgccgaccaaggatttgagaaagttgtacagaaatgtgttcatcaaatctggtcaagggactaagctcctagctgaccattcattctgaagattgcatggaggatgaacatctgggaatcctgttaatgagaaggctgaatcacaggcacctgggccaaagggtgtgagcattcatgttctctgctcaccttggtttccgcacaccttcgcaatgtgaacaggtcaggagtccctcccgtccacctcctctgtaacagctggggttccaggcatggtttaggccctgttccagcaataagaaccaatctgctgtacaatctgaggacttggctgtgttatttacaaaatgatgctgtggttctgagattatttgggacatttttggctctcctttagtggacacctagagccacagattcccttctttactaaacaaatcccatggattctgatttctgggtcttaggattttaaaagtgaagggatatttttcttatatttgtgagttcagttccgatggtgcccgtggtcaaaagcgaaaaacatggacaattcctattcattcttagcactttgacatgtcttggggaaaagctttacattttaatttaaaagaaagatcaattatatccatgcttaacaggatcagcaggagctttataaatgactttacagagactaataagggattgatctttctttttttgttatcgaggcttttgaaatgtggaacttgtgtgttctgctttatatgttatattcaatatcttttcagatgcagtctatattttatgctgagttttaaaaatgaaatactttatgcaaacaggcaaaattggtaccaaagggaaacattaaccatgaggaagagcatttttctaaggagaacaggtgacaatatacacatgtcgcgtaatcgtaaaatgagcatcttagtctttaaaacacatcagaattgaatacgaataatctatttgtcgatgaaataaacacaactctttgaggatttgagactacattcaccctttattcacagtcacttgcagttttgcttttctctccatttctctgctgtaagatgactgttgcattgttgaattgtattttgagtggatatttttgtttggtaacaattaaaattttaaatcgt

SEQ ID NO: 125403 - DNA, 237 bp, Homo sapiens; identical to SEQ ID NO: 125401

SEQ ID NO: 125404 - DNA, 3229 bp, Homo sapiens; identical to SEQ ID NO: 125402
  misc_feature (1)...(3229): n = a,t,c or g

SEQ ID NO: 125405 - DNA, 277 bp, Homo sapiens
cgtcgacttttttttttttttttgagacagagtcttgctctgtcacccaggctggagtgcagtggcgcgatctcagctcactgcaagctccacctcccaggttcatgccattgtcctgcctcagcctcccaagtagctgggactacaggcacccgccaccacgcctggctaatttttttgtacacttttagcagagatggggtttcagcatagcccggatggtctcaatctcctgactcacggtcgaccgggggctaatttagtagtagtagtagta

SEQ ID NO: 125406 - DNA, 420 bp, Homo sapiens
atgagccacgcgcagtggcgggtgcctgtagtcccagctactggggaggctgaggcaggagaatggcatgaacctgggaggtttttgattggtcaaggagcacatgtaggggctgtcaacagtgaaggagatacacctttagatattgcggaggaggaggcaatggaagagctacttcaaaatgaagttaatcggcaaggcacacagtgcaaggtgtcagtggatctgtcattctggggtctggaagacggtggccctcttctcatggctgcgctaggcagtaccccagtggggattctgtgtggggtctctgacctcacatttcccttccacactgccctagcagaagttctccatgagggctctacctctgcagcagacttctgcctggacatccaggcctttccatacaccctctga

SEQ ID NO: 125407 - DNA, 1458 bp, Homo sapiens
atgggtgtgcagaagtcaagaactgaggtttgggaagctctgcctagatttcagagggtgtatggaaaggcctggatgtccaggcagaagtctgctgcagaggtagagccctcatggagaacttctgctagggcagtgtggaagggaaatgtgaggtcagagaccccacacagaatccccactggggtactgcctagcgcagccatgagaagagggccaccgtcttccagaccccagaatgacagatccactgacaccttgcactgtgtgcctagaaaagacagagacactcaacactggcccatgaaagaagccaggagtggggctgtaccctgcaaagctacagaggcagagctgtccaaggctgtgggagcccacctcttacatcagcatgacctggatgtatttattcgcgataagctcatggagcggcgtaaccgtcgcacaggaaggacagagaaagcgcggatctgggaagtgacggacagaacggtcaggacctggattggggaggcggttgccgccgctgctgctgacggtgtgacgttctctgttccggtcacaccacatacgttccgccattcctatgcgatgcacatgctgtatgccggtataccgctgaaagttctgcaaagcctgatgggacataagtccatcagttcaacggaagtctacacgaaggtttttgcgctggatgcggctgcccggcaccgggcaggctatgatgttaatattaaagactatgatggctggacacctcttcatgctgcagctcattggggtaaagaagaagcatgtcgaattttagtggacaatctgtgtgatatggagatggtcaacaaagtggcttgcattgatgacaatgttgatatggtgaagtttctggtagaaaatggagcaaatattaatcaacctgataatgaaggctggataccactacatgcagcagcttcctgtggatatcttgatattgcagagtttttgattggtcaaggagcacatgtaggggctgtcaacagtgaaggagatacacctttatatattgcggaggaggaggcaatggaagagctacttcaaaatgaagttaatcggcaaggggttgatatagaagcagctcgaaaggaagaagaacggatcatgcttagagatgccaggcagtggctaaatagtggtcatataaatgatgtccggcatgcaaaatctggaggtacagcacttcacgttgcagctgctaaaggctatacggaagttttaaaacttttaatacaggcaggctatgatgttaatattaaagactatgatggctggacacctcttcatgctgcagctcattggggtaaagaagaagcatgtcgaattttagtggacaatctgtgtgatatggagatggtcaacaaagtgggccaaacagcctttgatgtagcagatgaagacattttaggatatttagaagagttg

SEQ ID NO: 125408 - DNA, 549 bp, Homo sapiens
ttttttttttttttgtagagcctgggtcttgctatgttgaccagactggtcaagctaactcctggactcaagtgatcctcccacctcggcctctcaaagtgttcagattacaggcgtgagcatgctcagccaacataaactttttaggtcactccaaaaaaggggaactttaactttctgatacagagaatgcctgttttttgtttgtttgtttttgagaccgagtctcgctctgttgcccaggctggagtacagtggcacgatcttggctcactgcaagctctgcctcccaggttcatgccattctcctgcctcagcctcccgagtagctgggactacaggcacccgccaccgcgcctgggataatgttttttgtatttgtagtagagatggggtttcaccacgttgggccagggatggtcttgatctcctgacctggtgatccgcctgcctcggcttcccaaagtgctgggattacaggcgtgaaccaccgtgcccggccaagattctttataaagcattaattacatggccacctccttttaaccc

SEQ ID NO: 125409 - DNA, 451 bp, Homo sapiens
tttcgtgggaatctttatcttctcgtctagttctccgaggttgaaggctcggcctgctcagagaaggaaactgaggtccaccgagttggagaaacctactcaacaccaggactaacttcttcagtgcttagagtgtgagaaaaatggcaaatatgaatagtgattctaggcatcttggcacctctgaggtagatcatgaaagagatcctggacctatgaatatccagtttgagccatcggatctaagatccaaaaggcctttctgtatagagcccacaaacatcgtgaatgtgaatcatgtcattcagagggttagtgaccatgcctctgccatgaacaagagaattcattactacagccggctcaccactcctgcagacaaggcactgattgccccagaccatgtagttccagctccaaaagagtgctatgggtatagtccatttgggct

SEQ ID NO: 125410 - DNA, 996 bp, Homo sapiens
atgaatacagggaagctgcagcttagtgtgcacctggaagccttgggccagccccaccatctggggaccagtgatgtcagcttcccaggcctcaccacccacacagctaatgaaggtgtttcaaggctacctctggtgtcctcaaacgaccccctttacaggcccattgtcactgccaccaccccgatacatgggtacatgtggtgtaccaatatggagatgaatactctgaaggtcatggcatttgttgcccaaaattttttagacaacttccctagcagtgacaccctgtccttcattgcaaggatattcctgctgttccagatgatgactgtatacccactcttaggctacctggctcgtgtccagcttttgggccatatcttcggtgacatttatcctaggcgcctccagattggccgcttgcttaaagtttttcgtgtctttttctggactttgtcctccggtattttggggaattggcatacaggtcgaggggagtgtttcgcccatgggtttgcactccttgtaaacgcactacaagtcgcccgaaatcttgccaacattcgcgccgctcgtacgcgcgttcggaccatccgaacgtctgcaagtaccgttttcttggccccatacacacagggagatatacaaaagacaaaaatttgcatagatgccgtttcttccaaggtcgcgtccacttcgaaagttctaactgtgtctttcacactattgcgatcgcctgcgcccctggaacgtcatttggcaaattcccaggaaccgttgttttatgtagtccacggacaagtctttagcctattgtttctagagatcgtctataatgagtataatattaagttaatatggcctttctgtatagagcccacaaacatcgtgaatgtgaatcatgtcattcagagggttagtgaccatgcctctgccatgaacaagagaattcattactacagccggctcaccactcctgcagacaaggcactg

SEQ ID NO: 125411 - DNA, 1005 bp, Homo sapiens
atggcccggctgtggggcgcgctgagtctttggccactgtgggcggccgtgccgtggggcggggcggcagccgtcggtgtccgggcttgcagctccacggccgccccggacggcgtcgagggcccggcgctgcggcgctcctattggcgccacctgaggcgtctggtgctgggtcctcccgaaccgccgttctcgcacgtgtgccaagtcggggacccggtgctgcgcggcgtggcggccccggtggagcgggcgcagctaggcgggcccgagctgcagcggctgacgcaacggctggtccaggtgatgcggcggcggcgctgcgtgggccttagcgcgccgcagctgggggtgccgcggcaggtgctggcgctggagctccccgaggcgctgtgtcgggagtgcccgccccgccagcgcgcgctccgccaaatggagcccttccccctgcgcgtgttcgtgaaccccagcctgcgagtgcttgacagccgcctggtcacctttcccgagggctgcgagagcgtcgccggcttcctggcctgcgtgccccgcttccaggcggtgcagatctcagggctggaccccaatggagaacaggtggtgtggcaggcgagcgggtgggcagcccgcatcatccagcacgagatggaccacctgcagggctgcctgtttattgacaaaatggacagcaggacgttcacaaacgtctattggatgaaggtgaatgactaaagctttgctactggggctgaggattccggataccaagacgcaaacactttcactttgagctgggcaaatcttacttggcatcaacttggatggctcgcatatgacaggaaactggattgccaaggcatggcagactgagctggaggaagatgtcagaaatgtttgccctgaaatcagttacggacaaaatgttggctacaacttgaggagaaaaatcacccccaaaggagtggacatttcctaacaattctgtatggaggaaggtggggtaag

SEQ ID NO: 125412 - DNA, 542 bp, Homo sapiens
ggctggaccccaatggagaacaggtggtgtggcaggcgagcgggtgggcagcccgcatcatccagcacgagatggaccacctgcagggctgcctgtttattgacaaaatggacagcaggacgttcacaaacgtctattggatgaaggacggcacacaaaaggtgcagaacaatatcctttcacatgtggcgatactacaactttgcccggatgaggaaaatggctgactttttccttatccaatcaaactataactacgtgaactggtggtcgacagcccagagccttgttattattctttctgggatcctgcaactgtatttcttgaagcgtctcttcaatgttccaacaactacagatacaaagaagccaagatgctaagctaaggtgactatagcaccctggctgttttcttctggggcttagtcgaatcagctttgtaatgttatgggacaaaaatcaattatctcattaatgttttagtctgctgcacacatctaaaaaagcaaaatggcaataaaatcataacagtgaaaaagttc

SEQ ID NO: 125413 - DNA, 759 bp, Homo sapiens
atggtgcaggagaagaacacggccggagcactgggtttgttaacagagcttcagaatgttctggaattactgcggtccacaggaactggaatgttacttaatgttagtctcaagcagagtgcagatgaagaagttacatctttagcaaagtctctcgtcaaatcctggaaaaagttaccagataagccatcaagtgagaaagaccctaaagaaaagcaaatagaacctgcaatgacatcgcagaatagcaaaagaaacacttctgattctgtgcggatgaagtacagggagatgcttcctgcagcccttcgaacaggagatgactgcattgaaatgggaactgatgaggaagaattaggatctcgaactgaggaagcaatagatccagaaagagggaatacaggcatgaagtacaaaaatagagtccaaagtaagatatcaaatcttacagatgcaaagaatccagatttaaggaaaaatgcaccgtgtgggaatattcctcctgacttacttgctagaatgacagcagaagaaatggctagtgatgagctcaaagagatgcacaaaaacttgaggaaagaagccatcagagagcatcagatggccaagacaggtggaacccagcctgattcgctcacatgtgccaaatgtaaaaagaagaattgcacttccacacaggtacaagcctgcagtgctggtgaaccaatgacaacgtttgttgactgtaatgaatgtggaaatcaacagaagttctgttga

SEQ ID NO: 125414 - DNA, 228 bp, Homo sapiens
agccctttggataccagacagtcctcacggctgacaacattaccgatggagaggactaaaactcaaggttggaactgttcctgtccagctccactaccagcaaaaacactctgcatcccattattcaagcataattggataagcattctttgcctccttctgcagtagtctttgctttcttctcccaccttaagaggcatatctctcattcccgtcacaaatctttgg

SEQ ID NO: 125415 - DNA, 484 bp, Homo sapiens
gtacctgcttactcctgcttggcacgaggcggcacgaggctggaggaccctgtcgccctgaaggcctgtttgctgcacatctgcctgcagagccaaacctcagggcccggtgcagtgtccagcctggtatctggcatcccagtagcttccatgttctgtgtatgggggtggggtgccccttcctcccactgtttgaattcactgaaaagcccccatgtctctccaactggctccccacagaccacttctgaagggctcacctgttgtcactccctcctgctccctcagtcccgtgtcatgagaatggacggtgtccagggcttccggtggggtctcaggagatgcccatgctggccctgcccgagctggctttctcggcctgggttaacagatcaaatccatctctacgctgggcgaggagcagacagcagtgggactccatggttctggatacctttcctggggtccctgtggaggcaaccag

SEQ ID NO: 125416 - DNA, 1248 bp, Homo sapiens
atggttaagaaccacagccctttggataccagacagtcctcacggctgacaacattaccgatggagaggactaaaactcaagtcatgagaaaactcacagtgattgtaggaacactcagtatcgcaaagctcattatgtatgtcaacacacttccacatctgttacctcctgtgagccttgcagagtccctaccatacgagagagtaggacagggactgttgttcttacggaagtacaaaaatggaaatgcagagaaggcgagtgatctgcctaaagtgttaacagaactgaaatccgacaaccagaggctgaaagatgaaaatggtgccctcatcagagtcatcagcaaactgtccaattcagagcatgggatttctagaatctcacatctggggcagcctcttctgattttacatcttatcattggtgggggcctcgcccaccagcctcctacaactcctgtccacatagaggccccttccccagggacagccacaggaccccaggaaaggtatccagaaccatggagtcccactgctgtctgctcctcgcccagcgtagagatggagctgaactgtgaacccaggccgagaaagccagctcgggcagggccagcatgggcatctcctgagaccccaccggaagccctggacaccgtccattctcatgacacgggactgagggagcaggagggagtgacaacagctacgtcagccctcaggtatggaaaacacacaagcagaagcatgttcccaccaagcccatggaccaagacagatgccatccactacgtggcatatcaggaccagctgggacctgaggaaggcactgctccccacacccacactggctccacactggtgtcaacgttcaaaatcactcagcaacctgtccccacccctcaaggctcctcactagcagtgggctcagaggaatgcaaatcttgggctttggaagggctgaatgaagttcatgaatggaaaagaatccaggtggtagaagatgaattgggaaagggcaaaggagtaaaggaagctgaagtggcccagatggggcaggatagagatgctgccatttgtgctgggaaagagagatactcaggcttctggagaagccatgagttttctgtggtgaaaaaatggcaagggcctgagggcttcatggatggaaaagagaggtcaaaggaaggcaggcaaggagggctggcctctggccacaaggggacctcactctgttgtccaggctga

SEQ ID NO: 125417 - DNA, 1467 bp, Homo sapiens
atgccaagcgaaatttataatgaacagattgaagaaaaagagcgacagaaagttcaggatatcaaagaagtcaagcaaaacatccatcttatccgagcctcttttgcaggcaaagggaagcagttggaagagaaaatgcagcctttggagccagaggctattatgttaagtgaactaatgcaggaacagaaaaccaaatgccgtatgttctcacttataagtggaaaacatggagtacacatggattcaaagacaggagcaacagacagtggggcctacttgagggtagaggaaatacaaactaccatcagagaatactacaaacacctctacgcaaataaactagaaaatctagaagaaatggataaattcctcgacaaatacactctcccaagactaaaccaggaagaagttgaatctctgaatagaccaataacaggagctgaaattctggcaataatcagtagcctaccaaccaaaaagagtccaggaccagatggattcacagctgaattctacctgaggtacaaggaggaactggtaccattccttctgaaactatcccaatcaatagaaagagagggaatcctccctaactcattttatgaggccagcatcatcctgataccaaagccgggcagagacacaaccaaaaaagagaattttagaccaatatccttgatgaacattgatgcaaaaatcctcaataaaatactggcaaaccgaatccagcagcacatcaaaaagcttatccaccacgatcaagtgggcttcatccctgggatgcaaggctggttcaatttacgcaaatcaataaatgtaatccagcatataaacagagccaaagacaaaaaccacatgattatctcaatacatgaagaaaaggcctttgacaaaattcaacaacccttcatgctaaaaactctcaataaattaggtattgatgggacgtatctcaaaataataagagctatctatgacaaaccaacagccaatatcatactgaatggacaaaaactggaagcattccctttgaaaactggcacaagacagggatgccctctctcaccactcctattcaacatagtgttggaagttctggccagggcaatcaggcaggagaaggaaataaagggtattcatttaggaaaagaggaagtcacattgtccctgtttgcagacgacatgattgtatatctagaaaaccccatcgtctcagcccaaaatctccttaagctgataagcaacttcagcaaagtctcaggatacaaaatcaatgtacaaaaatcacaagcattcttatacaccaataacagacaaacagagagccaaatcatgagtgaactcccattcacaattgcttcaaggagaataaaatacctaggaatccaacttacaagggacatgaaggacctcttcaaggagaactacaaaccactgctcagtgaaatagtaacagtcttttag

SEQ ID NO: 125418 - DNA, 1074 bp, Homo sapiens
  misc_feature (1)...(1074): n = a,t,c or g
ccgaaacacgcggtccgatcacgcgtgggcttggcgttagcttggcggggttacacgcgggttcaacatgcgtatcgaaaagtgttatttctgtggggggcccatgtatcctggacacggaatgatgttcgtccgcaacgattgcaaggggttcagattttgcaaatctaaatgtcataaaaactttaaaaagaagcgcaatcctcgcaaagttaggtggaccaaagcattccggaaagcagctggtaaagagcttacaggggataattcatttgaatttgaaaaacgtagaaatgaacctatcaaataccagcgagagctatggaataaaactattgatgcgatgaagagagttgaagaaatcaaacagaagcgccaagctaaatttataatgaacagattgaagaaaaataaagagctacagaaagttcaggatatcaaagaagtcaagcaaaacatccatcttatccgagcccctcttgcaggcaaagggaaacagttggaagagaaaatggtacagcagttacaagaggatgtggacatggaagatgctccttaaaaatctctgtaaccatttcttttatgtacatttgaaaatgccctttggatacttggaactgctaaattcttagtttattttttacataaggtcactcaaatgaaaagccgattaaaagacatctttccctgcattgccatctacataatatcaggatattacggatgttagatttgcatctcagtgttaaatctttactgatagatgtacttaagtaaatcatgaaaattctacttgtaactatagaagtgaattgtggacgtaaaatggttgtgctatttggataatggcactaggcagcatttgtatagtaactaatggcaaaaattcatggctagtgatgtataaataaaatattctttgcagtaaaatattcccttgttaatgttatagaangggggatccaaaaggactaacaattgtatggcagtgnagatattttatttgtaattccggtttggttattgcacctagaaggcctatggcatgttgtgagcccatagcgganggttgac

SEQ ID NO: 125419 - DNA, 370 bp, Homo sapiens
  misc_feature (1)...(370): n = a,t,c or g
cgccagatgatgaagactggggtgaattaagtccacacatttatttcaagttgttaaagagtatgtgggcctcgcaatggtccctcgcatgcaagaagtcaaagagctcctccgtgcaatcctcttctgtatgtgatcgagaggatacacgctcatcacagagctctagccgctcccgggcctttacacatttctccaactgctcgcattgctctctcactgttgttaggggatccactaattcctcctnnnnnnnnnnnnnnnnnnnnnnnnnnnnnnnnnnnnnnnnnnnnnnnnnnnnnnnnnnnnnnnnnnnnnnnnnnnnnnnnnnnnnnnnnnnnnnnnnnnnnnnnnnnnnnnnnnaacccag

SEQ ID NO: 125420 - DNA, 281 bp, Homo sapiens
gagaggaggaattagtggatcccctaacaacagtgagagagcaatgcgagcagttggagaaatgtgtaaaggcccgggagcggctagagctctgtgatgagcgtgtatcctctcgatcacatacagaagaggattgcacggaggagctctttgacttcttgcatgcgagggaccattgcgtggcccacaaactctttaacaacttgaaataaatgtgtggacttaattcaccccagtcttcatcatctgggcatcagaatatttccttatggatttggatg

SEQ ID NO: 125421 - DNA, 712 bp, Homo sapiens
gggttaggtgccgctgttgctgctcgtgttgaatctagaaccgtagccagacatgggactggaggacgagcaaaagatgcttaccgaatccggagatcctgaggaggaggaagaggaagaggaggaattagtgataggactgaggctttcagtgcatactggcaaccttggaaggccaggaatgtgaaactttcccctactacttagcatccagaattgaatgggagacccgcattctgccatttctggcggccagtgtggctctgccagctggccttctgcacggatccccctacaacaagtgagagagcaatgccgagccagttggaagaaatgtgtaaaaggcccgggagcggctagagctcctgtgatgagcggtgtatcctctcgatcacatacagaagaggattgcaccggaggagctctttgacttctttgcatgcgaagggaccattgccgtggcccacaaacttctttaacaactttgaaataaatgtgtggacttaattcaccccagtcttcatcatctgggcatcagaaatattttccttatgggttttggatgtaccatttgtttcctatttgtgtaactgtaagttcacatgaacctcatgggttttggcttaggctggtagcttctatgtaattcgcaatgattccatctaaataaaagttctatgatctgcaaaaaaaaataaaaaaaaaaaaaaaa

SEQ ID NO: 125422 - DNA, 2616 bp, Homo sapiens
atgaagcacctgaagcggtggtggtcggccggcggcggcctcctgcacctcaccctcctgctgagcttggcggggctccgcgtagacctagatctttacctgctgctgccgccgcccaccctgctgcaggacgagctgctgttcctgggcggcccggccagctccgcctacgcgctcagccccttctcggcctcgggagggtgggggcgcgcgggccacttgcaccccaagggccgggagctggaccctgccgcgccgcccgagggccagctgctccgggaggtgcgcgcgctcggggtccccttcgtccctcgcaccagcgtggatgcatggctggtgcacagcgtggctgccgggagcgcggacgaggcccacgggctgctcggcgccgccgccgcctcgtccaccggaggagccggcgccagcgtggacggcggcagccaggctgtgcaggggggcggcggggacccccgagcggctcggagtggccccttggacgccggggaagaggagaaggcacccgcggaaccgacggctcaggtgccggacgctggcggatgtgcgagcgaggagaatggggtactaagagaaaagcacgaagctgtggatcatagttcccagcatgaggaaaatgaagaaagggtgtcagcccagaaggagaactcacttcagcagaatgatgatgatgaaaacaaaatagcagagaaacctgactgggaggcagaaaagaccactgaatctagaaatgagagacatctgaatgggacagatacttctttctctctggaagacttattccagttgctttcatcacagcctgaaaattcactggagggcatctcattgggagatattcctcttccaggcagtatcagtgatggcatgaattcttcagcacattatcatgtaaacttcagccaggctataagtcaggatgtgaatcttcatgaggccatcttgctttgtcccaacaatacatttagaagagatccaacagcaaggacttcacagtcacaagaaccatttctgcagttaaattctcataccaccaatcctgagcaaacccttcctggaactaatttgacaggatttctttcaccggttgacaatcatatgaggaatctaacaagccaagacctactgtatgaccttgacataaatatatttgatgagataaacttaatgtcattggccacagaagacaactttgatccaatcgatgtttctcagctttttgatgaaccagattctgattctggcctttctttagattcaagtcacaataatacctctgtcatcaagtctaattcctctcactctgtgtgtgatgaaggtgctataggttattgcactgaccatgaatctagttcccatcatgacttagaaggtgctgtaggtggctactacccagaacccagtaagctttgtcacttggatcaaagtgattctgatttccatggagatcttacatttcaacacgtatttcataaccacacttaccacttacagccaactgcaccagaatctacttctgaaccttttccgtggcctgggaagtcacagaagataaggagtagataccttgaagacacagatagaaacttgagccgtgatgaacagcgtgctaaagctttgcatatccctttttctgtagatgaaattgtcggcatgcctgttgattctttcaatagcatgttaagtagatattatctgacagacctacaagtctcacttatccgtgacatcagacgaagagggaaaaataaagttgctgcgcagaactgtcgtaaacgcaaattggacataattttgaatttagaagatgatgtatgtaacttgcaagcaaagaaggaaactcttaagagagagcaagcacaatgtaacaaagctattaacataatgaaacagaaactgcatgacctttatcatgatatttttagtagattaagagatgaccaaggtaggccagtcaatcccaaccactatgctctccagtgtacccatgatggaagtatcttgatagtacccaaagaactggtggcctcaggccacaaaaaggaaacccaaaagggaaagagaaagtgagaagaaactgaagatggactctattatgtgaagtagtaatgttcagaaactgattatttggatcagaaaccattgaaactgcttcaggaattgtatctttaagtactgctacttgaataactcagttaaggctctgttttgaagcttacatggacaaatgtttaggacttcaagatccacacttgtggggcaatctggggggagccacaactttttcatggaagtgcattgtattacaaaattccttagttattgttccaaaggattaggttaacatgaaaacccagtaaggctttccctcttgggcagccttcctttttaagagtaagttggttacttcaaaaagagcaaacactggggatcaaattattttaagaggtatttcagttttaaatgcaaaatagccttattttcatttagtttgttagcactatagtgagcttttcaaacactattttaatctttatatttaacttataaattttgctttctatggaaataaattttgtatttgtattaaaaaaaaaaaaa

SEQ ID NO: 125423 - DNA, 2016 bp, Homo sapiens
atgaagcacctgaagcggtggtggtcggccggcggcggcctcctgcacctcaccctcctgctgagcttggcggggctccgcgtagacctagatctttacctgctgctgccgccgcccaccctgctgcaggacgagctgctgttcctgggcggcccggccagctccgcctacgcgctcagccccttctcggcctcgggagggtgggggcgcgcgggccacttgcaccccaagggccgggagctggaccctgccgcgccgcccgagggccagctgctccgggaggtgcgcgcgctcggggtccccttcgtccctcgcaccagcgtggatgcatggctggtgcacagcgtggctgccgggagcgcggacgaggcccacgggctgctcggcgccgccgccgcctcgtccaccggaggagccggcgccagcgtggacggcggcagccaggctgtgcaggggggcggcggggacccccgagcggctcggagtggccccttggacgccggggaagaggagaaggcacccgcggaaccgacggctcaggtgccggacgctggcggatgtgcgagcgaggagaatggggtactaagagaaaagcacgaagctgtggatcatagttcccagcatgaggaaaatgaagaaagggtgtcagcccagaaggagaactcacttcagcagaatgatgatgatgaaaacaaaatagcagagaaacctgactgggaggcagaaaagaccactgaatctagaaatgagggcatctcattgggagatattcctcttccaggcagtatcagtgatggcatgaattcttcagcacattatcatgtaaacttcagccaggctataagtcaggatgtgaatcttcatgaggccatcttgctttgtcccaacaatacatttagaagagatccaacagcaaggacttcacagtcacaagaaccatttctgcagttaaattctcataccaccaatcctgagcaaacccttcctggaactaatttgacaggatttctttcaccggttgacaatcatatgaggaatctaacaagccaagacctactgtatgaccttgacataaatatatttgatgagataaacttaatgtcattggccacagaagacaactttgataccaatcgatgtttctcacctttttgatgaaccagattctgattctggccttactttagattcaagtcacaataatacctctgacatcaagtctaattcctctcactctgtgtgtgatgaaggtgctataggttattgcactgaccatgaaatctagttcccatcatgacttagaaggtgctgtaggtggctactacccagaacccagtaagctttgtcacttggatcaaagtgattctgatttccatggagatcttacatttcaacacgtatttcataaccacacttaccacttacagccaactgcaccaggaatctacttctggaaccttttccgtgggcctgggggaaggtcacaggaaggattaagggagtaggataccttgaaagacacagatagaaacttgagccgtgatgaacagcgtgctaaagctttgcatatcccttttttctgtagatgaaattgtcggcatgcctgttgattctttcaatagcatgttaagtagatattatctgacagacctacaagtctcacttatccgtgacatcagacgaagagggaaaaataaagttgctgcgcagaactgtcgtaaacgcaaattggacataattttgaatttagaagatgatgtatgtaacttgcaagcaaagaaggaaactcttaagagagagcaagcacaatgtaacaaagctattaacataatgaaacagaaactgcatgacctttatcatgatatttttagtagattaagagatgaccaaggtaggccagtcaatcccaaccactatgctctccagtgtacccatgatggaagtatcttgatagtacccaaagaactggtggcctcaggccacaaaaaggaaacccaaaagggaaagagaaagtga

SEQ ID NO: 125424 - DNA, 255 bp, Homo sapiens
gagcctatgcacccaccatcaatggctttctcaaagtgtgtagtcacagggccacaccatttcatgtcggttctgaagacgtgaattcctgccctcaagcctgggagcgtgctagcccctccctaagatggtggacagcttacctcccccattccaggtcttcaaactcccatttcgagaacttcttgtgtttaattgctttccacctaacagtaaattcgctacttgcaaaaccacttggtcaatcaaatctcg

SEQ ID NO: 125425 - DNA, 2184 bp, Homo sapiens
atgaaggcagctcaccggctgaccttggagggaggccacctggattggcgggtgggccatgtgatcacaggggccttcagtgtggagggagggccagaagcagagctccatcgaagggggacatggctgcggaagctgcaaacagaagcaggccacctccactgtgtggctccccatgtctacgtccagcccggatctcgctctgcagctgcagacacaggcctcgctcatggctcacccccggctgtgtcctcctgcctgcagcatggagatggggtcgctggacgcagcaaacaagggcctcctcctggtgagaacagcgacgtggcgcaggactccagcgccgcccctcctggggaggatgaagggaacttcctcccgggtggaagagatgagctattgcaggtggatacagacttggcgcaggtccacacccaaggattggcaggacctgtgcacactacagactcggcacaggtccacacccaaggaatggcaggagctccgtacacgctggggtgtaagcgggatctgggagctgggacctgggacctgcgtctcaccaatagcatccaccaaggcaatggcactgcttccttgacagccttgcataagatcataactggttgtgctgctgtgtgtgagctggccctgggagagggcctgtggccaggaaaaatcaaccccactttgccaaagaggaaactgaggcacaacaagtctctggccaacagccagcaaggaatcgaatactgccaacatcctgtccctgctttccagtgtgaaagctgtcagaatcaaaatggagacacttgtcttaaacaaaacaaaacaaaaccccaaccaatagagctgggaacagccctgacggtattccccataaaaccatcacagaagacagcaaacaccacaatcgtctgtctcgttggaaaatccagaacatacccttcctccagagaagcttccgtggatgaaaagaggactcagtacattaagagcaggcggggctgccctgtaagcccacctggctgggagctttccccttctccacgctgggttgctgctggcagtgctggtcactgtgacggtcagcaagctctggacgccagggtcggagaaaaggctgagcgtgtgaggaactgtgccgccctgccacgagattttattgaccaagtggttttgcaagtagcgaatttactgttaggtggaaagcaattaaacacaagaagttctcgaaatgggagtttgaagacctggaatgggggagagagcctatctctggcagaagtagccaacgagctggacacggagaccctgcggaggctgaagcgggagtgtgggggcctgcagacgctgctccggaacagccaccaggtgttccaagttgtgaatgggagagttcacatccgcgactggcgagaggagacactgtggaagacaaagcaaccggaagcgaaacagagactgctctctgaagcctgcaaaacccgcctctgctggttcttcatgcatcaccctgatggctgcgctctgtccacggactgctgcccgtttgcccatgggcctgcggagctgcggccaccccggaccaccccgaggaagaagatttcatgagctgcatccttgccagccgaggccctggttggggaggccaaaccaaggaagagcttccccagcagtcgtcagtgctgtggtctctgctctggctgtgtttcagcccacctcctcccagctttctccacatcctcacagtgatgaaccgtatttcataaacatcacacgccagagaagccacagttactcggaagcccccagctgactgcctggcttgtttcagaatgcagccgcttgaaacgtgcgcagcatcttcatatcataaagattgtgcacggatccttacaatgtctcctgggggagagcggctgaggctgccttgcacaggcccttcccagggcgctgtccgacgcctgcccccccatgtccacatctgtgaaaaggatggggctcctcgagaagtaagaccgtatctgccagcgtttctcaccacactggagagcagctgctttggagcagggatcccccagattggtatttttaaaaaaggtgtcaggcttgctatgttgaggttgtttttagagttacagagaataaaaacactcataatttcctgaaaaaaaaaaaaaa

SEQ ID NO: 125426 - DNA, 483 bp, Homo sapiens
tgtattctgtttacaaagtttcattacatgaaactaaattatgtcattatgtatttttttgaggtcgaagaccccaatttgactgtactatgaagagttgttctttaaatgctttgtctgcagaggttttacatgatattcgtagattttcagagcaggccccaattttaactgaagtcctgtcaacacatcatttcttgtcatcaatagcagggattttccatcaatttcctgttcctgaaaagcactagcttgctcctcaaatcccacggttcggaaataattgacgacatccatcacggcccagtctgcaggatcaggtggtctcccattttccatggaattttttacaccgacagagccattttccttgttttccatgtcaacagatagcatgggaaggctgcagggttcctttacttcagcaactcacattctcaacgaaagcctcaaaaacctcgtggcgaattcctgcaggctctc

SEQ ID NO: 125427 - DNA, 669 bp, Homo sapiens
atgactgaagtgctagaaaaagggatggtttgtgcaggggcagctcttggtgtgggttccatggaaaatgggagaccacctgatcctgcagactgggccgtgatggatgtcgtcaattatttccgaaccgtgggatttgaggagcaagctagtgcttttcaggaacagatagaagatatggaaatcagcctgccaaacattcactacttcaacatagacatgtccaaaatgggtctgatcaacaaggaagaggtaagaggttttccctgtatgactcttataaggacactggtcactagatttggggcccacctggataaccttaagacaagatcctcaagatccttaatgacatctgcaaagatcttttttccacgtaaggtcacatttgcaggttctgacagtgaaggcatggtctctgttttgagacccattcaacccaatacaccaagtaagagggtctcagtcagcaccactatccaagggcttacagaattccacataacgtcactcagaccaagggacaaagagaccctctttaaagtaaaggcaagctgtagaacatgtggatctggtaaccaagatgtagaaataagaatggtcccacttgctatcactcccagtgatctaccaaggaaatctgtgcttcccctaccccctgaactctaa

SEQ ID NO: 125428 - DNA, 1257 bp, Homo sapiens
atgggaaaggaaaagactcatatcaacattgtcgtcattggacacgtagattcaggcaagtccaccactactggccatctgatctataaatgcggtggcatcgacaaaagaaccattgaaaaatttgagaaggaggctgctgagatgggaaagggctccttcaagtatgcctgggtcttggataaactgaaagctgagcgtgaacgtggtatcaccattgatatctccttgtggaaatttgagaccagcaagtactatgtgactatcattgatgccccaggacacagggacttcatcaaaaacatgattacagggacatctcaggctgactgtgctgtcctgattgttgctgctggtgttggtgaatttgaagctggtatctccaagaatgggcagacccgagagcatgcccttctggcttacacactggtagcatttgtgccaatttctggttggaatggtgacaacatgctggagccaagtgctaacatgccttggttcaagggatggaaagtcacccgtaaggatggcaatgccagtggaaccacgctgcttgaggctctggactgcatcctaccaccaactcatccaactgacaagcccttgcgcctgcctctccaggatgtctacaaaattggtggtattggtactgttcctgttggccgagtggagactggtgttctcaaacccggtatggtggtcacctttgctccagtcaacgttacaacggaagtaaaatctgtcgaaatgcaccatgaagctttgagtgaagctcttcctggggacaatgtgggcttcaatgtcaagaatgtgtctgtcaaggatgttcgtcgtggcaacgtcgctggtgacagcaaaaatgacccaccaatggaagcagcgggcttcactgctcaggtgattatcctgaaccatccaggccaaataagcaccggctatgcccctgtattggattgccacacggctcacattgcatgcaagtttgctgagctgaaggaaaagattgatcgccgttctggtaaaaagctggaagatggccctaaattcttgaagtctggtgatgctgccattgttgatatggttcctggcaagcccatgtgtgttgagagcttctcagactatccacctttgggtcgctttgctgttcgtgatatgagacagacagttgcggtgggtgtcatcaaagcagtggacaagaaggctgctggagctggcaaggtcaccaagtctgcccagaaagctcagaaggctaaatga

SEQ ID NO: 125429 - DNA, 1793 bp, Homo sapiens
acgggtttgccgccagaacacaggtgtcgtgaaaactacccctaaaagccaaaatgggaaaggaaaagactcatatcaacattgtcgtcattggacacgtagattcgggcaagtccaccactactggccatctgatctataaatgcggtggcatcgacaaaagaaccattgaaaaatttgagaaggaggctgctgagatgggaaagggctccttcaagtatgcctgggtcttggataaactgaaagctgagcgtgaacgtggtatcaccattgatatctccttgtggaaatttgagaccagcaagtactatgtgactatcattgatgccccaggacacagagactttatcaaaaacatgattacagggacatctcaggctgactgtgctgtcctgattgttgctgctggtgttggtgaatttgaagctggtatctccaagaatgggcagacccgagagcatgcccttctggcttacacactgggtgtgaaacaactaattgtcggtgttaacaaaatggattccactgagccaccctacagccagaagagatatgaggaaattgttaaggaagtcagcacttacattaagaaaattggctacaaccccgacacagtagcatttgtgccaatttctggttggaatggtgacaacatgctggagccaagtgctaacatgccttggttcaagggatggaaagtcacccgtaaggatggcaatgccagtggaaccacgctgcttgaggctctggactgcatcctaccaccaactcgtccaactgacaagcccttgcgcctgcctctccaggatgtctacaaaattggtggtattggtactgttcctgttggccgagtggagactggtgttctcaaacccggtatgtgtggtcactctttgctccagacaacgttacaacggaagtataatctgtcgaaatgcaccatgaagctttgagtgaagctcttcctggggacaatgtggggctttcaatgtcaagaatgtgtctgtcaaggatgttcgtcgtggcaacgttgctggtgacagcaaaaatgacccaccaatggaagcagctggcttcactgctcaggtgattatcctgaaccatccaggccaaataagcgccggctatgccccttgtattggattgccacacgggctcacattgcatgcaagttttgctgagctgaagaaaaagatttgatcgccgtttttggtaaaaagctggaagatcggccctaaaattctggaagtctggtgatgctgccattgttgatatggttccctggcaagccccatgtgtgttgagagcttctcagactatccacctttgggtccctttgctgttcatgatatgagacagacaggttgcggggggtgcgcatcaaaagcaggtggacaagaaaggctgctggagcctggcaaggtcaccaaagtctgcccagaaagctcagaaaggctaaatggattattatccctaaatacctggccaccccactctttatcaggtgtgggaagaacggtctcagaactggttgtttcaattggccatttaaagtttagctgttaaaagactggtttaatgataacaatggcatcgtaaaaacctttcaaaggaaagggagaatgttttgtgggccccttttgggtttatttttttggcgcggggccgttttaaagttattaagttttttaaaatcccgacttttttaatgggaaccaacttgaccaaaaaatttgtcacaaaaattttgggaacccattaaaaaagttaaatgagaaaaaaaaaaaaaaaaa

SEQ ID NO: 125430 - DNA, 955 bp, Homo sapiens
atggccagcaacgttaccaacaagatggatcctcactccatgaactcccgtgtgttcattgggaatctcaacactcttgttgtcaagaaatcggatgtggaggcgatcttttccaagtatggcaaaattgcgggctgctctgttcataagggctttgccttcgttcaatatgataaggagaaaaatgcccgggctgctgtagcaggagaggatggcagaatgattgctagccaggttgtagatattaacctggctgcagagccaaaagtgaaccgaggaaacgcaggtgtgaaacgatcagcagcggagatgtacggctcctcttttgacttggactatggctttcaacgggattattatgatggaatgtacagtttcccagcacgtgtacctcctcctcctcccattgctctggctgtagtgccctcgaaacgtcaacgtctatcaggaaacacctcacgaaggggcaaaagtggcttcaattctaagagtggaaagcggggatcttccaagtctggaaagttgaaaggtgatgaccttcaggccattaagcaggagttgacccagataaaacagaaagtggattctctcctggaaaacctggaaaaaattgaaaaggaacagagcaaacaagaggtagaggtgaaaaatgctaagtcagaagaggagcagagcagtagctccatgaagaaagatgagactcatgtgaagatggagtctgaggggggtgcagaagactctgctgaggagggggacccactggatgatgatgttaatgaagatcagggggatgaccagctggagttgatcaaggatgatgaaaaagaggctgaggaaggagaggatgacagagacagcaccaatggccaggatgactcttaagcacatagtggggttgagaaatcttatcccattgtttctttacctaggagcttgtctaacaacaaatttttca

SEQ ID NO: 125431 - DNA, 3023 bp, Homo sapiens
atgaagcgtgcgcctgttattccaaaacatacgctcaatactcaaccggttgaagatacttcgttatcgacaccagctgccccgatggtggattcgttaattgcgcgcgtaggagtaatggctcgcggtaatgccattactttgcctgtatgtggtcgggatgtgaagtttactcttgaagtgctccggggtgatagtgttgagaagacctctcgggtatggtcaggtaatgaacgtgaccaggagctgcttactgaggacgcactggatgatctcatcccttcttttctactgactggtcaacagacaccggcgttcggtcgaagagtatctggtgtcatagaaattgccgatgggagtcgccgtcgtaaagctgctgcacttaccgaaagtgattatcgtgttctggttggcgagctggatgatgagcagatggctgcattatccagattgggtaacgattatcgcccaacaagtgcttatgaacgtgtgaactcttgttccaaactggaacaacactcaaccctatctcgggctattcttttgatttataagggattttgccgatttcggaaccaccatcaaacaggattttcgcctgctggggcaaaccagcgtggaccgcttgctgcaactctctcagggccaggcggtgaagggcaatcagctgttgcccgtctcactggtgaaaagaaaaaccaccctggcgcccaatacgcaaaccgcctctccccgcgcgttggccgattcattaatgcagctggcacgacaggtttcccgactggaaagcgggcacctttgaagagagtagtggctctccagccacccagtggagatctgagaatggtcagcctgcctcctcaagtgggtccctgccccctgaagagcctaattggagggcaccccccagaggggcagcctaacacctcacatggcgggaccccccctgagccgaagctttcagaggaatgtcagggcagcaacatttgctgttcagcaatattcgctgttctgcagcctctgctgccgatactcaggcaaacagggtctggagtggacctccagcatactccaacaggcctgcagtggaggatcctgactgttagaaggaaaactaacaaacagaaaggacatccacaccaaaaccccatctgtacgtcaccatcatcaaaaaccaaagtccaaaagcaaggcatgcaagccctaagttttggttattgtggtatgaatgttgggaattacacggaggccgaaaggcgcaaagaaaaaggggggccaagaagacgcgggcagaagaacatgaaaagaaacggaggcgcaaaggaagagacttcgaagaaacgaaccggaggaacaagaaatccgtacaagaaaaacgaggagtccacaaacgccggaccagcaaacgtacaagaaggggagaaacgagagactctgcgggatatcccaacccaccaaagaacccaccagagggggattttgccgatttcggaacccaccatcaaacaggattttcgcctgttggggcaaaccagcgtggaccgcttgctgcaactctctcagggccaggcgtatgttaatggagagaaatgcccgggctgctggtagcaggaagaggatgggcagaatggattgctgggccagggttttagatatttaacctggctgcagaagccaaaagtgaacccgagaaaaaagcaggtgtgaaacggatctgcaagcggagatgtacgggctcctcttttgacttgggactattgacttttcaacggggactattatgataggatgtacagttaccccagcacgtgtacctcctcctcctcctattgctcgggctgtagtgcccctcgaaacgtcagcgtgtatcaggaaacacttcacgaaggggcaaaagtggcttcaattctaagagtggacagcggggatcttccaagtctggaaagttgaaaggagatgacccttcaggccattaaggaaggagctgacgccagataaaacgaaaaagtggatttctcttcctgggaaaaacctgggaaaaaattgaaaaggaacagagcaaacaagcagtagagatgaagaaatgataaagtcagaaagaggagcagagcagccagctccggtgaaagaaagatgagacttaatgttgaagattggaagtcttgaaggggggtgcagatggactctgcctgaggagggggacctactggatgatgatgataatgaagatcggggggatgaccagctggagttgatcaaggatgatgaaaaagaaggctgaggaagaagaggatgacagagaccagcgccaatgggaggggatgactccttaagcacatagttggggtttagaaatcttatcccattatttcctttacctaggcgcttgtctaagattcaaatttttcaccagatcctctcccctagtatcttcagcacatgcttcacttgttctccccatccttgtccttcccatgttcattaattcatattggccccgcgcctaagtcccaattttcacttcctttgacgctcctacgtagttttgttaagtcttaccctgtaatttttgcttttaattttgatacctctttatgacttaacaataaaaaggatgtatggtttttatcaactgtctccaaaataatctcttgttatgcagggagtacagttcttttcattcatacataagttcagtagttgcttccctaactgcaaaggcaatctcatttagttgagtagctcttgaaagcagctttgagttagaagtatgtgtgttacaccctcacattagtgtgctgtgtggggcagttcaacacaaatgtaacaatgtatttttgtgaatgagagttggcatgtcaaatgcatcctctagaaaaataattagtgttatagtcttaagatttgttttctaaagttgatactgtgggttatttttgtgaacagcctgatgtttgggaccttttttcctcaaaataaacaagtccttattaccccaggaatttggagaaaaaaaaaaaaaa

SEQ ID NO: 125432 - DNA, 1480 bp, Homo sapiens
  misc_feature (1)...(1480): n = a,t,c or g
tcgaagactgagcggttgtggccgcgttgccgacctccagcagcagtcggcattctctaacgcagaaacccgggagtaggagactcagaatcgaatctcttctccctccccttcttgtgagatttttttgatcttcagctacattttccggctttgtgagaaaccttaccatcaaacacgatcggccagcaacgttaccaacaagacagatcctcgctccatgaactccccgtgtattcattgggaatctcaacactcttgtggtcaagaaatctgatgtggaggcaatcttttcgaagtatggcaaaatttgtgggctgctctgttcataagggctttgccttatcgttcagtatgttaatgaagagaaatgcccgggctgctgtagcaggaagaggatggcagaatgattgctggccaggttttagatattaacctggctgcagagccaaaagtgaaccgaggaaaagcaggtgtgaaacgatctgcagcggagatgtacggggtcagtaacagaacacccttctccgtcccctctacttcagctcctcttttgacttggactatgactttcaacgggactattatgataggatgtacagttacccagcacgtgtacctcctcctcctcctattgctcgggctgtagtgccctcgaaacgtcagcgtgtatcaggaaacacttcacgaaggggcaaaaagtggcttcaattctaaggagtggaacagcggggtatcttccaagttctggaaaaggtgaaagggagatgaccttcagggccattaaggaagagctgaccccagataaaacaaaaagtggattctctccctggaaaacctggaaaaaattgaaaaggaacagagcaaacaagcagtagagatgaagaatgataagtcagaagaggagccagagcagcagctcccgtgaagaaagatgagactaaatttgaagatggagtctgaaggggggtgcagattgactctgcctgaggaaggggaccctactggattgatgatatgatgaataatgaagatccggggggaatgacccagctggaagttgatcaaaggatgatgaaaaaagaggctgaggaaaggagaggatgacagagactagcgccaatggcggaggatgactcttaaggcacatagtggggtttagaaatcttatccccaattatttctttaccttaggcgcttgtcctaagattcaaatttttcaccagattcctctcccctggtatccttcagcacatgctcactggttctccccatcccttgtccttccccatgttcattaattccatattgccccgnggcctaagtcccattttcactcctttgggaggctccctagtagttttggttaagtcttaccctgtaatttttgcttttaattttgatacttctttatgacttaacttattataaaggatgtatggtttttaaaaaaaaaaaaaaaaaaaaaagggcggccgct

SEQ ID NO: 125433 - DNA, 1137 bp, Homo sapiens
atggacagagctggaccaggcaagtccacctacaggtccctggtaacaagcacaggccttgccaccttggaacaggtaggatgcattggcaaaaggactacaataaatccaaccatcctcgtgccccatctagtggcctatgggcgcatggcaggagacaaggacagtttccattccgtcggccaacttattctaaaggataaatttatcacccaatcagcagctgacattaggagaaaagtccaaaagcctgctttaggcacagaacaaaatttggagacattattaaacctggtaacctcggtgttctataacagggaccaagaggaacagaccaaaagggaaaagcaatcactggaaggtccactgccccagaggatgaaggacctctggacaagaagcgcccaaccagatgattcagcaacaggactgagggtgcccggggcaagcaccagctcatgccatcacccacacagagccccggggagggtcatattagtcaaagctggagctattatctacatgaatgtggggaacaaattacccatttgttgtcccctacttgaagaaggaatcaactctgaagtctggaacttggaaggacaatttggaagggcgaaaactccccatcccgttcaaatcaggctaaaagaccccatcgcttttccttatcaaaggcaatatcccttaaggcctgaagctcacaaaggattacaggatattgttagacatttaaaagctcaaggcttagtaagaagatgtagcagtccttgcaacacctcaatcctaggaatacaaaaaccaaatggtcagtggagactagtgcaagacctcagaatcatcaatgaggcaataattcctttatatcctgctgtacccaacccctatacactgctctctcagataccagaggaagcagaatggttcactgttctggacctcaaagatgccttcttctgcattcccctgcactctgactcccagttcctctttgcctttgaggatcctacagaccacacgtcccagcttatgtggatggtcttgccccaaggatttagagatagccctcatctgttcggtcaggcattggcccaagacctaggccaattctcaagtccaggcactctggtcctctaa

SEQ ID NO: 125434 - DNA, 645 bp, Homo sapiens
atggcggttggcaagaacaagcgccttacgaaaggcggcaaaaagggagccaagaagaaagtggttgatccattttctaagaaagattggtatgatgtgaaagcacctgctatgttcagtataagaaatattggaaagacgctcgtcaccaggacccaaggaaccaaaattgcatctgatggtctcaagggtcgtgtgtttgaaacaatgattgaagctcacgttgatgtcaagactaccgatggttacttgcttcgtctgttctgtgttggttttactaaaaaacgcaacaatcagatacggaagacctcttatgctcagcaccaacaggtccgccaaatccggaagaagatgatcgaaatcatgacccgagaggtgcagacaaatgacttgaaagaagtggtcaataaattgattccagacagcattggaaaagacatagaaaaggcttgccagtctatttatcctctccatgatgtcttcgttagaaaagtaaaaatgctgaagaagcccaagtttgaattgggaaagctcatggagcttcatggtgaaggcagtagttctggaaaagccactggggacgagacaggtgctaaagttgaacgagctgatggatatgaaccaccagtccaagaatctgtttaa

SEQ ID NO: 125435 - DNA, 916 bp, Homo sapiens
atggcggttggcaagaacaagcgccttacgaaaggcggcaaaaagggagccaagaagaaagtggttgatccatttcctaggcaaagattggtattgacgtcgaaagcaccctcttatgttccattataagaattattggaaagacggctcgtcacccaggaccccaaggaacccaaaattgcaatctgatggtctccaagggttcgtgtgtttgaaagtgagtcctgctgaattgccagaatgattgaagttgcatctaggaaattccaggctgatactgaaagatgtttcaggggtaaaaacttgccctgacttaacttcccatggggcatgggatctttacccgtgacaaaattgttgttccatggtccaaaaaatgggcagaccaatgattgaagcctcacgttgaatgttcaagacttaccgattggttacttgctttcgtctgttctgtgttgggttttacctaaaaaaccgcaacatatcagatcacggaagaccctcttatgcttcagccacccaaccaggtcccgcccaaatcccggaaggaagatgatggaaatacatgacccgcagaggttgcagaccaatggccttgaaggaagtggccaattaattggtttccggaccaccatttggaaaggacataggaaagggcttcccaatctattattcctctcccagaggtttttcgttagaaaagtaaaaatgctgaagaagcccaagtttgaattgggaaagctcatggagcttcatggtgaaggcagtagttctggaaaagccactggggacgagacaggtgctaaagttgaacgagctgatggatatggaccaccagtccaagaatctgttggaaagttcagacttcaaatagtggcaaataaaaagtgctacctgtgaaaaaaaaaaaaaaaaa

SEQ ID NO: 125436 - DNA, 666 bp, Homo sapiens
atggcctttaccctgtactcactgctgcaggcagccctgctctgcgtcaacgccatcgcagtgctgcacgaggagcgattcctcaagaacagtgagtgggaccgcggggcgcgggctggggcggcggcggagtccccgggggcgcgtaacctaatggggccgcgtgaggggacaccaagggccgggacagaagaacagcggaaggctcggcttggagtggaagccgagcctttcctctcatcaggtttgggctcaacagccgggagaatattcaacagacacccgctgtgcagggcccagggggttggggtggagggatatagaagtcagtcagggacgcctctgcttgcgattacttcaggtgaagctgagcttgttcttcagtggtttgaaattcttcagttcttcagtatctgtagccttcaatataaacttcaacactctcatgtgatttacaagcctaccataagggtactctgtgaagttcaggaagtgattactttgcatacttgctctgaaataacatctaaaattcaacgtgttctaactcagccttttattaatgctgtgaaagataaagccagatactacttaaactgcttgcagacggcatattgcgggaccttgtgtgagttaatatcctataaacgacaaaggattggttga

SEQ ID NO: 125437 - DNA, 662 bp, Homo sapiens
cccacgcgtccgcccacgcgtccggctgggattgcaggcataagctaccatgctgggcctgaacataatttcaagaaaatggttttataaatcctccgagaaatcgcttggacttcggggcggcctcggacggccattggcatttaccctgtactcactgctgcaggcagccctgctctgcgtcaacgccatcgcagtgctgcacgaaggagacgaatttcctcaaagaacatatgtgctgggggaacaagaaccataggaattggttggatttgggagaaagagccgggaattaaatcacagctaatgaaccttattcgatctgtaagaaccgagatgagagtgccattgataatagtaaactcaattgcaattgtgttacttttattatttggatgaatattcagtggagaaaatggagactcagaagaggacatgccagtaagaagttattactttggtcattattggaatattcatagcttagcctggctgaccttgcacttgttcaaaaatgtaaagctgaaaataaaaccagggtttctatttatctgttttttttttttaatgttgcacttgtagtttcattacaaaagatcagatcatgaaaggcagtaactctccaggactggaatatctgattgctcagtgttaatagtagt

SEQ ID NO: 125438 - DNA, 900 bp, Homo sapiens
caggtttgtactacagaaagtgccagttaatttccaaggaagatgttactcatgatacgaggcttttctgtttgatgctgccaccaagcactcatcttcaagtgcccattgcgaacatgtttacctcaagctacctattacaggtacagaaatagtaaagccatatacacctgtatctggttccttactctcagagttcaaggaaccagttcttcccaacaataaatacatctactttttgataaaaatctatcccactggactcttcacaccagagcttgatcgtcttcagattggagattttgtttctgtaagcagtcctgagggcaattttaaaatatccaagttccaagaattagaagatctctttttgttggcagctggaacaggcttcacaccaatggttaaaatactgaattatgctttgactgatatacccagtctcaggaaagtgaagctgatgttcttcaataaaacagaagatgatataatttggagaagccaattggagaaattagcatttaaagataaaagactggatgttgaatttgttctctcagcacctatttctgaatggaatggcaaacagggacatatttcaccagctcttctttctgaattttggaaaaggaatttggacaaatccaaagttctcgtctgcatttgtggaccagtgccatttacagaacaaggagtaaggttgctgcatgatctcaacttttccaaaaatgagatccatagttttacagcataatgaagagctgtcattgtcctttattcaactagtttatctaaatttgtgattgcttagggttttttaagagaacatttttgtacataacaaaaggttaactagaatccagccttcagtttcttaaatgaaatcaaatgttccttcag

SEQ ID NO: 125439 - DNA, 1788 bp, Homo sapiens
ggtacaattattggtggaggctgcgatgaagttttgctggttactaggaccccaggtaggtggtgtggcatgggtggtgacggtggcagtcgcaggatgacctctgggtcccaggtggtacacgcttatgttggtggaggctgttatgggctgcgcaggccagtctctaaccctgcagatggcatgtgcaaggaggtgctagctgtggtgatagcagccaggttggttcatcgttgggtcaattatgaatccatgctgaaagaatgcctggttggcagaatggccattaaacctgctgttctgaaaggtacagaaatagtaaagccatatacacctgtatctggttccttactctcagagttcaaggaaccagttcttcccaacaataaatacatctactttttgataaaaatctatcccactggactcttcacaccagagcttgatcgtcttcagattggtcaccaacagcaaagaccaaaggtagataaatccacgaagttgaggaaaaacctatgcaaaaaggctgaaaatgccaacaaccagaatgcctcttctcctccaaaggatcacaactcctcactagcaagggaacataactggatggataatgaatttgacaaattgacagaagtaggcttcagaagaactgatgacaaaaaccacgtgatgatctcaatagatgcagaaaaggccttcaataaaattcaacaccccttcatgctaaaaacactcaaactaggtattgatggaacatatcttaaagtaataagagcagtttatgacaaacccacatctgatatcatgctgaatgggcaaaagctggaagcattccctttgaaaactggcacaagacaaggatatcccctctcaccactcctattcaacatagtattgcaagttctggccagggcagtcagactggatgttgaatttgttctctcagcacctatttctgaatggaatggcaaacagggacatatttcaccagctcttctttctgaatttttgaaaagaaatttggacaaatccaaagttctcgtctgcatttgtggaccagtgccatttacagaacaaggagtaagctggaaaaatgaggaacattctgccttgaatggttcttcccctggttggctgctttctccacaactggtggttcagcaggaagccctcttaggttcttgcatgtgggcaacttattttctcttcctgctgctttgtgcaactgtcaaatactttcacagattcagatcagcaaagggtatcaaggatagtcattccaattccaccatcatcattattcacaaagacaggaatctagctgtcctggactggtactgttccctggtagccactccggccatggctgaaaggggccaacatgaagctcaggccatggcttcagagggtgaaagccttaagccttggcaacttccatgtgatgttgagcatgtgggtgcacagaagtcaagaaatggggtttgggaacctctgtctagatttcagaagatgtatggaaatgcctggatgcccaggcagaagtttgctgcaggggcggggctctcatggagaacctcggctagggcagtgcagaagggaaatgtggggttggagccccctcacagagtccctactgggacaccgcctagtggagctgtgagaagaggaccactgtcctccagaccccagaatggtagatcgacttacagcttgtaccaggtgcctggaaaagctgcagatactcaacaccagcccatgaaagcagccaggatggaggctgtaccctga

SEQ ID NO: 125440 - DNA, 369 bp, Homo sapiens
tcagagaataagtctttgattgataatttttctatttatttctgccaaggcgactgaaaacacgaaagccttttcatcagacaggttagcatagatgtcaatttccttttcctgtttctctttttcaaaggataaaccaaaggcgcgctcctccagtggccgggacacagcaagaaggggcttggccgtctggccgccgccaggtggacgctggcgggccacggccccgggcttttcccgggaaacccctcggtgcagcccgaccggccccggatccccgccgccgccggcgggccccaggatctgttggtcgcactcggggcatgatttggtggccatcttcactttcttggctcgagttgcagacat

SEQ ID NO: 125441 - DNA, 728 bp, Homo sapiens
gcacaggctaaacgacaggcgagaaagaaacaatcgatggcccttattgatgcagtcagaatgctcctgagagtccataactgtttgagaatttgctgatgttatcctgacagaagtttcagcagattttgcaaacaagtatcagagaataagtctttgattgataatttttctatttatttctgccaaggcgactgaaaacacgaaaagcccttttccatccagaccaggttaagcatagatgtcaatttccttttccctgtttcctctctttcttcctcatggttttttggcagatgcacttataggtcttcctcttcctcgtctgatatgatctgaatggctgttacttcgagacctctttctgttttctaaatctttatctactgtagaatttatcttctctctcctaactctctctggttggcttcttcttggcctcatgcttgttttctgtagaaggtggtgatttctctgagtgttttgcatttaaaagttttctgctaataaatatgtaaccacaaggacatgatttacatgcaacaggaacctgttggtcgcactcggggcatgatttggtggccatcttcactttcttggctcgagttgcagacatgctcctctcccttagcggcggcagcagcgacggctcgggctcctcccctcacacttcggcagcccggcaaagccggcccagtaaccggacgcatcgtgtccaggaatcacgt

SEQ ID NO: 125442 - DNA, 1816 bp, Homo sapiens
  misc_feature (1)...(1816): n = a,t,c or g
tttttttttattttttgtgacacagtgtctagctctgtcactcaggctggagtggagtggagtgatcttggctcactgcaacctctgctggttaccatttaaataaagtaggaaaaaatgttgaccttttttctttgaggaggtgatgggagatgcaggatgaagtctgaaattgataatgttacggctaaaattgaaagggagattctcttaaaagggggctaaatctaactgatgactatcttctgtaagaaggctttaaaaggatttctaaacagattgggggaagagcgactgaaaataaggggagtgattaccaagtttgaatatgttaatcattaaattgatatgccaaaatgcaaaagcatttaatataaatcaactataaacgattatgacttaacactagaaaaattaagaatttaaatatatttcacaaacttcaccagaacaaaaaacttttatcacactatttaatctacttagtttcaatattaaggtttattttttcttccagaattgaaagtaacaatttaaataattatcaggatatagaaacaaatatccattcagataaaacattactgcttaaaagtggctaagaaatattttgcatgtaataaatatatttcatgtttaggttaacaggcaccatcttgagagcagtttgtttttttttttttagctaataaataaattacattcaagaaaacaaggggtttatatctgagtatatcattaaatgtttttcttcatatagcacccaaacttcaaactgtctaggaaagtatctcctaaaatataactcataccttaagtaataaaaataaaggcccagaaaaacaaatcaattgaagacaaaatgtacagtttatattcttaattccccattcaataaaatatcgattgccaatttaataaaagtgaatgaactgtatatatgcaatctgttagcactgaaaatctgaaatatatatttttaaaaatcactctttctgacagtatttaaaatattgcatctctggtggacaaacctgaaaacaattaagcatcttattaccctagttttccataccctaccccccataccccaatccactttttatcctttaacatccatccagcatttttgttggtttttttttgttgttggcaaatacacttacttatatcccaaacacaaaacactgacaatactccttggtaaacaaggaaatcccagaacagtccaagcctacacagctttgctcccgaagtgtggcacaggctaaacgacaggcgagaaagaaacaatcgatggcccttattgatgcagtcagaatgctcctgagagtccataactgtttgagaatttgctgatgttatcctgacagaagtttcagcagattttgcaaacaagtatcagagaataagtctttgattgataatttttctatttatttctgccaaggcgactgaaaacacgaaagccttttcatcagacaggttagcatagatgtcaatttccttttcctgtttctctgtagaaggtggtgatttctctgagtgttttgcatttaaaagttttctgctaataaatatgtaaccacaaggacatgatttacatgcaacaggaacctgttggtcgcactcggggcatgatttggtggccatcttcactttcttggctcgagttgcagacatgctcctctcccttagcggcggcagcagcgacggctcgggctcctcccctcacacttcggcagcccggcctccgcccgcccagtcnccggaattccacaacgtgatctatggtctcgatttcccnnaccctcct

SEQ ID NO: 125443 - DNA, 780 bp, Homo sapiens
atgacctcaggtcctcagaccaaccagcccaagaaacatctcaccaatttcaaatccgcctcagtgttcccatctgtaaagggggcctttctcatcaagctggccatgaaggttgatggagtcggttctcatgaagcccctagctggtgccgcatcctcgccagccagcgctcgactaaaatccacggagtcgggtttgtgaaaatccatgccccctggaacgtgctgtgcagagaggccgagtttctgaaactgaagatgccgacgaagaagatgtaccacattaatgagacccgtggcctcctgaaaaaaatcaactctgtgctccagaaaatcacagatcccatccagcccaaagtggctgagcacaggccccagaccatgaagagactctcctatcccttctcccgggagaagcagcatctccagcaaagccatgacacttgccccctgccttttggggaaagggcagaagagatcatcgacaaagaaatgatggcaaacaagaagatgaagaagctcatccgctacctgaagctgaagcagcagagcccccctgaccacgaggagtgtgtgaagaggaaacagcggtacgaggtggattacaacctggagcccttcgcgggcctcaccccagagtacatggaaatgaggacttcaacccccaatggattcggccttggccgcctgctagctgtgtttccatcaccccccaagtactcggagccagccgtggtcatgttacaaatgaccctgccctcgtccagcccaacagcttga

SEQ ID NO: 125444 - DNA, 707 bp, Homo sapiens
tcccaaccccaagtgtcgctgagtctttccagtcttccttttctacagacccatctgacctttcccctcctccccagcctgctcatcgccaggccgagctaagtcccaattcttcctcagcctccactcctccaccctataatcctcctaccacctcccctcctcacacccggtccggcttacagtttagttccgcaactagctcttccccacctgcccaacaatttcctcttagagaggtggctggagctgaaggcatagtcaacgcacatgtacctttttctctatcagacctctctcagatcagtcagcatttaggctctttctcatcagaccccactaaatatatacaggaattccgatatctaactctgtcctacaacttaacctggagtgacctaaatgtcatcctgacttctaccctctccccagatgaacgggaaagagtttttcctgtatcccaatctcacgctgataaccgtcggcttcatgagccagacctccaggaaggcattagagcagttccccgagaggatcccccagtggaactaccaggcaaattccccaggaaaaaacttcaaaaattagaatctggccctcaaaccccacaacaggaattaatcaaccttgccttcaacgtgtacaataatagagaggaagcagccagacggcaatgcatttctgagttacaattacttgcctccact

SEQ ID NO: 125445 - DNA, 339 bp, Homo sapiens
actgctcctcttcaggtcgctccccgccaagctaaatcaggctccgattcttccttggcctctgctcctccaccctataatccttctatcacctcccctgtgcacacctggttcagcttacagtttcattctgagactagccctcccccacctgcccaacaatttcctcttagagcggtggctggaactgaaggcatagtcaggatgaatgggaaagagttttttctccagcccaatctcacgctgataactgccggcttcaagagccagacctccaggaaggcattagagcagttccccgagaggatccccaatggaactatcaggcagattccccag

SEQ ID NO: 125446 - DNA, 996 bp, Homo sapiens
atggggatgactgtggaggtcagagtcagagagatgtgtgaagatgttacagagctgcctttgaagacggaagaggaccatcagccaaggaatcccaggtcggcccagcgctgggcgcagcgcctggcaatgcgggcccgcgggatccgaggacacgatgaacgggaaagagttttttctctagcccaatctcacgctgataaccgccggcttcatgaacttgacctccaggaaggcagtagagcagttccccgagaggacccccaatggaactatcaggcagattccccaggtacagctaggcgagattacatgatttcctgcctagttgaagggcttaaaaaggcagcttacaaagctggtaattctgacaaacttagagaaactacccgaggtaaagacgaaaacccagcccaggtcatggcccgcttggcagcgacccttacacgctttaccgccctagacccagaggggccagaaggccgccttattcttaatatgcattttatcacccaatccactcctgacattaggaaaaaacttcaaaaattagaatctggccctcaaaccccacaacaggaattcatcaacctcgccttcaaggtgtacagtaatagagaggaagcagccagacggcaacgcatgtctgagttacaattacttgcctctgctgtgagacaaaacccagccacacctccagcacacaagaacttcaaaatgcctaagccgcacacacctaagccgcagcagtcaagcattcctacaagacttcctccatcaggatcttgcttcaagtgccagaaatccggccactgggccaaggaatgcccgcagcccaggatttctcccaagccatgtcccatctgtggaaggacccactggaaggcagactgcccagctcgcccggcagccactcctagagcccctaaagctctagcccaaggctgtctgactgactccttctcagatctgctcggcttagcgactgaagattga

SEQ ID NO: 125447 - DNA, 1962 bp, Homo sapiens
agacaaaggagacacgttttatccatggacccaaaactccggcaccggtcacggactgggaaggcagccttcccttggtgtttaatcattgcagggatgcctctctgattatacactcacgtttcaagggtgtcagaccacacagggacacctgccttggtccttcacccttagcggcaagtcccgcttttctggggaagggacaagctgctcattgccaggccgagctaagtcccaattcttcctcagcctccactcctccaccctataatccttctatcacctcccctcctcacacccggtccggcttacagtttagttccgcgactagctcttccccacctgcccaacaatttcctcttagagaggtggctggagctgaaggcatagtcagggtacatgtacctttttctctatcagacctttctcagatcagtcaatgtttaggctctttctcatcagaccccactaaatatacacaggaattccaatgtctaactctgtcctacaacttaacctggagtgacttaaatgtcatcctgacttctaccctctccccagatgaatgggaaagagtttcttctctagcccaatctcatgctgataaccgccggcttcacgagccagacctccaggaaggcattagagcagttccccgagaggatccccaatggaaccatcaggcaaattccccaggtatagctaggcgagattacatggtttcctgcctagttgaagggcttaaaaaagcagcttacaaagctgttaattatgacaaacttaaagaaactacccaaggtgaagatgaaaacccagcccaggtcgtggcccgcttagcagcaacccttagacgctttaccgccctagacccagaggggccagaaggccgccttattctcaatatgcattttatcacccagtcagctcctgacattacaaaaaaacttcaaaaattagaatctggccctcaaaccccacaacaggaattaatcaacctcaccttcaaggtgcacaataatggagaggagactgacgctgcccgatcgccttggaagccccctggaccatcacggacaccgagcttcagggcctgtttcccttgcccccataacttttgtgggtattgacggccaagcttcaaaacaccttaaagctcccctactttggtgccaacttggacaaccttcttttaagcactcttttttagttatccccacctgcccagttcctttattaggccgagacattttaaccaaattatctgcttccctgactattcctggactacagccacatctcattgccactcttcttcccaacccaaagcttcctttgcgtcttcctcttgtatccccctaccttgacccacaagtatgggacatctttactccctccctggcaaccgatcacatgcccattaccatcccattaaaacctaatcacccttaccctgctcaacgccagtatcccatcccacagcacgctttaaagggattaaagcctgttatcactcgcctgttacagcatgggcttctaaaacctataaactctccttacaattcccccatttcacctgtccaaaaacctcacaagtcttacagattagttgaggatctgtgccttatcaaccaaattgttttgcttatctaccctgtggtgcccaacccatacactcttttgtcctcaatacattcctccacaactcactattccattcttgatcttaaagatgcttttttcactattctcctgtacccctcatcccagcctctctttgctttcacttggactgaccctgacacccatcagtcccagcagcttacctgggctgtgctgccgcagggtttcagggacagctctcattacttcagtcaagcccaaacttcgtcttcatctgttacctatcttggcataattcttaatgaaaacaatgtgctctccctgctgatcgtgtccagctaa

SEQ ID NO: 125448 - DNA, 1350 bp, Homo sapiens
ctaggtaatgaccacatccacgacgtcatcgtcacagcccatgcattcgttataatctttttcatagtaatacccatcataatcggaggggccgccacagcagaaggcgtagaagggagatgcattcatcttctgcagctgcgtagaaatctccgtgagtttagcggcttgagaacgcagacgtgtacttatatctggaatgagcggctggggccggatgcccatgggccgggtgtggagggaatatggcccggtgacgctggtgacgctgcgcctgtcaggctcctcgggtttgacagggaggagcgggcttgaaggagccccctttgctccagccgggacctggcccaactccaggggcaggggtctgcggggcgccagaaatcgcctggcagcattgcgtatctggggctcacagatgaccagaggcccagtgtccacgctcaggagcacccagtggggcttctctgtgacagaccaggtgtccgcagaatccacagactccacagaccagtgtccccaagtcacagccctgggtgtgggagagttgtcaccaaacccaggaacagagctgtccagcaggggccgactcaggccgggagggtgacgctgagccccaaggaggggcgtcggggaagcgcccactcgcccactctcccgctcgcccttgggggttctgtggggcttggcctctcctacttgaaggccagacccgacttccaggctcagggcacgatgcactgagttgtgggaccgcactgatgaggatgaggacagggacctgtgcctgggggctctggctcgatggtccccccgggcagcagaggctcgggtaccaaggaacatgtggccagtggtggaacggctggatccccggatcttggctctgacctgagcgaagctctcagtcctggaattggctgtgaatccaggttctccatcgggcagcatttgtgcagctgggcccttcccggcatcaaccaccaggcccgagtgtggggcccgagttgctggctgccctgagtgccctggtccctggggcccccatgggagatcaaggggctcaggagagggcatgggactcaggaggtcccggggcagctcccccttcaggcagatcagggctgcttttcgcttcacatattgggcctcgtttatcccagtgcatgtccactccccactgtggacctcagcgtgtgcctgcagggaacgccccttggtgtaatcacctaatgatgtgatacaaccatctagcgggcagtccatttcccattcttgtccactgtcccagtaatgttccttcccacccaagggtgcagtgcaggagcacgcgtggaatttaaccgtcat

SEQ ID NO: 125449 - DNA, 1555 bp, Homo sapiens
atgttcgccgaccgttgactattctctacaacccaccagagtcatcgtaccactatacctatttattcggcgcatgagctggcgtcctcgccacagcctctaagcctccttattcgagccgagctgggccagccaggcaaccttctaggtaacgaccacatctacaacgttatcgtcacagcccatgcatttgtaataatcttcttcatagtaatacccatcataatcggaggctttggcaactgactagttcccctaataatcggtgcccccgatatggcgtttccccgcataaacaacataagcttctgactcttacctccctctctcctactcctgctcgcatcgtgctatagtggaaggccggagcaggaacaaggttgaacaagtcgtaccctccctttagcagggaactactcccacccttggaagcctccggtagacctaaccatcttctccttacacctagcaggtgtctcctctatcttaggggccatcaatttcatcacaacaattatcaatataaaaccccctgccataacccaataccaaacgcccctcttcgtctgatccgtcctaatcacagcagtcctacttctcctatctctcccagtcctagctgctggcatcactatactactaacagaccgcaacctcaacaccaccttcttcgaccccgccggaggaggagaccccattctataccaacacctattctgatttttcggtcaccctgaagtttatattcttatcctaccaggcttcggaataatctcccatattgttaacttactactccggaaaaaaagaaccatttggatacataggtatggtctgagctatgatatcaattggcttcctagggtttatcgtgtgagcacaccatatatttacagtaggaatagacgtagacacacgagcatatttcacctccgctaccataatcatcgctatccccaccggcgtcaaagtatttagctgactcgccacactccacggaagcaatatgaaatgatctgctgcagtgctctgagccctaggattcatctttcttttcaccgtaggtggcctgactggcattgtattagcaaactcatcactagacatcgtactacacgacacgtactacgttgtagctcacttccactatgtcctatcaataggagctgtatttgccatcataggaggcttcattcactgatttcccctattctcaggctacaccctagaccaaacctacgccaaaatccatttcgctatcatattcatcggcgtaaatctaactttcttcccacaacactttctcggcctatccggaatgccccgacgttactcggactaccccgatgcatacaccacatgaaatatcctatcatctgtaggctcattcatttctctaacagcagtaatattaataattttcatgatttgagaagccttcgcttcgaagcgaaaagtcctaatagtagaagaaccctccataaacctggagtgactatatggatgccccccaccctaccacacattcgaagaacccgtatacataaaatctaga

SEQ ID NO: 125450 - DNA, 1290 bp, Homo sapiens
atgcatctgaaccagctgcctcccatcctcagcaggctgggtgcagtcggcttcttcggaagcatgaaggctcacctggtgtccgtctctcggcaggtcaggaacatccgcaaggtcctcaggaagatcgaaaagccctttggcctctaccccaacttcctcagcccagtgagtgggaactgggtgcaactacccattccaggttcggtggctgctggcgagatgcccgcttcctacccgtacaggcaccgggcccctgaggtcaggcgggtgtgcgaggccctgccccaccatgtctcagttggaggactcggggacagtttttatgaatatttgatcaaatcctggttgatgtcgggcaagacagatatggaggctaaaaatatgtactacgaagccttggaggcgatagagacctacttgctgaatgtctctcccggggggctgacctacattgccgagtggcgaggggggattctggaccacaagatggggcacctggcctgtttctccgggggcatgatcgcccttggcgccgaggatgccaaggaagaaaagagggcccactaccgagagctcgcagcccagatcaccaagacgtgtcacgagtcatacgcccgctcagacaccaaacttgggcctgaggccttctggtttaactccggcagagaggccgtggccacccagctgagcgagagctactacatcctccggccagaggtggtggagagctacatgtacctgtggcgacagacccacaaccccatctacagggagtggggctgggaggtggtgctggccttggagaaatactgtcggacagaagccggtttctctgggatccaagacgtgtacagtagcacccccaaccacgacaacaagcagcagagcttctttctagcggagacactaaacagatgcttggtgagtgcctgcaacggaccagacactgggctagaggccagggacaccgctgagagtgagacagtcataagccctgcagtcaaggggtcaagaggggagaaagcgatggtaagggaaactgacaaaccagccaaatgcattgggaagaaaagcaaaaatggaaaatctgatttaaaggcagcatccaagatggatgctcagttccgttccctctgctttgaggaggtgaccccactgtggtttgagaaagtgctagagatgaatgggccagcttcccccagcgtttcccctgggggcctgtccttggaagtatggtcattggtcatgtggcacaaagatgctcggccctctgtgactaatgcttaa

SEQ ID NO: 125451 - DNA, 584 bp, Homo sapiens; identical to SEQ ID NO: 124381

SEQ ID NO: 125452 - DNA, 663 bp, Homo sapiens
cgatactaagcatatcaaaattgagaacaagtctggctggggaaggctcagtggacacgcccaaggcaagtggggtaactcggcacataaaaggcccaggagtggctgcagagatgtctgccttcattcttcctctgccaggctgagtgagccccgggtgggagtgggcggcatctgcagtcttaaatgggctgaggaccactctggctctgaggcgtggggtctgtttaataagatcccgtccaggcactctagggctggaggatggggcaagcccacggacggagtccctccatacaggaactgcatgtaagggggccgtggacgggtcttcagaggtggatgagaagctgaagagaattgctctcgatttcctcgggcttcacggaggtgatgatccaagaagtagttggcattgatgtgatggaccacggtgccattgggcaggcagatcatcatctccacggggaagctgtacttctccaggtgcaggccagccagcttctggtgggacgagttctcctggttgttctgcagttcctccagctccttcaccagggaccaggtgctgatgaagctctcgttgagcagggtgaggatgggcgaactttccaggacagtctcccggagagtccgccctgaaccgtgcttgtactgactcat

SEQ ID NO: 125453 - DNA, 1242 bp, Homo sapiens
atgcccgcttcctacccgtacaggcaccgggcccctgaggtcaggcgggtgtgcgaggccctgccccaccatgtctcagttggaggactcggggacagtttttatgaatatttgatcaaatcctggttgatgtcgggcaagacagatatggaggctaaaaatatgtactacgaagccttggagttcccctccgccctccgccttccccgactggtccatgcccatgtcccccctgctgccgaaggccaggagctgggtgagccctggtggatcatccccagtgagctgagcatgttcactggctacctgtccaacaaccgcttctatccaccgccgcccaagggcaaggaggtgttccgaataaaggccatcaggctgggagagaagctcctgccggcgttcaacacccccacgggaatcccaaagggcgtggtgagcttcaaaagcaggagtacaggacatcgggagcacggtgcagcaggagcacagggcaatgggagcacaatgcagcaggagcacaaggtgatgggagcacggtgcagtaggagcacagagcagtcttcccagaccacaaagccctctgtggtcactcctttcaccaaagcactaaagcaccctggtgagtacaagtatgtggtcgagagcctcaccctcagaagagagggcacagggagcctgggggcccccctccgccccacttgcctcacccggcccttctcccaggtccatcacatcaatgccaactacttcttggacatcacctccgtgaagcccgaggaaatcgagagcaatctcttcagcttctcatccacctttgaagacccgtccacggccacctacatgcagttcctgaaggagggactccggcccgccggcagccgcagccatggggccgggcccggccggtccaacgcgggccgcccagccccgggccctgccgtgcagcctgccgcgccagcgggccgacgcgcccgttccctggcgctgatcgataccttgctggccggcggcgctggctcccgcgtgcaattctgcgcctttcacacgcagggccaggcggatcaccaggtcgtccatcacatcagggccaactacttcttggacatcacctccgtgaagcccgaggaaatcgagagcaatctcttcagcttctcatccacctttgaagacccgtccacggccacctacatgcagttcctgaaggagggactccggcgtggcctgcccctcctccagccctag

SEQ ID NO: 125454 - DNA, 911 bp, Homo sapiens
tttttttttttttttttttcacaagcacgtgcactttattgaatgacactgtaaacaggggtgtgggtataaactgctgtatctaggggcaggaccaagggggcaggggcaacagccccagcgttgcagggccagcattgcacagtggagtgcaaaggttgcaggctatgggcggctactagtaaccccggtttttcctgtattatctggaaccataatatgggtagactgtcacagagccgaataccagtaacagggatgaatccaatgggtcatgagggatgccccagaatcaggggcccagatgttcagggcacttgggccggtgggagggcatagggcctgggggcccccgggtcacggtcgccaaccatcttcctgtccctagacttcacggagtaggtcgaatgctatgtaagcccagacagcaccagttccaagaagaagggttttgaacagggaccacgacgacattggtcgggcaccgagggtctcgcttgtggatgtttgatcacggtgggaccttgggaaggatgggtgctgggggggtgcccccagcacaggccacctcatgttcccccttgtggatcttccgggctttggggaaggaagtgttgagtgaaggtttgagaagttgtggttttctgcgtggagctaagtggccgctgtcggtgttccggatgcttgggacggtgctcagtgagacctcctttcccctgtcgtttcagtttctcagaagtgtgtatttctcttaagtttctatttcctgctgtttgtaaattggtgaattagccagggaccaatgaggtgtggtttaacttcttgaggatcaaattacttatggcagggtgggaggaaaggctgaaggctaaggagagaggcttcctcatcagaagtgaagtcaggactag

SEQ ID NO: 125455 - DNA, 884 bp, Homo sapiens
tgctcccttgggctctagagaggaggcccctcttagccctcagcccctccttcctctctatcttaaagtaatttgatcctcaggaatttgttccgccctcatctggcccggccaaatcccgatttgacaaatgccaggaaaaggaaactgttgagaaaccgaaactactggggaaagggagggctcactgagtaaccatcccagtaacccgaccgccgctggtctttcgctggacaccatgaaatcacactgtccaaaccattcttctctcctgtcaacagcggcaagcccccccaaactatggagatgcttcaaggaagaacaccgagttggctgtgctgggggcgcccccaaaacccctgctccccccgacgtcccaccgtgatccaacatccgctagcgtgtacctccgtgccccgacccatgtcgtctggtccctgttcaaacaccctctttcatgaaccccctgctgcatgggcttccatcgcattcgccctactccgtgaagtctagggacaggaagattggttgcgaacgtgacccggggcccatcgcctatgcctccaccgccaaagtgcctgaacaatctgggccctgattttggggctccttcatgaccattctggctcatcgtcatcgccagtgctgatcgttccaggcctatgggatagatcaggaggcatcactggaggccaggagctctgcccatgaccttgtatcccacgtactccaacttccattcctcgccctgccccccggagccgagtctggatttaaccccttttatccttacacgcttttttacaatggcattcaataaaagtgcacgtgtttctggtaaaaaaaaaaaaaaaaaaaaaaaaaaaaaaaaaagggcggccgct

SEQ ID NO: 125456 - DNA, 1161 bp, Homo sapiens
atgaagaatactggccagaggactgtgctgaagtttgctgctgccactggagtcagagcaattgctggccacttcactcctggaaactttactaaccagatccagggagccttccgggagccacggcttcttgtggttactgtccccagggttgaccaacagcctctcacagaggcatcttatgttaactttcccaccattgctctgtgtcacacagcttctcctctgcgctgtgtgaacattgccatcccatgcaacaacacggaagctcgctcagtgggtttgatgcagttgctgccccgggaagttctgcacatgtgtggtaccatttcccacgaacacccgtgggaggtcatgcctgatctctacttctacagggatcctgaagagactgaaaaagaagagcaggctgctgctgaaaagcctgtgaccaagcaggaatttcagggtgaacagactgctccagctcctgagttgactgctactcagcctgaggttgcagactggtctgacggcgtgcgggtgccctctgtgcctattcagctgttccctactgaagactggagcgctcagcctgccgtggaagactgggaaaagggttttggcctaaagaaaacttgtacgcgtaccttccaccccgtggtgaagactgatccacgcaaaatcgacagtgaaaaccaagagcgcgtccttaacacacccgaacggacagaaaactgctactcggcgaaaggcaacgtgaagctccaacagcggatactggacccggaaccccacagttcgctaccagccaaaaccgcggcctccgaaagtatgtttttctcctcttcaagggtcttctctctcattatacctgaagaaccccaagaatgcttcagttccatgcagctcctcaggtggcgaggtagccctgacagaggtacatcagcagccattgacactcgacgccgatccttccagccccatgacgaagacccagaatcaacagcatcttttccatactgttatatctcccctagtattgatcgaatcattccccaagccaatggtttcaagtttgaactcttagttaattctcatcatatagttcattttgcaagagcaggcaataggagagctctagatttcatgtgccacaacctggactggaaaaagatatga

SEQ ID NO: 125457 - DNA, 1234 bp, Homo sapiens
  misc_feature (1)...(1234): n = a,t,c or g
ggttcggttttgccgggccgacccacgcgtccgacctgcagaggggtccatacggcgttgttctggattcccgtcgtaacttaaagggaaatttttatcaatgtccggagtctcttgatgtcctgcaaatgaaggaggaggatgtccttaagttccttgcagcgaggaacccactgtaggtggcaccaatcttgacttaccacatggaacagtacatctataaaaggaaaagtgatggcatctatatcatatatctcatgaggacctgggagaagcttcttgctggcagctcgtgcaattgttgccattgaaaaccctgctgatgtcagtgctatatcctccaggaatactggccagagggctgtgctgaagtttgctgctgccactggagccactccaattgctggccgcttcactcctggaaccttcactaaccatatccaggcagccttccgggagctcacgggcttcttgtggttactgaccccagggctgaccaccagcctctcacggaggcatcttatgttaacctacctaccattgcgctgtgtaacacagattctcctctgcgctatgtggacattgccatcccatgcaacaacaagggagctcactcagtgggtttgatgtggtggatgctggctcgggaagttctgcgcatgcgtggcaccatttcccgtgaacacccatgggaggtcatgcctgatctgtacttctacagagatcctgaagagattgaaaaagaagagcaggctgctgctgagaaggcagtgaccaaggaggaatttcagggtgaatggactgctcccgctcctgagttcactgctactcagcctgaggttgcagactggtctgaaggtgtacaggtgccctctgtgcctattcagcaattccctactgaagactggagcgctcagcctgccacggaagactggtctgcagctcccactgctcaggccactgaatgggtaggagcaaccactgactggtcttaagctgttcttgcataggctcttaagcagcatggaaaaatggttgatggaaaataaacatcagtttctnnnnnnnnnnnnnnnnnnnctcgagggggggccttttaaaagaacccctgggggggccaaatttaaccgggggggggaaggaaaaagcttttcccttaaagggggccgaataaaaaccaccctgggaactttgggaaagaaccctatttttgggggggggaaaaaatggaaag

SEQ ID NO: 125458 - DNA, 822 bp, Homo sapiens
atggcggatgacgccggtgcagcgggggggcccggaggccctggtggccctgagatggggaaccgcggtggcttccgcggaggtttcggcagtggcatccggggccagggtcgcggccgtggacggggccggggccaaggccgcggagctcgcggaggcaaggccgaggataaggagtggatgcccgtcaccaagttgggccgcttggaatcagagatcattgatttcttcctgggggcctctctcaaggatgaggttttgaagattatgccagtgcagaagcagacccgtgccggccagcgcaccaggttcaaggcatttgttgctatcggggactacaacggccacgtcggtctgggtgttaagtgctccaaggaggtggccaccgccatccgtggggccatcatcctggccaagctctccatcgtccccgtgcgcagaggctactgggggaacaagatcggcaagccccacactgtcccttgcaaggtgacaggctgctgcggctctgtgctggtacgcctcatccctgcacccaggggcactggcatcgtctccgcacctgtgcctaagaagctgctcatgatggctggtatcgatgactgctacacctcagcccggggctgcactgccaccctgggcaacttcaccaaggccacctttgatgccatttctaagacctacagctacctaacccccgacctctggaaggagactgtatttaccaagtctccctatcaggaattcactgaccacctcgtcaagacccacaccagagtctccgtgcagcggactcaggctccagctgtggctacaacatag

SEQ ID NO: 125459 - DNA, 1035 bp, Homo sapiens; identical to SEQ ID NO: 123566

SEQ ID NO: 125460 - DNA, 1050 bp, Homo sapiens
  misc_feature (1)...(1050): n = a,t,c or g
ttgagggatactctagagcggccgccctgtgtttttttttttacacgcttaattcactttatttttcttgtataaaaaccctatgttgtagccacaagctggagctctgagtcctgctgcacggaagactctgggtgtgggtctttgacgaggtggtcaagtgaactccttgatagggaaactttggtgaatacaatcttcctttccagaggtcggggggtcaaggtagcttgtaggttcttaaaaatggcancggcatcaaagggtggcccttggccaaaattgcccaagggtggcagtgcagtccccgggctgagggtgtagcagtcatcgataccagccatcatgagcagctttttaagccacaggtgcggagacgatgccagagcccctgggtgccagggatgaaggccgtaccagcacagagccgcagcgccctgttcaccttgcaaagggacagtgttggggctttgccaatactttgttccccaaatacccttctgcgcacgggaacgatgggagagcttggctagcaatcatggcccccacggcatggccggtggccaccctcctttggagcacttaacaccccagacccgacgtgggccatttgtagtccccgatagcaacaaatggccttgaaccctgggtgccgcttgcccggcacgggttctgctcctgcacttggcataatctttcaaaaccttcatcctttgagagagggcccgccaggaaagaaaatcaatgatctcttgtttccttaaatgggccggaataagaatagatagatctccttccaggggaactttgatctttaatggtccttgaccaaagcggccccaacttggtggaaggcacatccactccctttatcctcgggcctttgctccggcagcttcgcgcncttcggccacggcccccttcaaagggcgggaaccccggcccggattgcaattgccgaaacctacgccggaaagcaacggggttttcccatccccgggccaccagggccccgggcctgcccgttggcaccggggttattcgccattt

SEQ ID NO: 125461 - DNA, 314 bp, Homo sapiens; identical to SEQ ID NO: 10584

SEQ ID NO: 125462 - DNA, 2377 bp, Homo sapiens
ttaacagccattttcatctacagcaagtacacaggcccctttggccagcaactcctcaactaccacctttaagccattgcgcgcagcgacgtggaggggtgtctgcagtgcattatttttttcattaataaggctctcgtcttgtatcttgtcaagtattaacaaggcacatttttcatgacctttactacaagccaaatgtaagggtgtattcaagtccttatcctttacagtcagatcagcctgggcactgttcaccaaaatatccacagcgcctgcctgcccattctcagcagccatcatcagtgctgttttccctgaattatctactgcgttcactggagcactgtgtctcagaagaagctgcaagcactccacatgatcagcaaatgctgccgcatgaaggggtgtcctgcctttgtcatctctacaactgacgatactggaatctatggccccaagcagcaatgatgcacaattcccatgatcattgattattgcacagtgcagtggagtaaagggattaccgataaatttgcgaaaacatttttgctccaaaagtacctctatacagttttcattaccattgtaacaagcccagtgcagcggcgtgtagccttggttatctttgaaacaacagtcctcctcagaaagagccatttggagcagctcgctcagccacgtggcgtggccacgagcagctgcatagtgcaagggcgtcctccctctggaatctttacagagaattgacacttcttgttccagcagcatttgcacacattcctcgtgtcctgtcataatccctctgtgtaaagctgtgcatcctaggatgtcaacagtgtctacgttggcttccttttcaagtaacaatgaaacagcgtcaatatgtccatatgctactgcaagcatcagtggtgtttgtcctttggcatctttcacatcgaccgcctccgggttgtctgcaatttctagcaacagccgtaaacacagtgtgtgaccattaattactgaggcatgaagtggggttcttttggttacattgtctttcacaaagatggatgcgccctgattgataagcgcttccacacattctgtgtgtcctttaaaggcagccagatccagagcagtgcggcctttctcatccctgatgtccaggtccaccaacgactgcagaaggacttccaaggcttgatggtgcccattgtaggcagctaagtggagtggactcttagtagcaccagaatctgattcttcaaatccactgtttgttctttccaaaagcaattccagacactgcctgtgcccataggcggcagcataatgtatgctattgtaaccttccttgtcccggatagatggatttgcatcattttgaagcagaaactctagacatagtgtggcttccttttccttcagctccctggctctttcaagttcttctgaattatcatgggcatttcctaagatagtcttatttctatccatgtctgatgcagcggcgtaatgcaaagctgtgcgtccccagtcatctgtttcattaacgttggcccctgtggtcactaatgtctcaatacagtggaaatgacaattcgcagctgcatagtgcaaaggggtcctcccacacttgtcctttttatggaaatctgctccgctgctctgcaagagttttatacattccacattacctcctgcagcagcagcatgaaggcacgttcttccaaatttatctggggtgtctatttcaaagcctgcagacagcacgtgctcattactaaacaaggatactatgctatacttttgtcccgatgataacaactttctgcagcagtcagagtgagcatttagggcagctaaatgtaaagggaacatgctatggattccacacttggctgtgtcagctccgctggttattaaggtgttaatcaaaagctcatgaccgtatcttgcagccacatggagaggagtgttgccgtccttatccacacagtcaatttcacctccattctgaatgagggtctgtgaccgtgtgaaccttccatggacagctgtcatgtgcagtggacttttgccatctttactctgaatgttaacatctgccccgttgtttactaacaattcaagacacaaagcaccatgagtggaggcagcagcaaaatgcaaaggggtgaacccattattgtttggctggttcacgttagcaccgtagtcaatcaactcgttaaccacagcatcctgtccattgtagcaggcgatgtgaagcgctgtatttccatagacattgatttcatcaatctccacccccaggttcaggagatgcttgacaacattaatctgtccattggaggctgcagcatgcagaggggtataacccctcttc

SEQ ID NO: 125463 - DNA, 777 bp, Homo sapiens
atgcagtctgctggattgcagagaggtcgtggaggtggatctggcaattttatgggtggtagaggaaactttggagatggaggaagtaattttggctgtggtagaaactttggtggaagaagaggctatggtggtgaaggtggtggcagcagaggtagttatggaggaggtgatggtgggtgtaatggatttggaggtgatggtggcacctatgatggtggtcctggttctagtggtagagggggctatggtggtggtggaccaggatatagaaaccaagggggtagatatggtggtgggggatatggtggttacaatgaaggaggaaactttggtggtggtacctgtggtggtggtgggaacaataatgattctggaaattatagtgggcgacagcaatcaaattttggatccatgaaagggggtagttttggtggaagaagctcagacagtccctatggtggtggttgggtggggaaaccatgcacagctaagtggagtggactcttagtagcaccagaatctgattcttcaaatccactgtttgttctttccaaaagctgtggagacaaaaagcaaacaatagtacgtcattgtattgaggaagttcctgaacttccttcggtggttgaaggtaaagttgaaggctacaagaagacccaggaggctgttttgctgcataagaaacttaaaacctggagtgatatcaaaaagatctatgcctctcagcaaataagaactggcaaggacaaaatgagaaaccatcatcgtatctga

SEQ ID NO: 125464 - DNA, 478 bp, Homo sapiens
gaaaccaaggtggtggatatggtggaggtggaggatatgatggttacaatgaaggaggaaattttggcggtggtaactatggtggtggtgggaactataatgattttggaaattatagtggacaacagcaatcaaattatggacccatgaaagggggcagttttggtggaagaagctcgggcagtccctatggtggtggttatggatctggtggtggaagtggtggatatggtagcagaaggttctaaaaacagcagaaaagggttgaatgataaccctacttgcctaaatgaggaaattcttttctaaccatctaaaatacaaaggttcttggctgggtaaggtttgtagttgacagtaaaacctgatgacaccatttgtttccctgcaagtctacattacatatttcacaactttgtccctctctagtaggcacattggaaaaattcttcaactgaaaactaccttggtaccatgg

SEQ ID NO: 125465 - DNA, 619 bp, Homo sapiens
gcacgagggagctgtcttcctcttcttccgccatggcgtgtgctcgcccactgatatcggtgtactccgaaaagggggagtcatctggcaaaaatgtcactttgcctgctgtattcaaggctcctattcgaccagatattgtgaactttgttcacaccaacttgcgcaaaaacaacagacagccctatgctgtcagtgaattagcaggtcatcagactagtgctgagtcttggggtactggcagagctgtggctcgaattcccagagttcgaggtggtgggactcaccgctctggccagggtgcttttggaaacatgtgtcgtggaggccgaatgtttgcaccaaccaaaacctggcgccgttggcatcgtagagtgaacacaacccaaaaacgatacgccatctgttctgccctggctgcctcagccctaccagcactggtcatgtctaaaggtcatcgtattgaggaagttcctgaacttcctttggtagttgaagataaagttgaaggctacaagaagaccaaggaagctgttttgctccttaagaaacttaaagcctggaatgatatcaaaaaggtctatgcctttgccagctctcattcgcgtcgacgcggccg

SEQ ID NO: 125466 - DNA, 899 bp, Homo sapiens
gtcgtggaggtggatctggcaattttatgggtcgcggagggaactttggaggtggtggaggtaattttggccgtggtggaaactttggtggaagaggaggctatggtggtggaggtggtggcagcagaggtagttatggaggaggtgatggtggatataatggatttggaggtgatggtggcaactatggcggtggtcctggttatagtagtaaagggggctatggtggtggtggaccaggatatggaaaccaaggtggtggatatggtggaggtggaggatatgatggttacaatgaaggaggaaattttggcggtggtaactatggtggtggtgggaactataatgattttggaaattatagtggacaacagcaatcaaattatggacccatgaaagggggcagttttggtggaagaagctcgggcagtccctatggtggtggctatggatctggcggtggaagtggtggatatggtaccagaaggttctaaaaacagcagaaaagggctacagttcttagcacggagagagagcgacggagttgtcacggaaagctgcaggttactttgagacagtcgtcccaaactgcattagaggaactgtaaaaatcttgccacattaaggaacgatgatcccttagttcaggaaaagttacttgccagctttaaacagggaaacccttctttgtttcaggacttgtcatagccacagttttgcaaaaagtgcagctatttgttaattgcaatgtagtgtcaattagatgtacattcctgaggtcttttatctgttgtagctttgtctttttctttttcttttcattacatcaggtatattgccctgtaaattgtggtagtggtaccaggaataaaaaattaaggaatttttaacttttcaaa

SEQ ID NO: 125467 - DNA, 399 bp, Homo sapiens
atgacgcgctgccccgctggccaagcggaagtggagatggcggagctgtacgtgaagccgggcaacaaggaacgcggctggaacgacccgccgcagttctcatacgggctgcagacccaggccggcggacccaggcgctcgctgcttaccaagagggtagccgcaccccaggatggatcccccagagagctttcaagccaccggtgggacgcagcagatgacatccaccgctccctcatggttgaccatgtgactgaggtcagtcagtggatggtaggagttaaaagattaattgcagaaaagaggagtctgttttcagaggaggcagccaatgaagagaaatctgcagccacagctgagaagaaccataccataccaggcttccagcaggcttcataa

SEQ ID NO: 125468 - DNA, 431 bp, Homo sapiens
  misc_feature (1)...(431): n = a,t,c or g
cccacgcgtccggcggagctgtacgtgaagtctggtgagcgcagccggcgggctagggcactaggtcgtcgccccggcctaggctgggggcggttgcggcgcttaatatggaccctctgtctcccccagccccagtataagctaacagtggagttccgggctcgcttcacacatccctcgcctccgcaggcaacaaggaacgcggctggaacgacccgccgcagttctcatacgggctgcagacccaggccggcggacccaggcgctcgctgcttaccaagagggtagccgcaccccaggatggatcccccagaggtgcgtggggcccctgtgctcggagacagacggagaatnnnnnnnnnntgtaaggcataagcctgtttggaaggctttttttctctccccgagggctccttaaggagagaagtttt

SEQ ID NO: 125469 - DNA, 670 bp, Homo sapiens
gtgggtcaggcccagtgggacagtcttggtggtgcatcttctactgattggtcttcaaaagtcttattaatgctcctgaaatcctgtgttcatttctttgggaaggccttagcagattctgaaggagtccgtaactctcaaaggattaagaacctgtccactgggtcagagggtctatctctgggaaccattcctgcatttggctgtggatgggagccctctctaacctctgatgtgccagagcttacccttgtgtggccacggcagtcttccaatgcctgttccaaaggtctcagcacatcctccatcagtcgagcctcagactcgactgggaaacttgtgggctccacgccagaggcaggaccactccccaacaggtggggacctgggagccttacttgaaggaggtggaggccccattgggggaggcccaggagaagtctctgatgcggggactgaaaaggtacagcaggatcaagcaacatggcttaaatgggtaagaagcttaactctaaattcaccccttctaagaagggctactctctgagacaacttattcattcaaaaatatgcatttatgaagtccccactctacgccagacaatatgctaggcattaaagattagaaaagtaaaccaggtggccgggtgtgatggctcacacctgtaat

SEQ ID NO: 125470 - DNA, 1899 bp, Homo sapiens
atggttcccaggaggggacatctgggggatccacggctcctcccgcctcgccgaatgctctccccacaccactccacactgttgaggcagttgacaggagccgcagaagaaacaagggacatcctcactcctgagccgctccagagtcgcttctccccggaactaaaaagcggtttcgctggcgttcgtgggcctcccccggacccacacacggaaacacgcaaccattcggggatccagacgcccgtttacacgcaccacccctgggcgggctgtgcggctcaggccctcccccgggaccggcccgtgtcccgccccgtgtcccgccccgtatttgtgcggcgccagctggccccgcagcctgcggcgcagagaggctgggcttgcaggcgcagtagctccagaggtcgcgctgggctgagagtgcgggccggcagaggctggcggggagcagccggggttatgctgggcaaggattacatgctggccatcattctggtcaactgcgatggtgtgcacggaggggcccggtgggaagaccaggagctgagggaggacgagggaatccgaaaggctactctggggctcaaagacgatgacttgtggggggaccacagtctggaggtggaggctggcctgcctcctggctggaggaagatccacgatgctgcaggtacttactactggcatgtacccagcggtagcacccagtggcagcgcccaacctgggaactaggagatgcagaggacccaggcacgtgctttgcagtccgctctctgggctgggtagaggtacctgaagaggacctggcaccggggaagagcagtattgcagtcaataactgtatccagcagctggcccagacccgcagccggagccagcctccagatggtgcctggggtgagggccagaacatgctgatgatcctgaagaaggatgccatgagcctagtgaatcccctggaccacagtctgatccactgccagcctctggtgcacatccgtgtgtggggcgtggggagctccaagggccgggacttcgcttttgtggcaagtgacaaagatagctgtatgctcaagtgccatgtgttttgctgtgatgtccctgccaaggccattgccagtgccctacatgggctttgtgcccagatcttgtcagagcgagtagaggtcagtggtgatgcctcttgctgctccccagaccccatctctcctgaagacctgccacggcaagtggagctgctggatgcggtaagccaagctgctcagaagtacgaggcactgtatatggggacactgccagtcaccaaggccatgggcatggatgtgctgaacgaggccattggtaccctcaccgccaggggggaccggaatgcctgggtccccaccatgctcagtgtgtctgactctctcatgactgcacaccccattcaggtaccagaagagggtgaagttgggggctttggaggggcagaggccagtacagaggaggagccattgtggcagtgccctgtgcgccttgtgacatttattggtgttggccgcgacccacacacctttggcctcatcgctgacctgggccgtcagagcttccagtgcgcagccttctggtgccagccccatgcagggggactctctgaagctgtgcaggctgcctgtatggttcagtaccagaagtgtcttgtggcctctgcagctcgaggcaaggcctggggtgcccaggcccgtgcccgcctgcggctcaagcggaccagctccatggattccccaggaggtcccctgcccctccccctgctcaaaggaggggttggcggtgcaggggcaacccctcgaaagcggggtgtcttctcttttcttgatgccttccggctgaaaccctctctgctccatatgccctaa

SEQ ID NO: 125471 - DNA, 1839 bp, Homo sapiens
gctgggctgagagtgcgggccggcagaggctggcggggagcagccggggttatgctgggcaaggattacatgctggccatcattctggtcaactgcgatgatgacttgtggggggaccacagtctggaggtggaggctggcctgcctcctggctggaggaagatccacgatgctgcaggtacttactactggcatgtacccagcggtagcacccagtggcagcgcccaacctgggaactaggagatgcagaggacccaggcacgggaacggaggggatctggggactgcggccccccaaagggagatccttctccagcctggagagttcactggaccggagtaactctctgtcctggtatggtggggaatcctacatccagagcatggagccaggggctaagtgctttgcagtccgctctctgggctgggtagaggtacctgaagaggacctggcaccggggaagagcagtattgcagtcaataactgtatccagcagctggcccagacccgcagccggagccagcctccagatggtgcctggggtgagggccagaacatgctgatgatcctgaagaaggatgccatgagcctagtgaatcccctggaccacagtctgatccactgccagcctctggtgcacatccgtgtgtggggcgtggggagctccaagggccgtgacagggacttcgcttttgtggcaagtgacaaagatagctgtatgctcaagtgccatgtgtttcgctgtgatgtccctgccaaggccattgccagtgccctacatgggctttgtgcccagatcttgtcagagcgagtagaggtcagtggtgatgcctcttgctgctccccagaccccatctctcctgaaagacctgccacggcaagtggagctgctggatgcggtaaagcaaagctgctcagaagtacgaggcactgtatatggggacactgccagtcaccaaggccatgggcatggatgtgctgaacgaggccattggtaccctcaccgccaggggggaccggaatgcctggggtccccaccatgctcagtgtgtctgactctctcattgactgcacatcccattcaggcagaggccagtacagaggaggagccattgtggcagtgccctgtgcgccttgtgacatttattggtgttggcccgcgacccacacacctttgggcttcatcgctgacctgggcggtcagagcttccagtgcgcagccttctggtgccagcccccatgcaggggaactctctgaagctgtgcaggctgcctgtatggttcagtaccagaagtgtcttgtggcctctgcagctcgaggcaaggcctggggtgcccaggcccgtgcccgcctgcggctcaagcggaccagctccatggattccccaggagggtcccctgcccctccccctgctcaaaaggaggggttggcggtgcaggggcaaccccctcgaaagcggggtgtcttctcttttcttgatgccttccggctgaaaccctctctgctccatatgccctaaacttatctgggaaggctggggaagtaggctctgggtccatgcctaactctgtaccgttttattcctcaaggcctatagcctggtcatcccttgaagccttctctgcctgtccctccgatccttgtccaccgtctatttattgcccaatttattgtttatacggatgactgggaggcactgcaccacaacgtaggaccctggctcccctttccttgggtccttgtgttccttgcccctgtccaaccctggacagttggctctacctcagtaacactttatagcaaaatcagtgcaaataaaaatccctcagtgacctc

SEQ ID NO: 125472 - DNA, 1832 bp, Homo sapiens
cagaagtacgaggcactgtatatggggacactgccagtcaccaaggccatgggcatggatgtgctgaacgaggccattggtaccctcaccgccaggggggaccggaatgcctgggtccccaccatgctcagagtgtctgactctctcatgactgcacatcccattcaggttcagtaccagaagtgtcttgtggcctctgcagctcgaggcaaggcctggggtgcccaggcccgtgcccgcctgcggctcaagcggaccagctccatggattccccaggaggtcccctgcccctccccctgctcaaaggaggggttggcggtgcaggggcaacccctcgaaagcgggggagttgccgcaggtccccacagcggctcccgacggttgtgaaccagcatccattctccacggattccggcaacccgcctggccctgggacgtgtctcaactggcccgcgtgaggggccgccccggaaatgacgcgctgccccgctggccaagcggaagtggagatggcggagctgtacgtgaagccgggcaacaaggaacgcggctggaacgacccgccgcagtttttcataacgggctgcagacccagggccggcggacccaggcgttcgttgtttattcaagagggttcgccgcaccccaggatggatcccccagagtccccgcatcagagacttctcctgggcctcccccaatgagcgctccacctccttcaagtaaggctcccaggtccccacctgtgcgacgtcggtcctgcctctggcgtggagcccacaagtttcccagtcgagtctgaggctcgactgactggaggatgtgctgagacctttggaacaggcattggaagacttgccgtggccacacaaaggaaagcaggtatgtgattgacatcagcccgacgcctggcactggttgcaggaacagtgggcttggaggaaagttgtcaataccctgtaaaagaagagaatggctctacttggtgcaaaagctttttaagccaccggtgggacgcagcagatgacatccacccgctcccctcatggttgaccatgtgactgaggtcagtcaagtggattggtaggacgttaaaagattaatttgcagaaaagaaggagtctgttttcagaggaaggcagccaaatgaaaagaaatctgcaagccacaagctgaagaaagaaccataccataccagggtttccagcaggctttcataatcctccgggttccccagacttcaccgggacaccatcttcctaatgccttggaagaccttctgtcacttggctcccttcttaccaccaccaagactgtcccactgggcctgacccacctatgagggaagaagtcccacctgggccagagggagttcatgtgttactcataacatgcatttcaataaaaacatctctgcggtgggccttgggtaggagagatgaacccttccggtgccaagctagtcccctctggtgtcctcgactgcccctgctccctgtgtatctgcaaacctctgttctcccttctccattcatcaggaagggatctgctgggtaaagtcagactactgcctaccactttttcccaaagtagactgaaagcacatcctgtgctgggcggagcagctgtgtttggatggtttcatttcagcatgagaacagactcaaatagaacggggagacttttccctcaacaaaaggaaagacagtcctatttgcactgtatcacacttgagatactactgttacagagattagaaccacattgagtggggttttctgtgtaaatcgaaggagaaaaagaccagattactgagattggggattgtaac

SEQ ID NO: 125473 - DNA, 487 bp, Homo sapiens
  misc_feature (1)...(487): n = a,t,c or g
caaacaaaaaaaagtccattttacttttataaaaaaaaaagcaacaccactccaagttgtttaacatcctgaactttctattaatactatctgaccaaattttaatacaaaaggttaatttttatgaacaaatggataataacccaactgcaaactaccaacatatattctatctgaactcagcagttcccagggatgatgtttggaggggaggaaattgaatgcgtacagagcacgaagtctgggctaacaaggcctgagccaacantaaccttgctctttctcttcgtcttcagggcagcccgggctgagggctgcaaatcataaaaccgggctttgggctttcttatggaggtctgaggttgaattgaacctcagcacttgcagatcacaggaaggtttgcaggttcaggcaggcttttttcccccggatttccagnacccccttntcagggtttccgggggccgaaatcccgttaggttgttc

SEQ ID NO: 125474 - DNA, 871 bp, Homo sapiens
gttgctccgggatcccctttctcaataacagaagaaagagagttgccagaaggaatttccacttcatccctagaagttgtgccagagaacttgaacggttctgccattctcccaacctttgaaaacttcactaaaaaacggaaaagaaaatatgagcttaggtacagaaagcgtccgtttaattcataaaatgcaaagaaagcaccggattgcctaataaaacttttaaaccagatgcaactgttcagactcaataaactagagcgctttcaaaatttggttcttcaagagttgagcagtcttaagcaggatattcaggccctggaacaccttgagaaggaggttctggaattctgggggaaacagtctgctgatctgcaatctttctgtgatctgcaagtgctgaggtactttgaaaggtgttctttctagaagaatcttggttgaagtatgaggttcaattcaactcagaccttcataaggaaagcccaaagcctggttttatggattgcagccctcagcctgggctgccctgaagacgaagagaaagagcaaggttattgttggctcaggccttgttagccagacttcggtgctctgtacgcattcaatttcctcccctccaaacatcatccctgggaactgctgagttcagatagaatatatgttggtagtttgcagttgggttattatccatttgttcataaaaattaaccttttgtattaaaatttggtcagatagtattaatagaaagttcaggatgttaaacaacttggagtggtgttgctttttttttataaaagtaaaatggactttttttttgtttgagaaatgtcttcaagttttgtgtgaataaaacactttagcagc

SEQ ID NO: 125475 - DNA, 1245 bp, Homo sapiens
agaaacccacccaaccccctaaacctaagaaacccagactgcgcaaacctgcaggaacagagccatttccccctaatgtgtgcttcaaacccaccgaagcccaactcagcggctgccgatctgggcagcgggtgggtattcctggggctccgtggacgttgagccgccgcgcgaaaccggcgccggctggacctgcaaatcgccgcccggccggcaggggacgccgcggacgcgagggcgagacattgatcccaagagcactccccagtaaatgttctccatttcagagactgcttcccataggcaaacggacccacaacaatatattcagaaaggtattcccccacaattcacgtgctgaagttctaactgccatggagggtggagcctttgggagagttagtgcagcccccacgggttatgggtccattccacaagactgtccccacttcagattccagtgccagatctgggcctcctgtatgtctgaacaatcagctataaatctgtacatcagggctctccaccatcctctcctcatgctccgccttaaggctacactaatccaggattcccctaatccaatttcagaaattgaacttttctgggtcagcccgatcagtcaaagccaaccaggcttcaggtgtattttcagccgcccctttattcctgtgcttaggtacagaaagcgtccgtttaattcagaaaatgcaaagaaagcaccggattgcctaataaaacttttaaaccagatgcaactgttcagactcaataaactagagcgctttcaaaatttggttcttcaagagttgagcagtcttaagcaggatattcaggccctggacacaccttgagaaggaggttctgggtggggaattggatgatatgggcagtagagaaggatctggaaggattgctgatggcttggatgtgacaggtgggaaaaggcaggatcaagggcagcttctaggtttggggcttaagcagctgggtgcaaaccactgtcacttaaggaggtggaggagattgggaaaggtccagttgattggcccgggaaggatgaggatggatatgaaaggcaggaagaaggagttgagtaaaactaaaagcctgggctgcctgaagacgaagagaaagagcaaggttattgttggctcaggccttgttagccagacttcgtgctctgtacgcattcaatttcctcccctccaaacatcatccctgggaactgctgagttcagatag

SEQ ID NO: 125476 - DNA, 462 bp, Homo sapiens
atgacggttagcaagaacaagtgccatacaaaaggtggcaaaaagggaaccgagaagaaagtggttgcttcattttctaagatatattggtataatgtaaaagcacctgctatgttcagtataagaaatattggaaaggcactggtcatagggactcatggaaccgattttgtatctgatggcttcaagggtggactgattgagattccagacagcatcggaaaagacaaagaaaaggcttgccgatctatttatcctcttcatgatgtttttgttagaaaagtaaaaatgctgaagaagcccaagtttgaattgggaaaactcatggagcttcatggagaaggcagaagttctggaaaagctactgggaatgaaagtggtgctaagttgaatgagctgatggatatggatcaccagcccaaaaatctttttaaagttcagacttttaatagtggtagataa

SEQ ID NO: 125477 - DNA, 645 bp, Homo sapiens; identical to SEQ ID NO: 125434

SEQ ID NO: 125478 - DNA, 587 bp, Homo sapiens
attcgcacgaggcccatgcaatatacagttagctaagagggtgtaatggaaaaagcataaggcttggactcagaagactctactaactttgccactagctagctatgtaattcagatcatctatcctttacatgtgaaaggtaaataatggcttatcttaacaggaggatttatgcaggttaaatgaggtaggtgttatgtgtaggtttattccaaggcttctctactttttaaagaaaatggcttatcttatatctgagaactaggacttttagaaaaaaatttactgttactggtttgcaggattccagacagcattggaaaagacatagaaaaggcttgccaatctatttatcctctccatgatgtcttcgttagaaaagtaaaaatgctgaagaagcccaagtttgaattgggaaagctcatggagcttcatggtgaaggcagtagttctggaaaagccactggggacgagacaggtgctaaagttgaacgagctgatggatatgaaccaccagtccaagaatctgtttaaagttcagacttcaaatagtggcaaataaaaagtgctatttgtaaaaaaaaaa

SEQ ID NO: 125479 - DNA, 441 bp, Homo sapiens
atgctgaagaagcccaagtttgaattgggaaaactcatggagcttcatggtgaaggtagtagtactggaaaagccactggggatgagacagtcccagccactgggggtgatgccagcagcagttcatctggagcggctgccacaaaaaacgccggctgcagcagggaaggcgtggcagggtctgtgcgctccaaagagtcagcaacaggtgggagccctgaccactttccaaagttgcccctcttcgccttgctaaccctccaactgtctgtgtacctcattctctctggacgtgggacaagaactcgggacccgccaaatggtgggactcgaagagctgtaacacaaacagtgctgaaacatcccttcctaccccccactcaccatgctgccggcgacaaggacggaagagctctgaccctttggggagtccagacctag

SEQ ID NO: 125480 - DNA, 1139 bp, Homo sapiens
cccttttggctctctgaccagcaccatggcggttggcaagaacaagcgccttacgaaaggcggcaaaaagggagccaagaagaaagtggttgatccatttcctaggcaaagattggtattgacgtcgaaagcaccctcttatgttccattataagaattattggaaagacggctcgtcacccaggaccccaaggaacccaaaattgcaatctgatggtctccaagggttcgtgtgtttgaaagtgagtcttgctgatttgcagaaatgatgaagtttgcatttagaaaattcaaggctgattactgaggtttgtttcaggggtaaaaacttgccctgacttaacttcccatggggcatgggatcttaccccgtgaccaaaatgtgttcccatggtcaaaaaaatggccagaccaatggattggaaagcctcaccgttgatgtccaaagacctacccgatgggttaccttgccctccgcctgttcctgtgttgggttttaccctaaaaaaccggccaacaattcaggatacgggaagacccctccttatgcctcagccacccaaccaggtcccgcccaaattccgggaagaagatggatgggaaatccatgacccccgagagggtgcaggacaaattgacttgaaaagaagtgggtcaataaatttgattcccagacagccattggaaaaagacaatagaaaagggcttgcccaatcctatttatccctctcccatgatgtccttcgttagaaaaagtaaaaatgctgaagaagcccaagtttgaattgggaaaagctcatggagcttcatggtgaaggcagtagttctgaaaaagcccctggggacgcagacaggtgctaaacgttgaaccgagctgcatggatatgaaccacacagtccaagaatctgttggaaagttcagacttcaaattagtggcaaagtgaaaaagtgctatttgtgatggtttgaaaaaaaaaaaaaaaaggggggggccctttttaaaaaatccttggggggcccaaatttaaccgggggtgggaaggcaaaatttttttctttttgggggggggtttaataccctccttgggaattttggaaaggaaccttttttttggggggggaaaaaaatggaacaacc

SEQ ID NO: 125481 - DNA, 1065 bp, Homo sapiens
tcaaacttcagtatgcttgtaaaccacctggggttcttcatgagctgtagattctgattcagcagggagtgggacctgagcttctgcaggtggtggtgatgctgctagttcatggaccacactttgagcagcagggctgtagcatctagtgctcctgcttacaggtttctccctgtttttccctattttgaggcacagtttcaggcagtcaggctggttctgctgcatttgcttggcaacatcacctccctccagcctctgcagcttccacccttgggctgctgcacgtgcacgtacatttccactgctgtggctcccacagtgcacagttggggactgagtctgaagctgtgtcacaataacatcactcagtctgggcaacacagtgggaccccatctcatcacccatgaggccactggatcctgaaacctttctcctcgccttccacctgccctgtctgcagcacattcgttgtactgtcgggggcagtgcaagctccaggtggctcctctgcatttccacctgattatcgtttttccaggtggagagtgcacagtcaggatcagaattaggcggttctgctttctctctctggctcttctgggaacttcataccatctctcggtccccttgacccaggaagaaccgttagcaggtcttgttgtacttaaatcacaggtgttcagggaaaagcccatggactcctgttgagcagctctgaggccagaccatccaggggagccccagtccctgacctcatagatctcatagtccatgcctgtgagcacagggacagcggcaagaaacaattcaggggggcaggtccttgagtaggacactgtatctttagggaagaagtgggacttcactaagccaaaagcttgcacagctgtccagtttgaccggggattccacaccactatgagagattcgtgactaagtggttgacccaagggtaggatgaagattttctctcttaggtgcctatgagtgagaacatgcagtgtttggttttttgtctttgcgatagtttgctgagaatgatggtttccagcttcatccat

SEQ ID NO: 125482 - DNA, 1245 bp, Homo sapiens; identical to SEQ ID NO: 122814

SEQ ID NO: 125483 - DNA, 2031 bp, Homo sapiens
atgcgcgcgagacaaaacggttgctctttctgttttcctcctccctctctggtggctctggctccaagtcagcacaaacttgagaggccttctggtgcccgtgtaggcttcaccagcctccaggaagggatagttcatgcagaatggaccagtggtctgggcctgcggaggtcaggaagggatttctgctatataaactgcgagaggctaatggaatgggagctcctctctgaagcttgtccagatttctccgaatttcagtccaaggaacatcagcatcacattctgcgggaacaagggccaaaatgcctcattatgggaacatcttcccaggcagcaagccatactgcccagacccgtcctgctcatacctacaagtaccccaacctgtacgaagcagtgggcactggcattaagctagtcccccacctctgtgagcccgctgcgactgaacatgctgaaggtgagcatactgtaggtgagcagccttcaggagaacagccttcaggtgaacacctctccggagaacagcctttgagtgagcttgagtcaggtgaacagccttcagatgaacagccttcaggtgaacatggctccggtgaacagccttctggtgagcaggcctcgggtgaacagccttcaggtgagcacgcttcaggggaacaggcttcaggtgcaccaatttcaagcacatctacaggcacaatattaaattgctacacatgtgcttatatgaatgatcaaggaaaatgtcttcgtggagagggaacctgcatcactcagaattcccagcagtgcatgttaaagaagatctttgaagaaatgtcattttcctatttctacatgcagacattcatccaccatcactcggaaaacattaatgacacataccatgaactacagaaagatgactcaaatataaactgtgtacaaagagattatgttataatggacatggatgaagctggaaaccatcattctcagcaaactatcgcaaggacaaaaaaccaaacactgcgtgttgtcactcatagggcgcccagtcccatcgaccacccaagggctgaggaatgcgagcgcacggcatgggactggcaggcagctccacctgcagccccggtgcgggatccactaggtgaagccagctgggctcctgagtctggtggggacgtggagaacctttatgtcctgctcagggattgtaaatacaccaatcagcaccctgtgtttagctcaagttttgtgagtgcaccaatcgacactctgtatctagctgctctggcttgctgctatgtccatcccatagcatctaccatggttactatatcaacaactgataggagaaacaataaactcattttcaaagtgaatttgttagaaatggatgataaaatattggttgacttccggctttctaagcctggacgctctggggtttggcattattcagtcctcctagaccctctacacatatctcccaccataaatgaagcagaaatgtggggtgatggtgttcagggtctctggagtgtgggtgatggggaggaagtgagactgcttagtgtggggcactattctgggtatggaagtgatgataacccatgtgggaaagctccaaaggggctggctctgtggaaatctttcctgagcctggacagtggtgaaacacccactggcgagtgtgtaaaaggaagcttctgcccacagcctgggagcagctcagtccagactctccagcctgctctcatctgcacactgaagcagactgtcttagcctttccggagcacttagctgcctggttccagccaccctgctgtgtctttcttacctcccagactgagatggacaagttcccgctcatgctcctgctgctgggggtttttcctcttgtgttcttccaaggtgtgagtgagggtttgggctggctggggcaggaggtgagaacaggggcgaagatagctggcgagcaggctgaagatgatctggccagcacgggaggaggtcaacaccaagattctgggatgatctga

SEQ ID NO: 125484 - DNA, 5517 bp, Homo sapiens
ttaatggacaccagaacggctactgcagagctgggctggacggccaatcctgcgtccggggtgagtatcaaaccattcgtctttcagtcctgctatgaggtcctggatccatatgatatctgtggggaatggaatacaggtgtgaatggctgtgtccactgcccatccatgcaaagacagcaccaggggtctcagacctgagctgctgcctcgtgtgctgatgtagaccatctcttgacacagtcctttctgaaagctgacacctagacaactagggccatggctgtgcattctccactggtttctcactgttactttatcccagcatttgaagaactgcactgctcgaggcataagcatgatgccttgaaacagggaagcaaggtccaaaatgagctggcattcccatggggagcagagagctgtgcatgcaaataacagggactctgtctcattggaggggtcagcaagactccctgcttcctcagagggggtggatgcagaggaggctgtgtgagtgtggcagaaataccaggctcctccaatgtcaatcctgctgtctaaggatcctccaaaaaggcctggacactgtgactgagtcttggatttaggaagatgtatcaggcttccttcggaagtaacggtgttccatccctggaagtgtctaaaattaggctgaggaccactgtggaagagcaaagtggggtcatggggtgtgcttgactcgctgtccttcgaggctttatctagccggatgtggccatgctccatcaggttctccagagcaacagcaccacttgcagccacagcatcctctggacattgtgaacactttctaagagctaagaatgcagcatattcccagccatactcttctggactaaaccacatctccccagactttgccttctcagtattattaacaggccccttgcatgccacgctgttctcaggctcatagccaggcttgcaggtgcatcgcccaataggcaccatccattccccatccccgttgcagtagagtttgatgggcacgtccacttcctctgcgttggggatgcatgtgccccgagcaatcaccagagatgtgctctctgcccctgtcatagtctctggaaacactgcaaaattttgcacaatgctgggacactttttgaagaagacacggacagaaagaagagacatacaggctccataatccttcatcagccttcccccaaagtccacctgggagaagctctcatctgcagcaatggtgtctactttgaggtagggggcctcagaccagaaggctgacttcttggtggcaatgacagagtcagtctcatagtaatacaagttgaaggtctccttgcaggatcctgggacattagggaggctgctgcagtctctcacagtgaagcgcatctctgtgtagatgcgatgggccccccgccggttgatgaaggtggtgagcagccaattgctctggttgggctcgaagacattgcacacctggtaggtgcggatggtgttcaggttttcatcgtagccactgacttcttcccatccatggcctctgtctccagcagtgtgaagcatgaacagccaggcgggggagcctgcaccttccatcttgcagctctccaaattacttttcagttcctccttgtacctctggtagaatttggctgtgaatccatctggtcctggactctttttggttggtaagctattgattattgccacaacttcagatcctgttattggtctattcagagattcaacttcttcctggtttagttttctcttgtaggcatttagtgctataaatttccctctacacactgctttgaatgtgtcccagagattctggtatgttgtgtctttgttctcgttggtttcaaagaacatctttatttctgccttcatttcgttacgtacccagtagtcattcaggagcaggttgttcagtttccatgtaggtgagcggttttgagtgagattcttaatcctgagttctagtttgattgcactgtggtctgagagatagtttgttataatttctgttcttttacctttgctgaggagaggtttacttccaagtatgtggtcaattttggaataggtgtggtgtggtgctgaaaaaaatgtatattctgttgatttggggtggagagttctgtagatgtctattaggtctgcttggtgcagagctgagttcaattcctgggtatccttgttgactttctgtctcgttgatctgtctttctctctggctgcccttaacattttttccttcatttcaactttggtgaatctgacacttatgtgtcttggagttgctcttctcgaggagtatctttgtggcattctctgtatttcctgaatctgaacgttggcctgccttgcgagatttgggaaattctcctggataatatcctgcagagtgttttccaacttggttccattctccccatcactttcaggtataccaatcagaggtagattttgtcttttcacatagtcccatatttcttggaggctttgctcgtttctttttattcttttttctctaaacttcccttctcgcttcatttcattcgtttcatcttccattactgataccctttcttccagttgattgcatcggctcctgaggcttctgcattcttcacgtagttctcgagccttggttttcagctccatcagctcctttaagcacttctctgtattggttattctagttatatattcttctaaatttttttcaaagctttcaacttctttgcctttggtttgaatttcctcccatagctcagagtaatttgatcgtctgaagccttcttctctcagctcatcaaagtcattctccgtccagctttgttctgttgctggtgaggagctgcgttcctttgcaggaggagaggcgctctgctttttagagtttcctttttttctgttctgttttttccctatctttgtggttttatccacttttggtctttgatgatggtgatgtacagatgggtttttggtgtggatgtcctttctgtttgttagttttccttcttttctcttctttattgtcattgcaatgggattccaaaaagcagcaaagagaaacatgtttgagtcagagctttgagtgtaggtgacattggtggtaaaagtccatctccctgaagaatgactagcacactgttcattgaggacctgctgtgcacaggcatagcactggggattccacagaggtaaattcttcttcgtaatggattttgatcgcctccgaggaagatgggagataactagagctgtcccgttccgagtcttgcctttaacagcatgtgctgcttcctctttggtcagttcgtgccctgagtaaacatgtaagtcctgctcctctagtggatcccgcactggggctgcaggtggagctgcctgccagtcctgcaccgtgcgctcgcattcctcatcccttgggtggtcgatgggactgggcgccgtggagtagggggtggtgctcccgtcggggaggctcgggctgtgtccacatgcgtgtttgtgtgcccttgcacagacatgtgcacacatcaaagggaaggagaaggagctgctgttgaggatgttcagcccaataaacatggctgtgaggggtctaggttgagggcctgggcatcttccaaggcttcccatacagatcaccaagttgctttctaaaaggtagtcctggtaagtccctgtcctgagcgaacctgtcttgtcatccttgttcacacccggggttgttgtgggaggatgaacagggtcacacgtgtcaagtcgcaacacaagcctggcacttggtaggtgcccacaaaagacagctgctgtcatttctatgagtgagaacatgcggtgtttggttttttgtccttgcgatagtttgctgcgaatgatggtttccagcttcatccatgtcccaatgacccagtggcctttggcatacccctgagagcagacagagatctgctgactatgaaaaggtggcacagatccagaaaatgctgatcttttaacctggatgaacttgaaaatggccaggaagaggacccagacaggacaaaggccctgaggtgggaagatcttggcagtgtcaaggaccagataggaccatgggctgttgtttcctgactttttaatgattgccattctaactggtgtgagatggtatctcattgtggttttgatttgcatttctctgatggccagtgatgatgagcattttttcatgtgttgtttggctgcataaatgtcttcttttgagaagtgtctgttcatgtccttcgcccactttttgatggggttgtttgtttttttcttgtaaatttgtttgagttcattgtagattctggatattagccctttgtcagatgagtaggttgcaaaaattttctcccattttgtaggttgcctgttcactgtgatggtagtttcttttgctgtgcagaagctctttagtttaattagatcccatttgtcaattttgtcttttgttgcatttgcttttgggttcttggtcatgaagtccttgcccatgcctatgtcctgaatggtttttccaatgttatcttctaggatttttatagtttcaggtcttggatttaagtccttaatccattttatgtttttgtttgctttgtgaaagatcagatagttgtagatatgcggcgttatttctgagggctctgttctgttccattgatctatgtgcctatttttataacagtaccatgctgttttggttactgtagccttatagtatagtttgaagtcaggtagtgtgatgcctccagctttgttcttttggcgtaggattgacttgggtatgcgggctcttttttggttccatatgaactttaaagtagttttttccaattctgtgaagaaaggcattggtagcttgatggggatggcattgaatctgtaaattaccttgggcagtatggccattttcacggtattgattcttcctacccatgagcatggaatgttcttccatttgtttgtatcctcttttatttccttgagcagtggtttgtagttctccttgaagaggtccttcacatcccttgtaagttggattcctaggtattttattctctttgaagcaattgtgaatgggagttcactcatgatttggctctctgcttggttgctgttggtgtagagaagagctaacgatttgtgtacactaatcttgtatcctgagactttgctgaattcttttatcagttctagaagctttctagagaagtcttcagggtttttgaggtaaataattgtatcatcagcaaacagtgacagtttgactttttctttacctatttggatgctttttatttctttctcttgtctgattgctctggctagaacttctagtactgtgttgaagaggagtggtgagagtgggcatccttgtcttgttccagttctcagagggaatgctttcaatttttccccattcactattatgttggctgtgggtttgtcatacat

SEQ ID NO: 125485 - DNA, 535 bp, Homo sapiens
atggggaaaaaacagaacagaaaaactggaaactctaaaacgcagagcgcctctcctcctccaaaggaacgcagttcctcaccagcaacggaacaaagctggatggagaatgactttgacgagctgagagaagaaggcttcagaggatcaaattactctgagctacgggaggacattcaaaccaaaggcaaagaagttgaaaactttgaaaaaaatttagaagaatgtataactagaataaccaatacagagaagtgcttaaaggagctgatggagctgaaaaccaaggctcgagaactacgtgaagaatgcagaagcctcaggagccgatgcgatcaactggaagaaagggtatcagcgatggaagatgaaatgaatgaaatgaaggacatggatgaagctggaaaccatcattctcagcaaactaacacaggaacagaaaaccaaacactgcatgctctcactcataagtgggatttgaacgatgagaacatatggacacagagagaggaacatcacacaccaggtcctgtca

SEQ ID NO: 125486 - DNA, 1187 bp, Homo sapiens
cggaatattttcgacttgctctttcaaaactgcagagttgtgatctctttgatgagtttgacaaggacatggatgaagctggaaactatcattctcagcaaactaacacaggaacagaaaaccaaacactgcatgttctcactcataagtgggagcactgtccctggggtcatccaaaccagtacagtaacccagctggcctctcttctgaaaacatctccaacttcaacaatactttgagataccatattgctggtatttcaaaaactgctgccagcagggaggaggccaatggcgtgtccatagatcatgttcagcctccaagtggtctcataatcaacaaagaatctgaagtttacaagatgcttcaggagaaacaggagttgaatgaacccctgaaacagtctacctctttcctgattttgcaggaaatcctggagtctgagataaaaggggatctcaacaaccctcaggattcagaagtgttactcagctcagtctattactcagtggctgcatcaattggaaatgctcagaaggtgcccatgtgtgacaaatgtggtcctggcattgtaggcatcataccctgtaaaaagtgtgtggtggttggtaatggaggagttttgaagaataagacattaggagaaaaaatcgactcctatgatgtaataataagaatgaataatggtcctgttttaggacatgaagaagaagttgggagaaggacaaccttccgacttttttatccagaatctgttttttcagatcctattcacaatgaccctaatacgacagtgattctcactgcttttaagccacatgatttaaggtggctgttggaattgttgatgggtgacaaaataaacactaatggtttttggaagaaaccagccttaaacctgatttataaaccttatcaaatccgaatattagatcctttcattatcagaacagcagcttatgaactgcttcattttccaaaagtgtttcccaaaaatcagaaacctaaacacccaacaacaggaattattgccatcacattggcgttttacatatgtcacgaagttcacctagctggttttaaatacaacttttctgacctcaagagtcctttgcactactatgggaatgccaccatgtctttgatgaataaggtgacaatgcagagccagggcaaaggtgtttaa

SEQ ID NO: 125487 - DNA, 1119 bp, Homo sapiens
atggatgaagctgaaaaccatcattctcagcaaactaacacaggaacagaaaaccaaacaccacatgttctcactcataagtgggagctgaaaaatgagaacacagggacacggggaggggaacgtcacacacttgggcctgtcagggggtgggggcctaggggagggatggcattcggagaaatacctattgtagatgacaggttgatggatgtatcccagaacttaaagtataattttaaaaaaaaagagggagaagagggagaaggggaagaagaaggagaagaagaggaagaagaagagaagaaggagggggaggaggaggaggaagcttctggaggacccatcacaccaagcccaaggaccagcacaaaaaagacacaatgggccactttagaagctgtgctttccaagagggctttgtcgtccatgttcctctgctgtcttctgaaaagtaaagataagtgggaagaaaggtgggagctcctccagggagagctgccaaattcagctccagatacttttccagcccctttcacatttgcatggggccctgcaggatctgacctgctcgtggctacgaagcagcctcctccactctgcccctctgcctctccagacccagacctggctcctgctttgttcttattcagtaattgcaagctttctttggggcataggaaagagaagagggacgctgtggcttgccggggaagaaaacctttaaaagtcatccttgtgaattttggacagctgacttcttataaagagcttccctcctacgcgttgggcctaaagcccagtccctgggacagcactcatgcacctctggccctcccctatcactcccctgtctttcaagaaggcaaaagcaccagccttgcaatgggaatcttccagccagggcactttccttcagtaaaaaccctttgtgcccctgcaggcacttcctgtgaatcattgtccggccccggagctaccggctttgcaaactgcaggtttctgcaggaagccacagatgaggtgtgccaatctgcccaatctgctcagagacctggctccggaaaacccaatagtatgtgctgggaaaaaagtcaggccatctgggccccggtctga

SEQ ID NO: 125488 - DNA, 2481 bp, Homo sapiens
ctattcttgttcctctcctttagggtctacaattacatgtcttttgggcaagttcattgactgattatcacatgactcactgattctgttttcttttttctgtctcttttccctacttgtttcagtttgaagcatttctgttgctacatctgcaagttcagtaatctgttcttcttcaatatctaatgtatcattaatctcattcagtgtatttttcatctcatatattgtaggttttatctcttgctgtggcaaatccactgctactatgtatgctaggtagtttttatattcatcatctatagcatgttttaaggtttcggaacctagattctttttttttttagtgaacataatcattagaagactttgcaccttggttgggctgtccctttgctcctctttgttgacaggcagtcttctaaggctgtcctttctccctgtaaccttccgtctgtcagtctttgccggccttgcatacataagcctctctttgtgagtcaatcgagatgaattaacagtcctattagtagtctggggttcttcatgagctgtagactctgattcagcagggagtgggacctgagcttctgcaggtggtggtgatgctgctagttcatggaccacactttgagcagcagggctgtagcatctagtgctcctgcttacaggtttctccctgtttttccctattttgaggcacagtttcaggcagtcaggctggttctgctgcatttgcttggcaacatcacctccctccagcctctgcagcttccacccttgggctgctgcacgtgcacgtacatttccactgctgtggctcccacagtgcacagttggggactgagtctgaagctgtgtcacaataacatcactcagtctgggcaacacagtgggaccccatctcatcacccatgaggccactggatcctgaaacctttctcctcgccttccacctgccctgtctgcagcacattcgttgtactgtcgggggcagtgcaagctccaggtggctcctctgcatttccacctgattatcgtttttccaggtggagagtgcacagtcaggatcagaattaggcggttctgctttctctctctggctcttctgggaacttcataccatctctcggtccccttgacccaggaagaaccgttagcaggtcttgttgtacttaaatcacaggtgttcagggaaaagcccatggactcctgttgagcagctctgaggcgtggtgcactaagtatccagagatcaacatcatccactctgaggaccacaatgcgtagacagatgagtaatctagcaattaccgggtagtggttaggttcagaccatccaggggagccccagtccctgacctcatagatctcatagtccatgcctgtgagcacagggacagcggcaagaaacaattcaggggggcaggtccttgagtaggacactgtatctttagggaagaagtgggacttcactaagccaaaagcttgcacagctgtccagtttgaccggggattccacaccactatgagagattcgtgactaagtggttgacccaagggtaggatgaagattttctctcttaggtgcctatgagtgacaacatgcagtgtttggttttccgtgcttgtgatagtttgctgagaatgatggtttgcagcttcatccacgtcccatgctgttttggttaccgtagccttgtagtatagtttgaagtcaggtagcgtgatgcctccagctttgttcttttggcttaggattatcttgacaatgcgggctcttttttggttccatatgaactttaaagtagttttttccaattctgtgaagaaagtcattggtagcttgatggaaatggcattgaatctataaattactttgggcagtatggccattttcatgatactgatacttcctatccatgagcatgaaatattcttccatttgtttgtatcctgttttatttcgttgagcagtggtttgtagttctccttgaagaggtccttcacatcccttgtaagttggattcctaggtattttattcccattgtagcaattgtggatgggagttcactcctgatttggctctctgtttgtctgttattggtgtataggaatgcctgcgatttttgcacattgattttgtatcctgagactttgctgaagtcgtttatcagcttaaggagattttgggctgagacgatggggttttctaaatatacaattatgtcatctgcaaacagggacaatttgacttctttttctaattttttcctgattgaataccctttatttctttctcttgcctgattgccctggccagaactcccaatacttctgaagcccacttctgtcaactcatcaaagtccttctccatccagctttgttccattgctggcgaggagctgcaatccattggaggagaagaggtgctctgagttttagaattttcagcttttctgctcttgtttctccccat

SEQ ID NO: 125489 - DNA, 3368 bp, Homo sapiens
atggcgaagaagttaaaaactttgaaaaaaaaaatagatgaatggataactagaataatcaatgcagagaagtccttaaaggacctgatggagctgaaaaccatggcacgaggactacatgatgaatgcacaagcctcagtaaccgatgcaatcaactggaagaaagggtatcagcgatggaagacgaaatgaatgaaatgaagcgtgaagagaagtttagagaaaaaagaataaaaagaaacaaacaaagcctccaagaaatgtgggactatgtgaaaagaccaaatctacgtctcattggtgtacctgaaagtgacggggaggctggaaccaagttggaaaacattctgcaggatattatccaggagaagttctccaatctaggaaggcaggccaacattcaaattcaggaaatacagagaacaccacaaagatactcctcgagaagagcaactccaagacacataattgtcagattcaccaaagttgaaatgaaggaaaaaatgttaagggcagccagagagaaaggtggggttacccacaaagggaagcccatcagactaacagctgatctcttggcagaaactctacaagccagaagagagtgggggccaatattcaacattcttaaagaaaagaattttcaatacagaatttcatatccagccaaactaagcttcataagtgaaggagaaataaaatactttacagacaagcaaatgctgagagattttgtcaccaccaggcctgccctaaaagagctcctgaaggaagcactaaacatggaaaggaacaactgtgcaatcaaactagaactcaggattaagaaactcactcaaaggcgctcaactacatggaaactgaacaacctgctcctgaatgactactgggtacataacgaaatgaaggcagaaataaagacgttctttgaaacaaacgagaacaaagacacaacataccagaatctgtgggacacattcaaagcagtgtgtagaggaatggccatactgcccaaggactggttttttgaaaagatcaacaaaattgatagaccactagcaagcctaataaagaagaaaagagagaagaatcaaatagatgcaataagaaatgacaaaggggatatcaccaccgatcccacagaaatacaaactaccatcagagaatgctataaacacctctacacaaataaactagaaaatctagaagaaatggataaattcctcgacacatacaccttcccacaactaaatcagggaagaagtcgaatccctgaagagaccaataacaggctctgaaattgaggcaataattaatagcttaccaaccagaaaaagtccagaaccagatggattcacagccgaattctaccagaggtacaatgaggagctggtaccattccttctgaaattattccaatcaacagaaaaagagggaatcctccctaactcattttatgaggccagcatcatcctgacaccaaagcctggcagagacataacaaaaaaagggaattttagaccaatatccttgatgaacattgatgcaaaaatcctcaataaaatactgacaaaccgaatccagcaacacatcaaaaagcttatccaccatgatcaagtgggcttcatccctgggatgcaaggctggttcaacgtacaaaaatcaataaacataatccagcatataaacagaaccaaagacaaaaaccacatgattatctcaatagatgcagaaaaggcctttgacaaaattcaacaacccttcatgctaaaaactctcaaccaattaggtattgatgggacatatctcaaaataataagagctatctgtgacaaacccacagccaatatcatactgaatggacaaaaactggaagcattccttttcaaaacgggcataagacagggatgccctctctcaccactcctattcaacatagtgttggaagttctggccagggcaatcaggcagaagaagggaataaagggcattcaattaggaaaagaggaagtcaaattgtccctgtttgcagatgacatgattgtatgtctagaaaaccccaaagtctcagcccaaaatctccttaaactgataagcaacttcagcaaagtctcaggatacaaaatcaatgtgcaaaaatcacaagcattcttttacaccaataacagacaaacagagagccaaatcatgagtgaactcccattcacaattgcttcaaagagaataaaatacctaggaatccaacttacaagggatgtgaaggacctcttcaaggagaactacaaaccactgctcaatgaaataaaagaggatacaaacaaatggaagaacattccatgctcatgggtaggaagaatcaatatcgtgaaaatggccatactgcccaaggtaatttatagattcaatgccatccccatcaagctaccaatgactttcttcacagaattggaaaaaactactttaaagttcatatggaaccaaaaaagagcccatattgccaagtcaattctaagccaaaagaacaaagctggaggaatcacgctacctgacttcaaactatactaccaggctacagtaaccaaaacagcacgggacatggatgaagctggaaaccatcattctcagcaaactatcacaaggacagaaaaccaaacaccacatgttctcactcacagggacttggtgccctgcatcccagctgctccagccatggctaaaaggtggcaaggtacagctcaggccatggcttcagaggatgcaagccccaaaccttggcagcttcaatgtgatattgagcctgcaggtgcacagaagtcatgaattgaggtttgggaacttctggctagatttcagaggatggatagaaatgcctagatgtccaggcagaagtttgctgcaggggtggggccctcatagagaacctctgctaggacagtgcagaagtgaaatgtggggttggagctgccacagagtccccactggggcacttcctagtggagctgtgagaagagggccatcatcctccagaccccagaatgttagatccatcaacatctcgcactgcgcacctggaaaagctgcaaacactcaacatcaacccatgaaagcagctgggatgggggatataccatgcaaagccaacgggacagagctgcccaaggccataggggcccacttcttgcatcatcgtgacctggacgtgagacatggagtcaaaggagatcattttggaagtttaaggtttaataactgccctactggatttcagacttgcatggatcctgtagccccttttttggccagtctctcccatttggaatggctgtatttacctgatgcctgcacccccattgtatctaggaagtaa

SEQ ID NO: 125490 - DNA, 4289 bp, Homo sapiens
atggaatactatgcagccataaaaaaggatgagttcatgtcctttgcagggacatggatgaagctggaaaccatcattctcagcaaactatcacaaggacaaaaagccaaacaccgcatgttctcactcatagaaatacaaactaccattagagaatactataaacacctctacgcaaatgaactagaaaatctagaagaaatggataaattcctcgacacatacaccctcccaagactaaaccaggaagaagttgaatccctgaatagatcaataacaggctctgaaattgaggcaatgattaatagcctaccaaccaaaaagagtccaggaccagacggattcacagccaaattctatcagagcccatcccttactggcaagaatgacaaagagcctgagattttaccctacttccatgctgacttccttgtggttcctggaacgcaccaagcatcccctgtccttatggtcttggggcataagtcatttcctcataggaactctcctccaagcgtctgcatggctaacttctttactcaaaagccaccttctcaatctattcacaacgctgtgaacacccacacggatcctccactgtttctggtgctgctgaaggacagaggattgcttgtcatctggtgccatgagtcacaaggagacgaattgtggcacttggtacttctagattccaagtgctgcttcggcagcatgacacacagaatggaatggtcaggaccctcatctgcaggtctgttggagtttgctggaggtccactccagaccctgtttgcctgggtatcaccagcagaggcgtaaagtaatccagagaacagaaaatgttattaagaaaatcataggagaaattatatttattattcattaagtagaagtgtatcatcataaaagtcttcactctcatcgtcttcacattgagtggtctatgagtgagaacatgcgatgtttggttttttgtccttgtgatagtttgctgagaatgatggtttccagcttcatccatgtcccagggcgcacatttgtgtggcaggataacaatgaacgagggtccagtcctcttttccacttctctggcatgatctcatcggggccagtggggctgggcagggtgatgcggcctccagagggcgggctcaagcttgcccatggtttttcgtcctgggccaccacggccgctgcgtagggctccacgtagaggcggcggacggaaggcctcgcgtcctggagactgctgttccgctcctcaggaaggctggcagcgtgggccagagttaggcccctgggatcatcaagggcagggccggcccgcttggcctccttgggctccagcgatgatggccggctgaagccgccatagtgggggtgcttgcctggcttccgctttcccaggaagcctagcgggggccgcccaccggacacagtcttggcgtggttcttgggtgtgaaccccgtgagggtcaggctatggagaaactcggcacatgagtgatcgggatttgggccctcgccctggggatcctggcccggccccagaggggttttcacgtcgtgcacttgcaggacgtcgggggcgctgccgcttaggccgctaagggtctgctgcgcaatgtcgtgagatgataggtagaccaggtccaggtctctggggctcagggcatcgctggagtcgtagtcactgttggtggggaggaagacttctgagcaggcttcttcatcagagcagggctgtgaatttataagtgagaacatgcagtgtttggttttctgtccttgtgatggtttgctcagaatgatggtttccagcttcatccatgtccctacaaagtaggacacgaactcatccttttttatggctgcatagtattccatggtgtatatgtgccacattttcttaatccaggctatcgttgatggacttttgagttggttctacaccctcttgctattgtgaatagtgccgcaataaacatacgtgtgcatgtgtctttatagcagcatggtttataatcctctgggtatatacccagtaatgggatggctgggtcaaatggtatttctagttctagatccctgaggaattgccacaccgacttccacaatggttgaactagtttacagtcccaccaacagtgtaaaagtgttcctatttctccacatcctctccagcacctattgtttcctgactttttaatgatcaccattctaactggtgtgagatggtatctcattgtggttttgatttgcatttctctgatggccagtgatgatgagcattttttcatgtgttttttggctgcataaatgtcttcttctgagaagtgtctgttcatatcctttgcccactttttgatggggttgtttgtttttttcttgtaaatttgtttgagttcattgtagattctggatattagccctttgtcagatgagtaggttgcaaaaattttctcccattctgtaggttgcctgttcactctgatggtggtttcttttgctgtgcagaagctctttagtttaatgagatcccatttgtcaattttggcttttgttgccattgcttttggtgttttcgacatgaagtccttgcccatgcctatgtcctgaatggtattgcctaggttttcttctagggtttttatggttttaggtctaacatgtaagtctttaatccatcttgaattaatttttgtataaggtgtaaggaagggatccagtttcagctttctacatatggctagccagttttcccagcaccatttattaaatagggaatcctttccccattgcttgtttttgtcaggtttgtcaaagatcagatagttatagatatgcggcattatttctgagggctctgttctgttccattggtctatatctctgttttggtaccagtaccatgctgttttggttactgtagccttgtagtatagtttgaagtcaggtagcatgatgcctccagctttgttcttttggcttaagattgacttggcaatgtgggctcttttttggttccatatgaactttaaagtagttttttccaattctgtgaggaaagtcattggtagcttgatggggatggtgttgaatctataaattaccttgggcagtatggccattttcacgatattgattcttcctacccatgagcatggaatgttcttccatttgtttgtatcctcttttatttccttgagcagtggtttgtagttctccttgaagaggtccttcacatcccttgtaagttggattcctaggtatgttattctctttgaagtgattgtgaatgggagtccactcatgatttggctctctgtttgtctgttattggtgtataagaatgcttgtgatttttgcacattgattttgtatcctgagactttgctgaagttgctcatcagcttaaggagattttgggctgagacagtggggttttctagatatacaatcatgtcatctgcaaacagggacaatttgacttcctcttttcctaactgaatgctctttatttccttctcctgcctgattgccctggccagaacttccaacactatgttgaataggagtggtgagagagggcatccctgtcttgtgccagttttcaaagggaatgcttccagtttttgcccattcagtatgatactggctgtgggtttgtcatagatagctcttattattttgagatacgtcccatcaatacctaatttattgagagtttttagcatgaagggttgttgaattttatcaaaggccttttctgcatctattgagataatcatgtggtttttgtctttggttctgtttatatgctgttttcctgtccacagcggaaagggcttcaggatggaaggagaaaggagcttcacgcgccccactttgtccgtgagtcctcggtacaccagctccatatagtgctcccgggtgaaaaagcaaccccgagtagtcatgcttgcccctgaaaccatgtgatcctggatcagtcccgccaatggttggccatccttgggaacaaggtactgctgatcagtgcaggccaggacgtaggcctcggcccggcccagctcactctgggggaaatgggcattcatctcgtctccatcaaagtcggcattataggccttgcagttggcatagtggagccgcagcactttctcttcaggcaggatgcgggcacggtgggcctggatggagggtctgtgcagtgtgggctgtcggttcagtagcagaatgtccccattcttcacatgccggcacaccgtgatcacatgtgagtacat

SEQ ID NO: 125491 - DNA, 1559 bp, Homo sapiens
  misc_feature (1)...(1559): n = a,t,c or g
atgtctgcgagccaggattcccgatccagagacaatggccccgatgggatggagcccgaatgcgtcattgagagtaactggaatgagattgttgacagctttgatgacatgaacctctcggagtcccttctccgtgacatctatgcctatggttttgagaagccctctgccatccagcagcaagccattctaccttgtatcaggggttataatgtaatcgctcaagcccgatctgggactgggaaaatggccacatttgccatatcgattctgcagcagattgaattagatctaaaagccacccaggccttggtcctagcacccactcgagaattggctcagcagatacagaaggtggtcatggcactagtagactacatgggtgcctcctgtcatgcctgtgtcaggggcaccaatatgcgtgctgaggtgcagaaactgcagatggaagctccccacatcatcgtgggtacccctagccgtgtgtttgatatgctttaccggaagatacctggccccccaaatccatcaggatgttggtactgaatgaggctgacgaaatgttaagccgtggattcaaaggacagatctatggacatatccaaaaggctcaacagcaccaccaagggtagttttgctgtcagccacaatgccctttgattgtgcttgaggtgaccaagaagttcatgaggggcccccattccggattcttgtcaagaaggaagagttgcccctggagggtatccgccatttctacatcaacgtggaaccagaggaattgcaacttggacacactatgtgtactggtatgaaccctgacccatcaccccaggcagtcatcttccatcaaccacccggagggaaggtggactggcctcacccgagaagatgcatgctcgagattccactgtaccccccatgcatggagatatgaccaaaaaggaaccgagacggtgattatgagggaatttcgttctggctcctaaccagagttttgaattaccccactgaccctgcctggccagaggccattgatgtgcaagcaggtttcctttaagtcatcaacctatgacccttcccccaccaaccaggggaaaactattaatccacaggaatcggtcgagggtggaccggtttggccgtaaaggtgtggctattaacatggtgacagaagaagacaagaggactcttcgagacattgagaccttctacaacacctccattgaggaaatgcccctcaatgttgcttgacctcatctgaggggctgtcctgccaccacagccccagccagggctcaatctctgggggctgaggagcagcaggaggggggagggaagggagccaagggatggacatcttgtcattttttttctttgaataaactgtcactttttgaggcnnnnnnnnnnnnnnnnnngggggggccgttttaaagaacccttgggggggccaaattttaccggggatggcgagggaatagttttttccttatagggggccatataaaaacctacctgggaatctttggaaagaaaccttacttctggggggagacaac

SEQ ID NO: 125492 - DNA, 587 bp, Homo sapiens
  misc_feature (1)...(587): n = a,t,c or g
gggtacatggccgggcttcctcgttgggggttgggcaccaattcccaagggccatggacagataaaacctattgncttaagcctcccgtatatggggcctgcaagctcttggacatggagctggaaatggctttttttgtaggccctggaaacagattgggagagccgatcccatttccaaggcccatgagcccatttttggaatggtccttatgaacgnctggagtgcccgacacattcaaaagtgggagtatgtccctctcgggccattccttgggaaaagttttgggacccctgtgaagtcatcataacagggttctgccagggggatggttacgcactcggctttggccagtgtgctggaaaagtgctgcctgctttcctgccatcatgagattttttttgcttttttggaaacaaagggctcaagcccccctttcaaccctgtgattggggtcctccctcggggtgtaggcctggtcccccattcagtgacaaataaagccattgtgttttggggcctgccctgccnnnnnnnnnnnnnnnnnnnnnnnnnnnnnnnnnnnnnnnnnnnnnnnnnnnnnnnn

SEQ ID NO: 125493 - DNA, 1484 bp, Homo sapiens
  misc_feature (1)...(1484): n = a,t,c or g
atgtccttcatcccggtggccgaggattccgacttccccatccacaacctgccctacggcgtcttctcgaccagaggcgacccaagaccgaggataggtgtggccattggcgaccagatcctggacctcagcatcatcaagcacctctttactggtcctgtcctctccaaacaccaggatgtcttcaatcagcctacactcaacagcttcatgggcctgggtcaggctgcctggaaggaggcgagagtgttcttgcagaacttgctgtctgtgagccaagccaggctcagagatgacaccgaacttcggaagtgtgcattcatctcccaggcttctgccacgatgcaccttccagccaccataggagactacacagacttctattcctctcggcagcatgctaccaacgtcggaatcatgttcagggacaaggagaatgcgttgatgccaaattggctgcacttaccagtgggctaccatggccgtgcctcctctgtcgtggtgtctggcaccccaatccgaaggcccatgggacagatgaaacctgatgactctaagcctcccgtatatggtgcctgcaagctcttggacatggagctggaaatggctttttttgtaggccctggaaacagattgggagagccgatccccatttccaaggcccatgagcacatttttggaatggtccttatgaacgactggagtgcacgagacattcagaagtgggagtatgtccctctcgggccattccttggggaagagttttggggacactgtcttctcccgtgggtggtgcccatggatgctctcatgccctttgctgtgcccaacccgaagcaaggacccaggggcccctgccggtatctgtgccatgacgagccctacacatttgacatcaacctctctgttaaccctgaaaggatgaaggaatgagccaggcggctacccatatgcaaagtccaaattttaaagtacatgtactggacgaatgctgcagcaagctcactcacccactctgtccaacggctgcaaacctgccgcccgggggacctcctgggctttctgggacccatcaagtgggcccggagcccagaaaaatttcggctcccatgttggaactgtcgtggaagggaacgaagccccatagaccctggggaatggtcagacccaggaagtttctgctggacaggggatgaagtcatcataacagctatggctacccgggacttcaagtggtactncccagggggatggttacccgcatcggctttgggcaagtgtgctggaaaagtgctgcctgctctcctgccgatcatgagattttttctgcttttttgaaaacaaagggctcaaagcaccccttttcaaccctgtgactgggggtcctcccctcgggctgtaggcttggttccgccatttcagttgacaaattaaagccattgtgctctgaggcctgccctgccgcaaaaaaaaaaaaaaaaaaa

SEQ ID NO: 125494 - DNA, 431 bp, Homo sapiens
  misc_feature (1)...(431): n = a,t,c or g
cccacgcgtccgcccacgcgtncgcactgacctgctggccagaggcattgatgtgcagcaggtttctttagtcatcaactatgaccttcccaccaacagggaaaactatatccacagaatcggtcgaggtggacggtttggccgtaaaggtgtggctattaacatggtgacagaagaagacaagaggactcttcgagacattgagaccttctacaacacctccattgaggaaatgcccctcaatgttgctgacctcatctgaggggctgtcctgccacccagccccagccagggcttaatctcttggggctgaagagcancangaggggggaaggaagggagcccagggaaggacctcttggccttttttttctttgaataaatggcactttttgaggccnnnnnnnnnnnnnnnnnnnggggcgggcgtt

SEQ ID NO: 125495 - DNA, 282 bp, Homo sapiens
atggaatactatgcagccataaaaaaggatgagttcatgtcctttgtaaggatatggatgaagctggaaaccatcattctcagcaaactatcgcaaggacagaaaaccaaacaccgcaggttctcactcatagatgggaccatcacagaagctttacaaggactgaaaactctagccaacgaactggcagaaaatgctggaattgatgacccacttgtgggttggctagaagttggtttggaaagacatggtcagggaactgactatggcctagagaaatga

SEQ ID NO: 125496 - DNA, 348 bp, Homo sapiens
atggatgaagctggaaaccatcattctgagcaaactatcacaaggacagaaaatcaaacactgcatgttctcactcggcacaaaaatgctctccacacggcacccgcactacctgtcattccagatgcttaccgctttagtgcctctttcagcaatatgaagttaaatccaggtactgtgagtgctgacttgacttttggttcttatgaaggtggggtggacctggagcctgtgtccactggagcaggtctagatcttgggttcatggtggccagcctgacagtaaggctcactgaagttgtcctaatggttgggtccacagggatagtcctgatcataagtccatag

SEQ ID NO: 125497 - DNA, 414 bp, Homo sapiens
atggaatactatgaagccataaaaaaggatgagttcatgtcctttgcagggacatggatgaagctggaaaccatcattctcagcaaactatcacaggaacagaaaaccaaacactgcaggttctcactcacctgcgagcggcctggtgatgtcttcacagatgagggcgtgggagcccacggcccgggccgggcggaggcagcacgggaggagcggggccgggcgctggtccatccctcgcaccgcccctccccgcccaaaatgcagagggactcggagggaggcgacggggaaataaatacctttgactttgtggctaaggttaacgggaactgccaccccgagggcgacttgggcaccgggctcccggccctggccattcccggggcaggcggggcgggcacgggtgcctga

SEQ ID NO: 125498 - DNA, 375 bp, Homo sapiens; identical to SEQ ID NO: 125210

SEQ ID NO: 125499 - DNA, 270 bp, Homo sapiens
cctgaagcctcgccggaactcgcgtctggggccagcagggggcactagagtcaacagggactgtatgcaaaacccacttcctcccaggccctctagggggatggtcaggcttctgcagagatggggaggatcctttcctatgagtgagaacatgcggtgtttggtttttcgtccttgtgacagtttgctgagaatgatggtttccagcttcatccatgtccctacaaaggacatgaactcatcaatttttatggctgcatagtgttccat

SEQ ID NO: 125500 - DNA, 420 bp, Homo sapiens
atggagcagctctcaccgatggccagctcctaccactctgaccacgctgctgtctccctggccatcttctttgactacaaaggaataaaactaggtatcaagctggcggctgttcccagtgccttgcccacccctgccgggccgtcggactcggcggggcccctgtggcatccctgtccagtccctgtcaccacccagtttttccctctggacccaggaattcaaagtaagcaaggaggtccgctgctccagttggctgcaaataattacaaccttaagcccaagcagcactttgggtcctggtttgggaccatgaagcggctcgggacatggatgaagctggaaaccatcattcttagcaaactatcacaaggacaaaaaaccaaacaccgcatgttctcactcatagatgggaattga

SEQ ID NO: 125501 - DNA, 334 bp, Homo sapiens; identical to SEQ ID NO: 118723

SEQ ID NO: 125502 - DNA, 268 bp, Homo sapiens; identical to SEQ ID NO: 125214

SEQ ID NO: 125503 - DNA, 564 bp, Homo sapiens
atgtttgccccacttgagcttgatggtggctgcagctcaactgacagtctgagaggcagcagcctggcatgtcccccactggaagggacaaagcagccactgttcagtaggctaatagggcttgccattttggagaatccatggaaccattatcagagaagaagaggccctggaggataccaaatggcagttgggctggccaattctagtggatatgcaactgagatggcaaaggccctctatagacccagatcccatctacctgagctctccttagctttcttttatgaacacaatgcagaggagcctttgttgtcatttgagcccttccaacacctcagacacagaatggggaagtggaaatcctgggaggaagaggcaataatggaggctctgaagttgaagagggacatggatgaagctggaaaccatcattctcagcaaactaacacaagaacaggaaaccaaacactgcatgttctcactcctaagtgggagttgaacaataagaacacatggacacagggagaggaacatcatacaccagggcctgtaggcggatga

SEQ ID NO: 125504 - DNA, 264 bp, Homo sapiens
atggaatactatgcagccataaaaaatgatgagttcatgtcctttgtagggacatggatgaaactggaaaccatcattctcagcaaactattgcaaggacaaaaaaccaaacactgcatgttctcactcatagcacgagacattcagaagtgggagtatgtccctctcgggccattccttgggaagagttttgggaccactgtctctccgtgggtggtgcccatggatgctctcatgccctttgctgtgcccaacccgaagcag

SEQ ID NO: 125505 - DNA, 363 bp, Homo sapiens
atggaatactatgcagccataaaaaaggatgatttcgtgtcctttgtagggacatggatgaagctggaaaccatcattctcagcaaactattgcaaggacagaaaaccgaacaccgcatgttctcactcatagggctggtcaccaggccagcagcagtaccagcagcatttgggagcttgttagaaatgcatagccccgagctgcacaccacgccgtgtgaatcagaaactttggaggtggtgttagggatatgtggggtacgagctcgaattcgtaatcatggtcatagctgtgtcctgtgtgagattgtgatcgctcacatttcacacacatacgagctggagcataagtgtaaagctgtg

SEQ ID NO: 125506 - DNA, 309 bp, Homo sapiens
atggaatactatgcagccacaaaaaatgatgaggtcatgtcctttgtaggacatgatgaagctggaaaccatcattctcagcaaactaacacaagaacagaaaaccaaacaccacatgttctcactcataagtgggagttgagcaatgataggtcatatccctacgattatcgaagaaatcacaccgtgctcgatttacggaaatctcagccgatccccgccttgaaatcatccgctcgatgtcaaaccaacgatgatgatcgcgagtctcgccacgatgtttactgcataacttatcaacagcgcctg

SEQ ID NO: 125507 - DNA, 738 bp, Homo sapiens
atggatgaagctggaaaccatcattctgagcaaactatcacagggacagaaaaccaaacaccggatgttctcactcatagcctggtggcggcggcggtaacggagcgcggggctctggcaggagccggcggaggcaaaggcagcgccaaccgagagccgcgcgcaggctggagggagacccgcggcgaggagccagcgagagcgctcggcgctgggctgtttcccggccgagggaggcgaacttctcatggggaagaagtggagggatgcggcggaaatggagcggggctgctccgaccgcgaggacaacgcggagagccgcagacgcagccggagcgccagccggggcaggtttgccgagtcgtggaaaaggttaagttccaagcaggggtccaccaaacgctcgggactcccgtcgcagcagacgccgacagcactcttgcttccactaatgctataattacccttatcagcaggtaccaaccacagattatcacaccttgtgcagacaagtgggcaactgagagagtgtatggaaacagcagtgagtatgtagaaagcacagtgctgccaagccactcctgcgatgctttagaacatgtagcagcatatgtagcagcacctctaaatattgaccagacaagggcaggattctacccaatggaaaactctgatagcctattgaagtctccatcaatctatgtcatgtcttttgatgacagaatgacatattctttg

SEQ ID NO: 125508 - DNA, 2031 bp, Homo sapiens; identical to SEQ ID NO: 125483

SEQ ID NO: 125509 - DNA, 1379 bp, Homo sapiens
acttaaaagatgccgtctttagcatcagaatatctcctgagagccagaagctgtttgcctttcagtgggaagatccggagtcaggtgtcactactcagtacacttggacccagcttacccaagggtttgagaactcccctactatctttggggaggccctggctcgagacctgcaaaagtttcctgctaaagacctaggctgcatcttgctcctgtacatggatgaccttctgctgggacactccacggcagtcaggtgcgcaaaagggatggatgccctgcttcagcacctggaggactgtgggtataaggtgtccaagaagaaagctcagatctgcagacagcaggttacaaagtggggcgattgggagcgctttgaatgggaacctctacaacagcaagccttttgtaagttaaaggaaaaatttatgtcggccccagccctaggactaccagatttgacaaagccctttacactctatgtgtcagaaagagaaaaaacggcagttggagttttaatccagactgtggggccctggcctacaccagtggcctatctctcaaaacaactagatggggtttccaaaggctggccaccatgtctaagggccctggcagcaacagccctgttagcacaagaagcagataaactaacccttgtgcaaaacctgaatataaaggccccccatgctgtgggcacttcagcccagaagcctgagctcattgctttaactcgggctctagaactcagtgaagggacatggatgaagctggaaaccatcattctcagcaaactatcacaaggacaaaaaaccaaacactgcatgttctcacggggatctctagatcgacttgagcatgcagttgcctggcgtcgttacaggtcggactggaaaccgggtcccaattatcgcttgagaatccccttcgcgtgggtatacaaaggcgacgatgcttcacgtgcgctgtggatggcgaaggtttcctacttggggttccgatggcctaactgcaaaggctggggccccaagcttgtaatggctaagagagagacgcggagggagagggagagagagagagagagagagagagagatggagagagagagagacagagagagagacagacagagagacagatcaacgcgacagaaagttaacaaggatatccaggaactgaactcacctctgcaccaagcagacctaatagacatctacagaactctccaccccaaatcagcagaatatacattcttctcagtactgcactggacttactccaaaattgaccacatagttggaagtaaagcactcctcagcaaatgtaaaaggacagaagttataacaactgtctctcagaccacagtgccatcaaactag

SEQ ID NO: 125510 - DNA, 1247 bp, Homo sapiens
atggccctgcgcagtggggcgggctgcttcggccgggtctggcgcagggtgtcggggttcccggacgcctggccccggcgctcgagcagcctcctgtgcctgtccgccttctcggctgagcccgggcccgcgccgcccctgccccgccagccgcctcgcggtggcggtggctgtggcggccccagcggagggggccccccccagcctccccgccccccgcctccccgctgctgctgctgctgctgccgccgccgcttacaacttggaggcggcggcggcggcggcggaggaggaggcggcggcggccgccgggcgctgcagtgggacgcgcgcggctgtgagcctgcgggacatgccccccgcgccggctccttgctggcggccatgaagaggcagaacgtgcggactctgtccctcatcgtctgcaccttcacctacctgctggtgggcgccgccgtgttcgacgccctcgagtcggaccacgagatgcgcgaggaggagaaactcaaagccgaggagatccggatcaaggggaagtacaacatcagcagcgaggactaccggcagctggagctggtgatcctgcagtcggaaccgcaccgcgccggcgtccagtggaaattcgccggctccttctactttgcgatcacggtcatcaccaccataggatcattaaaaaagaagaaaccatcagatcttagaaatcagatctcatctgcagagtgtagaggacaatttgaaatcgggcttaggaagcactgcctctttgtagatgtcatggacacagccaagaaatggggcagaagtggggtttcttctgattctggggtacatcaaagagacacctcggaatgcggagacacccagcatggtgctctgaggaggggtgggaatcaggccagctgctggcgccaggcctctgtgagtctgcagggcatctggcaggaagagatgcctacttgtgaaatggactttggctgtcactggccctgtcagacatgtgaggtgcagcccactcaggaagggacatggatgaagatggaaaccatcattctcagcaaactatcacaaggacagaaaaccaaacatcgcatgttctcactcatagaaacattatggctcagtatccttcatactacaataaatttacaatgactccccttattcatttattcatgggcaaagtattgtttatttcctatgttccaagtagctttttagatgccggtgacacagcattgaagaag

SEQ ID NO: 125511 - DNA, 627 bp, Homo sapiens
atgcggttacttcacttaatatgtatcaccataattctcttctcagaaagtttattcagtcaggctgttaggatcaacagctataggagaaaggaaggatgccagattgggaagaagagagggactatggtgccgtcacaacaagaattagaaaaaacaactttaaatttcatatggaaccaaaaaagagcccgtattgccaagacagtcctaagtaaaaagaacaaagctggaggcatcatgctacctgacttcaaactacattacaaggatacagtaacaaaaacagcaggggacatggatgaagctggaaaccatcattctcagcaaactaacgcagggacagaaaaccaaacactgcatgttctcactctgaggcaatgttttgaaaagaaacagaaaatccttgcaaacgtccaactgcaaggaatatgtggccccagcagctgtgctctaagatccattgccatgtttgtgccgaggttgggcttcccattggctgctttgcatggggcagggatgcggaggcaggctctttattgggggacagaagactgtgctgaccatgactctggcttgaggacccatggcctttccgaaccttccttagactgcacagtggcctag

SEQ ID NO: 125512 - DNA, 362 bp, Homo sapiens
atgtggaggaggaacaagggcatagttttaggaatgcaaggtgaattatctcatggtagagaaatgagaacggtttggataggatggactgttcatgcagaaatggagagagagataagggacatggatgaagctggaaaccatcattctcagcaaactatcgcaaggacgaaaaaccaaacactgcatgttctcactcataggcacctaagagagaaaatcttcatcctacccttgggtcaaccacttagtcacgaatctctcatagtggtgtggaatccccggtcaaactggacagctgtgcaagcttttggcttagtgaagtcccacttcttccctaaagatacagtgtcctactcaag

SEQ ID NO: 125513 - DNA, 2703 bp, Homo sapiens
atggctgaccctccctggtcttcagtgcaggtcaacaagtatgattcaggcctcctctcttctgtctctgcagagcctttggcaagttcagcctcctcccaccccggaatgagtgacaatgcacctgcttccttggagagcggcagcagctccacccctactaattgcagtacctcctcggccatcccgcagcccggtgcagccaccaagccttggcgcagcaaatccctcagcgtgaagcacagtgccacggtatccatgctctcggtcaagcctcctgggcctgaggcccccaggcccacacctgaagccatgaagccggcccccaacaatcagaagtccatgctggaaaagctgaaacttttcaacagtaaagggggctcaaaggcaggtgaggggccggggtcccgggacacaagctgtgagcggctggagactctgcccagcttcgaagagagcgaggagctggaggccgccagtcgcatgctcaccaccgtgggccctgcttccagcagccccaagattgcactcaagggcattgcccagaggacttttagccgggcactgaccaacaagaagagttctctgaaaggcaatgagaaagagaaggagaaacaacagcgggagaaggataaggagaaaagcaaggaccttgccaagagagcctctgtgacggagaggctggacctcaaggaggagccaaaagaagaccccagtggagcagctgtgcccgagatgccaaaaaagtcctccaagattgccagcttcatccccaaaggggggaagctcaacagtgccaagaaggagcccatggccccttcccacagtggaataccaaaaccaggaatgaaaagcatgcccgggaaatccccaagtgccccagcgccttccaaggaaggggagcggagccggagtgggaagctgagctcaggactcccccagcagaagccccagctggacggcagacactccagttcctcttccagcctggcgtcctcagaaggaaaaggcccaggagggaccaccctgaaccacagcatcagcagccagactgtcagtgggtctgtcgggaccacccagaccacaggaagcaataccgtcagtgttcagctacctcagccccagcagcaatacaaccatcccaacactgccacggttgcacctttcctgtacagggtagtctgggaagtgacgctggaaataagagcaccaggatacgaatcaggacacctgggccctgtcctttatcagcccttggtgccctctgaggtcttcggcactggctgcaggaacaggtctcagacggacactgaagggaatgttactgccgagtcaagctcaacaggtgtgagcgtggagcccagccacttcaccaagactggacagcctgctctggaagaactcactggctgtgagttagtgggtatatcctacattcaggtcattgtcagaggaggcataattggcagtttagaacgtgatcacctaagcatgtcagggcaagtggaatccttctcagaaaggacaagaggtgccaagttccgcttcttagtaggtgaagggacaggagcaactccatccagtccagtaggagagcccatgacatgcaaagcagaagacaagaggcttcctaccagcaggaactccacaacagaaaggttgtttggcatttgttttgatttttctaactccctggctctccttggtggggaaatacttcaggatatgggagacaaaggctgcaacacagcccatggaagttgccctgcaagtctaaagtgccatattgctggactattgctgaaaaatcttaacctacctcgtcagcccacctccgtgacacttcccagaataaatatcgagtgtactatttttgattttgcaataagagattccgggatgattgaaaacatagatgcctgcttgaatttcctggcagctaagggaataaacatccaggggctgtctgcagaagagatcaggaatggaaacctcaaggccattctaggcctcttcttcagcctctcccgatacaagcagcagcagcagcagccccagaagcagcacctctcctcacctctgccgcccgccgtatcccaggtggccggggccccctcccagtgccaggctggcacccctcagcagcaggtgccagtcactccccaagccccgtgccagcctcaccagccagcgccacatcagcagtcaaaagcacaagctgaaatgcagtccagtgcatcatccaaggactcatctcaaagcaaaatcatccgcttcactctgggtcagaaaaagatctctagacttccaggtcctaccgcgagggtatccgctgcaggcagcgaggccaaaacacgcggagggtcaactactgctaacaaccgacgcagccagagctttaacaactatgataaatccaaaccagtcacctccccacccccaccgccaagcagccacgagaaagggacatggatgaagctggaaaccatcattctcagcaaactatcacaaggacaaaaaaccaaacaccgcatgttctcactcatagggcaggctcatctaactgtgtgcttagaagctctagagcagaacttgcacccaccaggaaactgcctggagacacaacagtcaattaataacccaaaatatgcccactatgaaactccctcccacccggagagcttcagccactttacaacctag

SEQ ID NO: 125514 - DNA, 516 bp, Homo sapiens
ctgctgctgatggggctgaagcacaacgtccttaagcttcctaggggccctatggtcacattgagagaatctgtatgggagacccttaatttcttgaaatagtcttttgtgtgactgaatatgctgatttttaaaaaatcctcctagaggctccagtaggtgaggttccacttcctgtgtccacgtgttctcattgttcaactcccatttatgagtgagaacatgcggtgtttggttttctgttcctgtgttagtttgctgagaatgatggtttccagcttcatccatgtcccttttttcaaggttcttagcttctttgcattgggttagcacatgctcctttagctcagaggagtttgttattatccaccttctgatgcctacttctgtcaattcatcaaactcattctccatccagtttttgtcccttgctggcaaggagttgtgatcctttggaggagaagaggcattctggatttcggaattttcagcctttttgctctggtttttcctcat

SEQ ID NO: 125515 - DNA, 1018 bp, Homo sapiens
atggatgaagctggaaaccgccattctcagcaaactatcacaaggacagaaaaccaaacaccacatgttctcactcatagaccactcaatgtgaagacgatgagagtgaagacttttatgatgatacacttctacttaatgaataataaatataatttctcctatgattttcttaataacattttctgttctctggattactttacgcctctgctggtgatacccaggcaaacagggtctggagtggacctccagcaaactccaacagacctgcagccgagggtcctgaccattccattctgtgtgtcatgctgccgaagcagcacttggaatctagaagtaccaagtgccacaattcgtctccttgtgactcatggcaccagatgacaagcaatcctctgtccttcagcagcaccagaaacagtggaggatccgtgtgggtgttcacagcgttgtgaatagattgagaaggtggcttttgagtaaagaagttagccatgcagacgcttggaggagagttcctatgaggaaatgacttatgccccaagaccataaggacaggggatgcttggtgcgttccaggaaccacaaggaagtcagcatggaagtagggtaaaatctcaggctctttgtcattcttgccagtaagggatgggctctgatagaatttggctgtgaatccgtctggtcctggactctttttggttggtaggctattaatcattgcctcaatttcagagcctgttattgatctattcagggattcaacttcttcctggtttagtcttgggagggtgtatgtgtcgaggaatttatccatttcttctagattttctagttcatttgcgtagaggtgtttatagtattctctaatggtagtttgtatttctatgagtgagaacatgcggtgtttggctttttgtccttgtgatagtttgctgagaatgatggtttccagcttcatccatgtccctgcaaaggacatgaactcatctttcatggctgcatagtattccat

SEQ ID NO: 125516 - DNA, 739 bp, Homo sapiens
atggccagggaagctccactgaaatggagacctttgccagagcctgaaggaaaacacgatgaatgtggcagcggccagcacaactgtgatgagaatgccatctgcaccaacactgtccagggacacagctgcacctgcaaaccgggctacgtggggaacgggaccatctgcagagccattctgcctgggctcttggcacttgtcgatcggaccttcttggtaactcttggtggaacacagccagggttcctgctcctggtttatcaactggcaagggtactgtgcgtcagggaaaaagaaaaatgcttcaggtttagctttggagttgaaagaaaaaggcatagggacatggatgaagctgtaaaccgtcattctcagcaaactaacacaagaacagaaaaccaaacaccgcatgttctcactcacaggagatcccacaggtgatgaccgcctgtgcctcctgtccctcccaggagatcccacaggtgatgaccgcctgtgcctcctgtccctcccaggagatcccacaggtgatgaccgcctgtgcctcctgtccctcccaggagatcccacaggagatcccacaggtgatgaccgcctgtgcctcctgtccctcccaggagatcccacaggtgatgaccgcctgtgcctcctgtccctcccaggagatcccacaggtgatgaccgcctgtgcctcctgtccctcccaggagatcccacagaccttcgtgtgggatga

SEQ ID NO: 125517 - DNA, 697 bp, Homo sapiens
gaatatacctaaccaaggagttgaaagacctctacaaagaaaagtgcaaaacactactgaaagaaatcacagatgacacaaacaaatggaaacacatcccaagctcatggatgggtagaatcaacattgtgaaaatgaccacactgccaaaagcaatctacaaattcaatgcaatccccttcagaataccaccatcattcttcacagcattagaagacacaattctaaaattcatatggaaccagaaaagagcccacatagccaatgcaagattaagcaaaaagaacaaatctggaggcatcatactacctgatttcaagctatactataaggccatagtcaccaaaacagcatgggacatggatgaagctggaaaacatcattctcagcaaactattgcaaggacagaaaaccaaacactgcatgttctcactcataggtgggaattgaacagtgagaacacatggacacaggaaggggaacatcacacaccagggcctgtcatggggtgggggaagtgggagggatagcattaggagatacacctaatgttaaatgatgagttaatgggtgcagcacaccaacatggcacatgtatacatatgtaacaaacctgcacattgtgcacatgtaccctaaaacttaaagtataatatataaaaatcttattttcttaagccatcaactatgcactgag

SEQ ID NO: 125518 - DNA, 1583 bp, Homo sapiens
  misc_feature (1)...(1583): n = a,t,c or g
atgtctgcgagccaggattcccgatccagagacaatggccccgatgggatggagcccgaatgcgtcattgagagtaactggaatgagattgttgacagctttgatgacatgaacctctcggagtcccttctccgtgacatctatgcctatggttttgagaagccctctgccatccagcagcaagccattctaccttgtatcaggggttataatgtaatcgctcaagcccgatctgggactgggaaaatggccacatttgccatatcgattctgcagcagattgaattagatctaaaagccacccaggccttggtcctagcacccactcgagaattggctcagcagatacagaaggtggtcatggcactagtagactacatgggtgcctcctgtcatgcctgtgtcaggggcaccaatatgcgtgctgaggtgcagaaactgcagatggaagctccccacatcatcgtgggtacccctagccgtgtgtttgatatgctttaccggaagatacctggccccccaaatccatcaggatgttggtactgaatgaggctgacgaaatgttaagccgtggattcaaaggacagatctatggacatatccaaaaggctcaacagcaccaccaagggtagttttgctgtcagccacaatgccctttgattgtgcttgaggtgaccaagaagttcatgaggggcccccattccggattcttgtcaagaaggaagagttgcccctggagggtatccgccatttctacatcaacgtggaaccagaggaattgcaacttggacacactatgtgtactggtatgaaccctgacccatcaccccaggcagtcatcttccatcaaccacccggagggaaggtggactggcctcacccgagaagatgcatgctcgagattccactgtaccccccatgcatggagatatgaccaaaaaggaaccgagacggtgattatgagggaatttcgttctggctcctaaccagagttttgaattaccccactgaccctgcctggccagaggccattgatgtgccagccaggtttcctttagtcattcaaacttatgacccttcccccaccaaccaggggaaaactattaatccacaggaatcggtcgagggtggaccggtttggccgtaaaggtgtggcttattaacatggtgacagaagaagacaatgaggactcttccgagacattgagaccttctactaacacctccattgaggaaatgcccctcaatgttgcttgacctcatctggaggggctgtcctgccatcccagccccagccaggggctcaatctctgggggactgaggagcagcaggaggggggggagggaagggagtccaagggatggacatcttgtcaatttttttttcctttgaataaactgtcacttttttgaggcaaaagaaaggaaccgtgaacattttagacacccttttctttggggtaggctcttgccccaggcgccggctcttctaccnnnnnnnnnnnnggggggggcccgttttagagaaccaaatttaacttacgcggcttggcaagagaaaagtttttttatggggccccaaa

SEQ ID NO: 125519 - DNA, 655 bp, Homo sapiens
aaaagccggggccgggggctgccttacaccatggacgcgttcatgcttggcatgggaatgctgaaatatcccaacttcgtggcgacctaggcccgtggctaccccggatttgctccaagctatggctatcagttcccaggcttcccagcagcggcttatggaccagtggcagcagcggcggtggcggcagcaagaggatcaggctccaacccggcgcggcccggaggcttcccgggggccaacagcccaggacctgtcgccgatctctacggccctgccagccaggactccggagtggggaattacataagtgcggccagcccacagccgggttcgggctttcgcccacgggcatagctggacctttgattgcaacggcctttacaaatggataccattgagcaggtgctttcgttgccatctcactctgagagcatacctggatgtccaggcaagactgggcgaagtttctgagtggccctttgtttaggtgatgtcctcagacctggacccccaccagcctcactccccatcccaaccagaagatggctcactttcggatcgagggttgactacatctcatcatctcacgaatctgcatgtaatataagacaacagcttttaaatgtatatataacccaaaaaaaaaaaaaaa

SEQ ID NO: 125520 - DNA, 744 bp, Homo sapiens
ctaaatgcatgcaccgtagtagatgtactggtagccgtagctgtagttgtagtacatgcattgttgagttgatattacagggtctttgacggctcggcacagcacggccgtcgtgatggaagagatgtttccactgccagggagctcccaatttggaaaggcaacagggtccaagcccttaggagcttctactccaaggctggagaatctattctgtgtccttgaatttgcagtttctctgtcgccgatctctacggccctgccagccaggactccggagtggggaattacataagtgcggccagcccacagccgggctcgggcttcggccacggcatagctgtaagtacctgccttcccctgccctcctgcctcctccttcctgaccagctccttgtggcctgtgggtgtgccaggaaagcccaacatcgggggcagaggagaggacagagggtccccatcaacatcacaccagctcctgagggctgaagcctccgtcgtcttagaggtgtcctgggtgcctctcgtgtggctggtgatgacggctacagcatgctctgaatcagtggattcctcagctttgaagcccaatgcacttctgattgggccactctcagatgactctatctgtaccagctcagctgctgcttctgtgaaatgagaattataatgcgaaccataccggagaccgggtaggttttctaagagtccctcgggctttgcttggcacacaagggcctccat

SEQ ID NO: 125521 - DNA, 440 bp, Homo sapiens; identical to SEQ ID NO: 111681

SEQ ID NO: 125522 - DNA, 837 bp, Homo sapiens
atgttgaacaacaccacagctgtcgctgaggcctgggctcacctggaccaaaactttgacctgatgtatgcaaagcatgcctttgttcactggtacgtgggtgaggggatggaggaagaagagttttctggagcccctgaggacatggctgcccttgaaaaggattatgaggaggttggagcagatagtgctgagggaaaggatgagagtgaagagcaaccggagctaatccgcagagaaactctgggaatcagaaaattccacgtgaaggagaagggtgctagggcacttgcgtatccctcccatcaatccctggctgagggctgttcctggagggttcttagctcccatcccttcctccctgccatctacacagacagagcagacgtcaatagcttatggaagctcttgggctggaagatggcagacaccatctgccagttggaagtctgccagagtgcaccaaagagaataataggtatttcatgcgggagacaaagaagtccaacagttaggcaaaacttatccgagggaatacatgaggacacggccctgaccctgcaagagaccggacgtgggcgcaaaaagccccagaaaaccaagacgcacgggaaaaacacagggaacacacaccggaccaagggggccagaacagtacagggggcaccgccaaccgacggagacgccgaacaacaacacggaaagaaaaaagggagagaccatacccaaacacaccgcagaggacaccccagcaatctccaagcaccgaacaaattcaatttctatagcaacctccatcaagaggttgcccagtccacatttcaatattcccactga

SEQ ID NO: 125523 - DNA, 615 bp, Homo sapiens
ttaattgggcccagggccctgctgctctgtgcagccttgggacttggtgccctgcatcccagcttctccggcttcagccacggctaaaagaggccaaggtacaacttgggtcattgcttcagagggtgcaagccccaagccttggtggtttccatgtggtgttgggccagggatgccggtgggtaagagtagacctgttagtaagtgaaccagttgaccactctgaaatctctccatctcagcaagattttcttgttctctgcttctttcagtgtaggcagtatgggcagtatttcttataagtgcatacacaatcaacctgatgataatctggaccaaaactttgacctgatgtatgcaaagcatgcctttgttcactggtacgtgggtgaggggatggaggaagaagagttttctgaagcccctgaggacatggctgcccttgaaaaggattatgaggaggttggagcagatagtgtgtcttggtcgtcctccatctgcttcaagtacctgttgtgtagcagccagcaccttcttggcacttggtgggtaacctatgccctcaaattctgaagtccctgtttcttcccagccagttgatgttcgccttcccat

SEQ ID NO: 125524 - DNA, 1574 bp, Homo sapiens
gcacgagctagtctcgagtttttttttttttttttttaaaatgggaaacatcaattttattaacaatttacggcaatagacatttacagaattataatatagacagttccaagacttaggagtgtaaaagtacagcactcaggttaatactcttcaccctcatcctctccggtcagcactatctgctccaacctcctcataatccttctcaagggcagccatgtcctcacgggcctctgaaaactcgccttcctccatcccctcacccacgtaccagtgaacaaaggcacgcttggcatacatcaggtcaaacttgtgggtccagggcgagcccaggcctcgggcaacaagcttgttggtatttggctcagcattgcacacagcttctctggtaaccgtgggcccaggtctccggccaggcaaccacagtgggaaggctgggtaattaaatggccaacctttgaagcccagttggggcaccaattccacaaacttggaatgggtacgcttgggttttgaatgttggaaatgggcagcattgaacatcttttggggaaccacgttaaccacgggtataaacaggcaagcaagccatgtatttaccatgggcgaggggtcacattatatcatctcgattggctggctcaaagccaagcattgggtgatctctgctacagtaaagctgttcgttgtaggctttctcagcagagatgaacaggggcatatgtgggccggagggaagttgaatgccggggtaagggaaccaggttggtctggaatttctgtcaagtaaccattcaggggctcaatccaatttcagggaagcagtattggaaggacacaacctggttaataaggcgggttaaggttaagttagttttggcgctccgaaatcgaggtttttacgaaaaatgtcactaaatggcctcattgtctaccatgaaggcacaatcagagtgctccagggtggtgtgggtggtgaggatggagttgtagggctcaactacagctgtggaaacctggggcgccgggtaaatggagaactccagcttggacttcttgccataatcaactgagagacgttccatgagcagcgaggtgaacccagaaccagttcccccaccaaagctgtggaaaaccaagaagccctgaagaccggtgcactggtcagccagcttgcgaattcggtccaacacgaggtcaatgatctccttgccaatggtgtagtgccctcgggcatagttattggcagcatcttccttgcctgtgatgagttgctcagggtggaagagctggcggtaagtgccagtgcgaacttcatcaatgactgtgggttccaagtctacaaacactgcccggggcacatgcttgccagcacccgtttcactgaagaaggtgttgaaggaatcatctcctcccccaatggtcttgtcacttggcatctggccatcgggctggatgccgtgttccaggcagtagagctcccagcaggcattgccaatctggacaccagcctggccaacgtggatggagatgcactcacgcgcaagctccgccttccgggttcgcgccat

SEQ ID NO: 125525 - DNA, 438 bp, Homo sapiens; identical to SEQ ID NO: 123529
  misc_feature (1)...(438): n = a,t,c or g

SEQ ID NO: 125526 - DNA, 642 bp, Homo sapiens
ggcacgagggctaaatagtcccatgtgcactttgttccatggataaataaacactaggaacgcatttccaccctagatttcagcagaaatgctgaatgtaaaggaatatttgagtaaagtgagttgccgttcttgaagcccgtctcctgtctccggtccgtgcctccaagatgacaaagaaaagaaggaacaatggtcgtgccaaaaagggccgcggccaacgtgcagcctattcgctgcactaactgtgcccgatgcgtgcccaaggacaaggcccattaagaaattcgtcattcgaaacatagtggaggccgcagccagtcagggacatttctgaagcgagcgtcttcggatgcctatgtgcttcccaagcttgtatgtgaagctacattactgtgtgagttgtgcaattcacagcaatgtagtcatggaatcgatctccgtgaaagcccgcaaggacccgaacacccccaccccgatttagacctggcgggtgctggccccacgtccccccaccaaagcccaatgtaagggagctggagttctttaaagacttgaaggacaggcttatttcttcttgggaggaaaaataaaatggaaatgtatacgaaatcgtcgacccgggaaaagcactagatggac

SEQ ID NO: 125527 - DNA, 1164 bp, Homo sapiens
atgaacagtgtgggggaggcatgcacggacatgaagcgcgagtacgaccagtgcttcaatcgctggttcgccgagaaatttctcaagggggacagctccggggacccgtgcaccgacctcttcaagcgctaccagcagtgtgttcagaaagcaataaaggagaaagagattcctattgaaggactggagttcatgggccatggcaaagaaaagcctgaaaattcttcttgaccttgacagtcaccttgaaggatttcgcaagtccagaaattgaggactctggatttttgtcaactaactctgtgaacatagccatcagatttgatgaggaacttaggagagaggagttttattttcctccttcgatgtttttcctctcagtctgtaaaagatgaactctttgagaatgatttctcacgctgctgctggtatcttgcaggaactgtgtgctaaaattgaacaatttttttgagattatggttgcaatacttggcgtggaatcagctttacataaatataccttgtatgcaaacgatgataaactagtcaggatgagcagagctgcctgacctcttgatttctgctgcaaaagacatatacactgtactggggtcactatttatgaaagcaattggttaggacctcttttttttcctctcagggaactaatgctctgaaaagggatctgggcacaacagtttcagtgagtgcttttgagcacacttgtatctttatatagtaactaatggttaagattgatggtggcctggattagcaaagaggaagacagcttttaacacagttccctgccttcacaagacggtgtcagattaagatgtgaaagctgcaagaatgttgcagtgaacaccatttcagagctctcagtgtgcagtccaggaattaaaaatacttggaatagctgtggaggaagaacctaaattgcaaagatctgctattgccagctctcaacccaagtcagtgaattgtcaacctgcatatccttaaaaatgtcaaaatgctgcatctgggttaaatgtcggggtaggggggaagctgaaggtgctcgcttcatttgccttttttactccatcctgccctgtaatgtctgtaatcctgaagatggaataaattgtaaaatttagtttctttcattaaaaaaaaaaa

SEQ ID NO: 125528 - DNA, 428 bp, Homo sapiens
  misc_feature (1)...(428): n = a,t,c or g
atgaactcttatgctgtactaatgtttcaaccaaagaagggattcatcttgcattggtggagctgctgaaaaatttaaccaagtgcttgangtttctgggaagtcggcatccaaccctggtgcttcccttggtgccagagcttctgagcacccacccattttttgacacagctgaaccagacatggatgatccagcttatattgcagttttggtacttattttcaatgctgctaaaacctgtccaacaatgccagcattgttctcagatcacaccttcaggcactatgcctacctccgaaacaggttatggaaggggacctacaaaatgggaatttcatgtacagtggtgtgggaggaataaagcaggtgggtggttataccttcacatgagggntgcaggccaaaggtttggcaacttatagtaaca

SEQ ID NO: 125529 - DNA, 1911 bp, Homo sapiens
aaaatctctaacaacatcaccctccgagaagatcatcttgacactgtcctggctgtgctagaggattcatccagagatattcgagaggctcttcatgaactcttatgctgtactaatgtttcaaccaaagaagggattcatcttgcattggtggagctgctgaaaaatttaaccaagtaccctactgatagggactccatatggaagtgcttgaagtttctgggaagtcggcatccaaccctggtgcttcccttggtgccagagcttctgagcacccacccattttttgacacagctgaaccagacatggatgatccagcttatattgcagttttggtacttattttcaatgctgctaaaacctgtccaacaatgccagcattgttctcagatcacaccttcaggcactatgcctacctccgagacagtctttctcatcttgttcctgccttgaggttaccaggtagaaaactggtgtcatcagctgtttctcccagcatcatacctcaagaggatccttccccagcagttcctgcagcagagccttgaaagagtgtatagtcttcagcacttggaccctcagggagcccagggagctgctgggaattcaccatcagggatctgcaaagacttggagaacttcaatctgaattggcaggagtagctgatttctctgccacctatcttcgctgtcaactacttctcatcaaggccttgcaggaaaagttgtggaatgtaagctgcccctttgtatttgaagcagagtgatttggcctcagcagcagcgagaacagattatggaagagacctacaaaatggaattcatgtacatgtggtgtggagaataagcaggtggtgattatacatcacatgaggctgcaggccaaagctttgcaacttattagtaacagcacggaactacacgaggacttgaccccttaatttgggatgtgtgaaaaatttttacaggaagtagacttttttcagaggtattttcatcgctggatttgccccacttggcaggacagctttgtgggacaaactcctttgaccttgtgccccgactcatggacatccaaacctggcaggaagtgggtccaaatttctacagaccatgctgcgacagagtgcctttctgcatctcccgcttccagagcagatccacaaagcctcagccaccatcatcgagccagcgggcgagttcagacaaccctttgcggtttacctctgggtctggtggttgccctgggatgttgatgcaaccctggaagcatgtgcaaggatcctcagaacactgttaaggtccagggtcttatatccaagatgggccaaggctcaagatgattcaccccaaagcctgcaagactttccgggaatcctggggcccaggggcgggcaccgggcttcaatcacttcaggttttattcttcttccccacacccgctttgggacaggaggcatcccccaggtggaaagtgagggctggctgcctgggccttacaactcccagtgctccgcattcccaaaatgccccccctggatgggaggggtgggtgaagatgttcaccacagggtggaaacccagcatcgaggggcacccattccccttcagcaagcctgtaaaagtttatataatgccccaaacctgcacggcgcttaaggcaaaaacagtcttccccaacccgtggcctagagggcccttcttaggtgtcagaatgagccaagcctgaagcacttcacctggaattgatgtcgtaggcttaaggagtatgtgacccttacagtctcatctggtatcaaacacaggataaattgtttcttcattaaaaaataaaaaaaccttcaagtctacttacccttctcctggtccacaataaagttgagacaacaccaagctgttctagttcatgg

SEQ ID NO: 125530 - DNA, 1257 bp, Homo sapiens; identical to SEQ ID NO: 125428

SEQ ID NO: 125531 - DNA, 1389 bp, Homo sapiens
atggacataaagaagggaataacagacatcagcgcctctttgagagtggagagtggatgggaagccagaacgagaaaggaaaagactcatatcaacactgtgatcatcggacacgtagattcgggcaagtccaccactactggccatctgatctacaaatgcggtggcgtcgacaaaagaaccatcgaaaaatttgagaaggaggctgctgagatgggaaagtgctccttcaagtatgcctgggtcttggataaactgaaagctgagcgtgaacatggtatcaccattgatatctctttgtggaaatttgagaccagcaagtactatgtgactatcattgatgccccaggacacagagacctcatcaaaaacatgattacagggacatctcaggctgactgtgctgtcttgattgttgctgctggttttggtgaatttgaagctggtatctccaagaatgggcagacccgagagcacgcccttctggcttacacactgggtgtgaaacaactaattgttggtgttaacaaaatggattccactgagccaccctacagccataagagatatgaggaaattgttaaggaagtcagcacttacattaagaaaattggccacaacaccgacacagtagcatttgtgccagtttctggttggaatggtgacaacacgctggagccaagtgctaacatgccttggttcaagggatggaaagtcacccgtaaggatggcaatgccagtggaaccacgctgcttgaggctcttgactgcatcctaccaccaactcgtccaactgacaagcccttgtgcctgcctctccaggatgtctacaaaattggtggtattgtcaacgttgcaacagaagtaaaatctgttgaaatgcaccatgaagctttgagtgaagttcttcctggggacaatgtgggcttcaatgtcaagaatgtgtctgtcaaggatgttcgtcgtggcaacgttgctggtgacagcaaaaaggacccaccaatggaagcagctggcttcactgctcaggtgattatcctgaaccatccaggccaaataagtgctggctatgcccctgtattggattgccacacggctcacattgcatgcaagtttgctgagctgaaggaaaagactgatcgccattctggtaaaaagctggaagatggccctaaattcttgaagtctggtgatgctgccattgttgatatggttcctggcaagcccgtgtatgttgagagcttctcagactatccacctttgggtcgctttgctgttcatgatatcagacagacagttgcggtgggtgtcatcaaagcagtggacaagaaggctgctggagctggcaaggtcaccaagtctgcccagaaagctcagaaggctaaataa

SEQ ID NO: 125532 - DNA, 1931 bp, Homo sapiens
cacctaaaagccaaaatgggaaaggaaaagactcatatcaacattgtcgtcattggacacgtagattcgggcaagtccaccactactggccatctgatctataaatgcggtggcatcgacaaaagaaccattgaaaaatttgagaaggaggctgctgagatgggaaagggctccttcaagtatgcctgggtcttggataaactgaaagctgagcgtgaacgtggtatcaccattgatatctccttgtggaaatttgagaccagcaagtactatgtgactatcattgatgccccaggacacagagactttatcaaaaacatgattacagggacatctcaggctgactgtgctgtcctgattgttgctgctggtgttggtgaatttgaagctggtatctccaagaatgggcagacccgagagcatgcccttctggcttacacactgggtgtgaaacaactaattgtcggtgttaacaaaatggattccactgagccaccctacagccagaagagatatgaggaaattgttaaggaagtcagcacttacattaagaaaattggctacaaccccgacacagtagcatttgtgccaatttctggttggaatggtgacaacatgctggagccaagtgctaacatgccttggttcaagggatggaaagtcacccgtaaggatggcaatgccagtggaaccacgctgcttgaggctctggactgcatcctaccaccaactcgtccaactgacaagcccttgcgccctgcctctccagggagtccaccaaattgggtggtattggtactgtctcttctgccccgatggaaacctggtttctccaaccccggtatggtggtcacctttgctcccagtccacggtaacaacggaaagtaaaatctgtcgaaaatgcacccatgaagctttgaagtgaagctctttctggggaacaatgtgggctttcaatgtccaagaaggtgtctgtcaaggaatgtttcgtccgtggcaacggttgctgggtgaccagcaaaaaatgaccccacccaatgggaagcaagctggctttcactgctccaggtgattatccttgaaccatcccaggcccaaataagcgcggggttatgccccttgtattgggattgcccacacgggctcacatttgcatgcaaagtttgctgagctgaaggaaaagattgatcgccgtttctggtaaaaaagtgggaagatggccctaaaattttggaagtctgggtgatgctgccattgttgatatggtttcctggccaggcccatgtgtgttgagagcttctcagactatccacctttgggtcgctttgctgttcgtgatatgagacagacagttgcggtgggtgtcatcaaagcagtggacaagaaggctgctggagctggcaaggttcaccaagtctgcccagaaagctcagaaggctaaatgaatattatccctaatacctgccacccccactcttaaaaattttccccaaaagggatttgggtggaaaagaacggttctcagaactgtttggtttcaaatggcccatttaaggttaagtagtaaaagactggtttaatgataccaatgcatcgtaaaaacctttcagaaaggaaaggagaatgttttgtgggccccttttgggtttatttttttggcgcggggccgttttaaagttattaagttttttaaaatcccgacttttttaaatgggaaaccacctggacccaaaaatttttgtaaccagaattttgggaacccattaaaaagggtaaatggggaaaaaaaaactgtgggggggcgggccgtttttaaagataccttggggggccccaagttattccgcgggctatggaaaggaaaaaccctttttcccttaaaggggggcccaataaataagcccaaccttggggttcttttgcgaaaaga

SEQ ID NO: 125533 - DNA, 999 bp, Homo sapiens
atgagcccaccaatcctggatattgagaccatcaacgccctggcagatgccatcaatgggtttcagggtagtatgatgctggtcagccatgacttcagactcattcagcaggttgcacaggaaatttgggtgtgtgagaagcagacaatcaccaagtggcctggagacatcctggcttacaagttgcacctcaagtccaagctggtggatgaggagccccaactcaccaagaggacccacagcgtgaaacttacaatcatggtggaaggcaaagcagaagcaggcaccttcttcacaaggtggcaggagagacgacctgcgctgctggagagactcacgtacgacgatgtgtactcctacacgacgatctctcgtatgttagtgctacgagtgatgcgcggagctggtggtgttcgagcgaggacgcgtgtacccgatgttgacgatggacagcgtctcacggtgacggacgatagtgtgatggagacgatacagcggaagatcgtccgcagtggctacgagcgtgcgtgcgagctgtcgagtgcggttatgcgattgagttatgatgatgccgagtctcgatcgtcgtatccactacgtcgtcgtctgctgcctcggcatgctggtgacgctgcgctacttcttgatctgcttctgctgtgcgactgctacgacgatgattatcgtagtgactgtacgtgtgcacaacggactgatcgactatacgtcgacactgcctgtgcagctactgctgctactctgtctaccgctgcttgtgttgctacggcgtctagctctgcgttcgctgcgacaggtgcgcgatggcggttgcatcttacggacatcacacggcgtcgtctgactgacgctactacgaccgcggactactgctgtctcctgctgctactacagactgctactgcgtacggcttacgactacggactatacagctactacagttgacgcatgcttcgtctgttgactgcatctactattga

SEQ ID NO: 125534 - DNA, 2442 bp, Homo sapiens
atgccctccgacctggccaagaagaaggcagccaaaaagaaggaggctgccaaagctcgacagcggcccagaaaaggacatgaagaaaatggagatgttgtcacagaaccacaggtggcagagaagaatgaggccaatggcagagagaccacagaagtagatttgctgaccaaggagctagaggactttgagatgaagaaagctgctgctcgagctgtcactggcgtcctggcctctcaccccaacagtactgatgttcacatcatcaacctctcactcacctttcatggtcaagagctgctcagtgacaccaaactggaattaaactcaggccgtcgttatggcctcattggtttaaatggaattggaaagtccatgctgctctctgctattgggaagcgtgaagtgcccatccctgagcacatcgacatctaccatctgactcgagagatgccccctagtgacaagacacccttgcattgtgtgatggaagtcgacacagagcgggccatgctggagaaagaggcagagcggctggctcatgaggatgcggagtgtgagaagctcatggagctctacgagcgcctggaggagctggatgccgacaaggcagagatgagggcctcgcggatcttgcatggactgggtttcacacctgccatgcagcgcaagaagctaaaagacttcagtgggggctggaggatgagggttgcccttgccagagccctctttattcggcccttcatgctgctcctggatgagcctaccaaccacctggacctagatgcttgcgtgtggttggaagaagaactaaaaacttttaagcgcatcttggtcctcgtctcccattcccaggattttctgaatggtgtctgtaccaatatcattcacatgcacaacaagaaactgaagtattatacgggtaattatgatcagtatgtgaagacgcggctagagctggaggagaaccagatgaagaggtttcactgggagcaagatcagattgcacacatgaagaactacattgcgaggtttggtcatggcagtgccaagctggcccggcaggcccagagcaaggagaagacgctacagaaaatgatggcatcaggactgacagagagggtcgtgagcgataagacactgtcattttatttcccaccatgtggcaagatccctccacctgtcattatggtgcaaaatgtgagcttcaagtatacaaaagatgggccttgcatctacaataatctagaatttggaattgaccttgacacacgagtggctctggtagggcccaatggagcagggaagtcaactcttctgaagctgctaactggagagctactacccacagatggcatgatccgaaaacactctcatgtcaagatagggcgttaccatcagcatttacaagagcagctggacttagatctctcacctttggagtacatgatgaagtgctacccagagatcaaggagaaggaagaaatgaggaagatcattgggcgatacggtctcactgggaaacaacaggtgagcccaatccggaacttgtcagacgggcagaagtgccgagtgtgtctggcctggctggcctggcagaacccccacatgctcttcctggatgaacccaccaatcacctggatatcgagaccatcgacgccctggcagatgccatcaatgagtttgagggtggtatgatgctggtcagccatgacttcagactcattcagcaggttgcacaggaaatttgggtctgtgagaagcagacaatcaccaagtggcctgggagacatcctgggcttacaaggagcacctcaagtccaagctggtggattgaggagccccagctcaccaaggagttacccacaacgtgttgagccttttacctgggttcgggtcaggagctccatcgtgggaactaacagctgctaacctgaccagccgctcaggacaggaccctggggctacactcctgcattgctgcaatacatgctcccccagcctctcccctgcccctcaacctgccttagctgcactctcttacctacagctggacagtacctgtctgtttcctgtcctccttccagttacatctgtccatgtctggactcggctggccgttccctccagccccttgctggttatcttacatctgagtgtgatgcagtcagaggcacctgcgggttagcccaggggcccaagccctggatttggcctgcggaggagcttaggatcctcgttttctgggttttggtgatgttggaggagtaccccccagcccaccgccccgattcctttttgcttctggtttggagctccggaccaggaccttcgtcctggtcagtttttaaataattatttagcagtgtaacttttaaacctgcgtgacatctacaaagcgcccaataaagaaagaggaagccaaaaaaaaaaaaaaaaaa

SEQ ID NO: 125535 - DNA, 498 bp, Homo sapiens
aaggattctaatgagactcagagcaggtgtaaacacagggcatggaccttccctgaaccaagaggcctggcctaaacaaaactgtggaccgtggtaccttagacacattaaagaagacattaacagggacaccctgcaagtatgtcctccccggggagaagcccaagtgcagatgcctatggcccacagatgatatggtttggcctctgtgtcccccactcaaatctcatcctcaagttgtaatccctggatgttcgagggagggaccctggtgggaggtgattggattggttcgcatgatagtgagggagttctcacgagatctggttgtttgataagtgtctggcatttctcctgtgctgtctctcctgccaccttgtgaagaaggtgcctgcttctccttcgccttccgccatgattgtaagtttcctgaggcctccctagcaatgcagaactgtgagtcaattaaacttcctttctttataaattaaaaaaaaa

SEQ ID NO: 125536 - DNA, 678 bp, Homo sapiens
atgccagctctgagaataaacagtggggcaggccccttcaaagcttgtgttgcagcagcgtttggtagtccttcagccagagttagcacaataatttacttaaatgtccatgatgctgtcaccaaggcaatccaagaagctcggcaaatgaaggagcaacttcaacgggaaaaacaggtgctttatgggaagaaaacagccatatatgaggagcaagcccgtcttggcaagcagcacctggagaagtaccctgactatgagtacaagcctagaccaaagtgcacctgcctcatggatgacaaaaagctgcacgttggtgaatacgaggcaatcatgcacaacaggcagcaggagatgcggcagtacttcaatgttgggcaacaagcacagatcccaattgctactgctggtgttgtgtaccatggagccatcaccatggctggaatgccctcccctcacctgccctcagagcactcaagtttgtccagcagcccagagcctgggatgcctgttatccagagcacttttgtgaaaggagaggaaccacatatcaaagaagagatagaggccgaggacatcaatggagaaatttatgatgagtatgacaaggaagacgatgatccagatgtagattatgggagtgacaaagaaaaccgtattgcaggaaaagccaactga

SEQ ID NO: 125537 - DNA, 1473 bp, Homo sapiens
gatgaagtggcacagccactgaacctatcagctaaacccaagacctctgatggcaaatcacccacatcacccacctctccccatatgccagctctgagaataaacagtggggcaggccccctcaaagcctctgtcccagcagcgttagctagtccttcagccagagttagcacaataggttacttaaatgaccatgatgctgtcaccaaggcaatccaagaagctcggcaaatgaaggagcaactccgacgggaacaacaggtgcttgatgggaaggtggctgttgtgaatagtctgggtctcaataactgccgaacagaaaaggaaaaaacaacactggagagtctgactcagcaactggcagttaaacagaatcaagaaggaaaatttagccatgcaatgatggatttcaatctgagtggagattctgatggaagtgctggagtctcagagtcaagaatttatagggaatcccgagggcgtggtagcaatgaaccccacataaagcgtccaatgaatgccttcatggtgtgggctaaagatgaacggagaaagatccttcaagcctttcctgacatgcacaactccaacatcagcaagatattgggatctcgctggaaagctatgacaaacctagagaaacagccatattatgaggagcaagcccgtctcagcaagcagcacctggagaagtaccctgactataagtacaagcccaggccaaagcgcacctgcctggtggatggcaaaaagctgcgcattggtgaatacaaggcaatcatgcgcaacaggcggcaggaaatgcggcagtacttcaatgttgggcaacaagcacagatccccattgccactgctggtgttgtgtaccctggagccatcgccatggctgggatgccctcccctcacctgccctcggagcactcaagcgtgtctagcagcccagagcctgggatgcctgttatccagagcacttacggtgtgaaaggagaggagccacatatcaaagaagagatacaggccgaggacatcaatggagaaatttatgatgagtacgacgaggaagaggatgatccagatgtagattatgggagtgacagtgaaaaccatattgcaggacaagccaactgataagggtcaaaagattgttgtgaccttaggacttaaagaagccctaactggttcatccttaccagtggccaagcacattaactttctcatacactgactgttactttaactgttagtcttaaatagttgggacatcagctgactaatagacctcagcctcaaaaggcttggaaagaaaaaacaaatacaacaagcaaacaacaatatcaacaacaagagattgaaataagctatgggtaaaataatgccagtaattcagctgctacatccaagcactgaagtcttacccgtcaactttttttttttttaaataaactttatggctgtttgttctacaaaaaaaaa

SEQ ID NO: 125538 - DNA, 714 bp, Homo sapiens
atgtatatgcaaatctataagaaaggtgatattgtagacatcaagggaatgggtactgctcaaaaaggaatgccccacaagtgttatcatggcaaaactggaagagtctacaatgttacctggcatgctgttggccttattgtaaacaaacaagttaaaggcaagattcttgccaagagaattaatgcgcttattgaacacattaagcactctaagagccaagatagtttcctgaaacgcgtgaaggaaaataatcagaaaaagaagccaaagacaaaggcattgaattttctaagttcacttcaactcaactttccagaccaaacatacgactttgcgcaggcaagccttgcagccagaactcatcttctttttccgggccgaaaaccggcacgccgtaatgttgcgccagttccgccgctgacgccagatcgttggctgaacgaaggcgataccatcagcatagggaatgtagctgtctttgtcaaagaaacccttaaagactcctctggaaagctcctagatctgataaatgaattcagtgaagtctcaggatacaaaatcaatgtacacaaatcagtagcactgctgtacatcaacaatgacaaagctgagaatcaaatcaagaactcaatctcttttacaacagctacagaaaagattcttaggaatatacttaacaaaggaggtgaaggatctctacaaggaaaatga

SEQ ID NO: 125539 - DNA, 913 bp, Homo sapiens
  misc_feature (1)...(913): n = a,t,c or g
aattgcaattcagggcatacacagaccaggcagtcttcggcatgtccaaagaacaaagagaagattgggagttttattagaaagatcaatgttatgtactgttttgaaagaaatctcatcagcactagagaagctttcgaaagctggcaagctctgactgagccaatagaaaagatatgggaagactatttggaggaacagatgaacagctggaacagaaaggaagaagaagccggggatcctctagagtcacctacgcatggagctgcctgccgcagacagatacaatcgagctcggtaccggaccatgagagaactctggtagttatatcctacatcttgaataggaattgcatacacagctatgaagttactcttaaattccaggcccacagtccccacaatctagtccagatcttggttggctacagtgttgaaacccttaaagactcctctggaaagctcctagatctgataaatgaattcagtgaagtctcaggatacaaaatcaatgtacacaaatcagtagcactgctgtacatcaacaatgacaaagctgagaatcaaatcaagaactcaatctcttttacaacagctgnnnnnnnnnnnnnnnnnnnnnnnnnnnnnnnnncccaaggaatttttttaaccaaaaggctaaaaaatttttaaaggggaaaatttaaaaccctggtaaaaaaaaaccagggggacccaaaaaaagggaaaaaccccccgggccccaaaatgggaaaaaacaattttgggaaaacccccttttgggccaaaaaaatttaaaaattccattcaatttccaaaaaaaaccccacctttttttttccaaaaacttaaaaaaaccggggtaaaatttttttgggccccaaaaggccccaaaggttttcttagcaaaaaa

SEQ ID NO: 125540 - DNA, 570 bp, Homo sapiens
cccgcctgcaggaattcggcacgaggaaccgccatcttccagtaaattcgccaaaattgacgaacacaaagggaaagaggagaggcacccgaatatatgttcctctaggccttttagaaaacatggagttgttcctttggccacatatatgcgaatctataagaaaggtgatattgtagacatcaagggaatgggtactgttcaaaaaggaatgccccacaagtgttaccatggcaaaactggaagagtctacaattgttacccagcatgcctgatgggcattgttgtatacaaacaagcttaagggcaaagattcttgccaaagagaatttaatgttgcgtgattgagcacatttaagcactcttaagagccgagatagctttcctgaaaccgtgtgaaggaaaatgatcagaaaaagaaagaagccaaagaggaaaggtacctggggttcaactaaagccgccagcttgctccacccagagaagcacactttgtgagaacccaatggggaaggagcctggagcttgctggaaccctattccctatgaattccatgggcataatagggt

SEQ ID NO: 125541 - DNA, 2094 bp, Homo sapiens
atgcaagaaacacacctaaaacaaaatgacccaggaaggctaaatgtaacagtaagagagtggtttttcccaaatggatatgccttcgccactggctctgatgatgccacttgccggctctttgaccttcgtgcagatcaagagttattattgtattctcatgacaatatcatctgtggaatcacttctgtagccttctcaaaaagtgggcgtctcttgttggctggttacgatgactttaattgtaatgtatgggacacgctaaaaggagatcgtgcagtttcttttcgcaaatgtaagcagatagctatctattttaaccctatcagcatcttgtacagcgcttgcgaggctgagagatcatgggagcctcatgctgccccagctgctgcctctccagtgaggggtctgctgtgcccatgtgtcatccatggtgctctcaatcagatctacgtttggagctttgcgatgagagggtctgctttcctctacttgttctacatcttcctccagttgctctgtttactgatgccgtattggtataggcctgtaacaggtgctggctccttctctcctagactgttgctgttcactgcagtaatgtgttacggcttgggcccctcgcaggagtgtatctcgcagtcagcagtgaaaacaaagttcgaacagcacactatcagagctaaacagatactagctactgtgaaaaacataatggattcagtaaacctggcagctgaagataaaaggcattattcagtggaagagagggaagaccaaattgatagactggactttattcgaaaccagatgaaccttttaacactggatgttaagaaaaaaatcaaggaggttaccgaggaggtggcaaacaaagtttcatgtgcaatgacagatgaaatttgtcgactgtctgttttggttgatgaattttgttcagagtttcatcctaatccagatgtattaaaaatatataaaagtgaattaaataagcacatagaggatggtatgggaagaaatttggctgatcgatgcaccgatgaagtaaacgccttagtgcttcagacccagcaagaaattattggtaatatttatgtctacaaggtcatgtctgagtccatccgtaagctggaagaaggatatatcaaagaagtgtttgacattgataatgaggtttcagttgttcattcattaactgatggcaaaatagctaaaatgcttctaaatcaaggtgattatgataatggtgataatgaagatgatttcattgacctcgcagaacaactgcctataggcagcatgctccctagatctttagcttctactcccactgctcctaccactccagcaacgccagataatgcatcacaggaagaactcatgattacattagtaacaggattggcgtccgttacatctagaacttctatgggcatcattattgttggaggagtgatttggaaaactataggctggaaactcctatctgtttcattaactatgtatggagctttgtatctttatgaaagactgagctggaccacccatgccaaggagcgagcctttaaacagcagtttgtaaactatgcaactgaaaaactgaggatgattgttagctccacgagtgcaaactgcagtcaccaagtaaaacattggcccagggcttcccggtatcaacagggacaccaggatttatttattctgcgaagtgatcttccgtcacaggtatttattcgcgataagctcatggagcggcgtaaccgtcgcacaggaaggacagagaaagcgcggatctgggaagtgacggacagaacggtcaggacctggattggggaggcggttgccgccgctgctgctgacggtgtgacgttctctgttccggtcacaccacatacgttccgccattcctatgcgatgcacatgctgtatgccggtataccgctgaaagttctgcaaagcctgatgggacataagtccatcagttcaacggaagtctacacgaaggtttttgcgctggatgtggctgcccggcaccgggtgcagtttgcgatgccggagtctgatgcggttgcgatgctgaaacaattatcctga

SEQ ID NO: 125542 - DNA, 2211 bp, Homo sapiens
atgtgttacggcttgggcccctcgcaggagtgtatctcgcagtcagcagtgaaaacaaagttcgaacagcacactatcagagctaaacagatactagctactgtgaaaaacataatggattcagtaaacctggcagctgaagataaaaggcattattcagtggaagagagggaagaccaaattgatagactggactttattcgaaaccagatgaaccttttaacactggatgttaagaaaaaaatcaaggaggttaccgaggaggtggcaaacaaagtttcatgtgcaatgacagatgaaatttgtcgactgtctgttttggttgatgaattttgttcagagtttcatcctaatccagatgtattaaaaatatataaaagtgaattaaataagcacatagaggatggtatgggaagaaatttggctgatcgatgcaccgatgaagtaaacgccttagtgcttcagacccagcaagaaattattggtaatatttatgtctacaaggtcatgtctgagtccatccgtaagctggaagaaggatatatcaaagaagtgtttgacattgataatgaggtttcagttgttcattcattaactgatggcaaaatagctaaaatgcttctaaatcaaggtgattatgataatggtgataatgaagatgatttcattgacctcgcagaacaactgcctataggcagcatgctccctagatctttagcttctactcccactgctcctaccactccagcaacgccagataatgcatcacaggaagaactcatgattacattagtaacaggattggcgtccgttacatctagaacttctatgggcatcattattgttggaggagtgatttggaaaactataggctggaaactcctatctgtttcattaactatgtatggagctttgtatctttatgaaagactgagctggaccacccatgccaaggagcgagcctttaaacagcagtttgtaaactatgcaactgaaaaactgaggatgattgttagctccacgagtgcaaactgcagtcaccaagtaaaacactgctcaaagaaagtcaaagtcgagaaaggacttaaatcgtcgagtccagtcccccttaactcctcattcattccactatttctcgagccaaggaatcgggtgaaactcaacaacgactcgcagtcttcaggcggctggcacacttcggggtctgagatgccatctgccttgcctaacctgggcaagaccactcgcgtcctttcccttgaggagcagcgtgggaaaggctttttcaactacctccagccatggaggagaggtgagggctgggatgtgcggttaaaccctaaacctgataagagtgaaagtgggatacaatctgatgagatcgagtgcattcagggtgcaacatataagaatccggaacttgatcgaatagccactgaagatgatctggtagaaatgcaaggatataaagacaagctttccatcattggtgaggtgctatctcggagacacatgaaggtggcattttttggcaggacaagcagtgggaagagctctgttatcaatgcaatgttgtgggataaagttctccctagtgggattggccatataaccaattgcttcctaagtgttgaaggaactgatggagataaagcctatcttatgacagaaggatcagatgaaaaaaagagtgtgaagacagttaatcaactggcccatgcccttcacatggacaaagatttgaaagctggctgtcttgtacgtgtgttttggccaaaagcaaaatgtgccctcttgagagatgacctggtgttagtagacagtccaggcacagatgtcactacagagctggatagctggattgataagttttgcctagatgctgatgtctttgttttggtcgcaaactctgaatcaacactaatgaatacggaaaaacacttttttcacaaggtgaatgagcggctttccaagcctaatattttcattctcaataatcgttgggatgcctctgcatcagagccagaatatatggaagacgtacgcagacagcacatggaaagatgcctgcatttcttggtggaggagctcaaagttgtaaatgctttagaagcacagaatcgtatcttctttgtttcagcaaaggaagttcttagtgctagaaagcaaaaagcacaggggatgccagaaagtggtatgcattacctatag

SEQ ID NO: 125543 - DNA, 1035 bp, Homo sapiens
accatctaggcaggactactggaatggcagagtgcacatctctataaaaccaccactgggagggtggaaaattttgtgcgtttggcgggtttcgctctcttcataagtattgatcattccgcagccctgcggaccggacacgtgaggaggtagtgacgccgacactgccagaacacactgctacaaggtcccagatggccacgtctctggattttaaaacttatgtagatcaggcatgtagagctgctgaggagtttgtcaatatttactatgagacaatggataaaagaagacgggcactaaccaggctgtatctggacaaggccaccttaatatggaatggaaatgctgtttcagggctggatgccctaaataatttttttttgacacattgccttcttagtgagttccagggtcaatattgtttagattgccaacccagttcatggattatcagagcctatctttcagctccctagatctttagcttctactcccactgctcctaccagtccagcaatgccagataatgcatcacaggcagaactcatgattacattagtaacaggattggcttctcttacatctagaacttctatgggcatcgataatgttggaggaatgatttggaaaactataggctggaaactcatatctgtttcattaactatgtatggagctttgtatctttatgaaagactgtcctggaccacccatgccaaggagagagcctttaaacagcagtttgtaaactatgcaactggaaaactgaagatgattgctagctccacaagtgcaaactgcagccaccaagtaaaacaacaaatggctaccacttttgctcgcctgtgccaacaagctgatattactcaaagacaactggaagaagaaattgctagattacccaaagaaatagatcagtgggagaaaatacaaaacaatttaaagctcttaagaaataaagctgttcaacttgaatatgagctggagaattttactaagcagtttctaccttcacgcgatgaagaatcctag

SEQ ID NO: 125544 - DNA, 1470 bp, Homo sapiens
gggaagaccaaattgatagactggactttattcgaaaccagatgaaccttttaacactggatgttaagaaaaaaatcaaggaggttaccgaggaggtggcaaacaaagtttcatgtgcaatgacagatgaaatttgtcgactgtctgttttggttgatgaattttgttcagagtttcatcctaatccagatgtattaaaaatatataaaagtgaattaaataagcacatagaggatggtatgggaagaaatttggctgatcgatgcaccgatgaagtaaacgccttagtgcttcagacccagcaagaaattattgaaaatttgaagccattacttccagctggtatacaggataaactacatacactgatcccttgcaagaaatttgatctcagttataatctaaattaccacaagttatgttcagattttcaagaggatattgtatttcgtttttccctgggctggtcttcccttgtacatcgatttttgggccctagaaatgctcaaagggtgctcctaggattatcagagcctatctttcagctccctagatctttagcttctactcccactgctcctaccactccagcaacgccagataatgcatcacaggaagaactcatgattacattagtaacaggattggcgtccgttacatctagaactttctatgggcatcattattgtgggaggagtgatttggaaaactataggctggaaactcctatctgtttcattaactatgtatggagctttgtatctttatgaaagactgagctggaccacccatgccaaggagcgagcctttaaacagcagtttgtaaactatgcaactgaaaaactgaggatgattgttagctccacgagtgcaaactgcagtcaccaagtaaaacaacaaatagctaccacttttgctcgcctgtgccaacaagttgatattactcaaaaacagctggaagaagaaattgctagattacccaaagaaatagatcagttggagaaaatacaaaacaattcaaagctcttaagaaataaagctgttcaacttgaaaatgagctggagaattttactaagcagtttctaccttcaagcaatgaaggatccgtaacaatagagattgctttggtgaccctgataggaggaaaccgaaacttgtaagattggaacagttgttatttttatgaaattactttaaatatgaattgtactaactgtacctaaatagcaaagccctgtgtagattctggtaatgatctgtctcagggtatgtgtatttttgaagagtgttatgtccttagttttaattttgagtaaagaaaaggctaaaatcatgaattagttacaagcaacagtaccaacttatgtgacccctgagggtaggggctgtgagctcttaatttgtttttgattctgaaaaactctgcttcctggcatccaggagttagagattgagcctttcatcttctt

SEQ ID NO: 125545 - DNA, 454 bp, Homo sapiens
tggtttgcttaggcgcagacggggaagcggagccaacatgccagtggcccggagctgggtttgtcgcaaaacttatgtgaccccgcggagacccttcgagaaatctcgtctcgaccaagagctgaagctgatcgaaggcggaatcagtgtttcctcccactcttcccaggcaacgccctgctgcggcggctggtccgcattggggtgctggatgagggcaagatgaagctggattacatcctgggcctgaagatagaggatttcttagagagacgcctgcagacccaggtcttcaagctgggcttggccaagtccatccaccacgctcgcgtgctgatccgccagcgccatatcaggtaccacctcggatgggcacctgaatcttcctccacctgcccctctgatggttgccctcactaagcctgctgtccctatctcctatgcagccctcggg

SEQ ID NO: 125546 - DNA, 693 bp, Homo sapiens
atccctgacatcatcgtgcactgggccaggtaaggcaccttttggttgcgctcgccatctgggtggccgcatcgctactgccactattcctcctcctcctctacctcatcctccgacatcgacgtcagggccaacactggacatcgacccaaagaaaggctgatttccaacatcctgcaggggctgtggggccagagcccacagacagaagcctgcagtggaggaccagcccatctgccgacgcccaggaagaaaacctctatgctgccgtgaaggacacacagcctgaatatggggtggagaaggacactccggctgctgcatctgaagccccccaggaggtgacctacgcccagctgcacagcttgaccctcagacggaaggcaactgagcctcctccatcccaggaaagggaacctccagctgagcccagcatctacgccaccctggccatccactacgcccggagggtacgcagactccacactcagtagaaggagactcaggactgctgaaggcacgggagctgcccccagtggacaccaatgaaccccagtcagcctggacccctaacaaagaccatgaggagatgctgggaactttgggactcactcgattctgcagtcgaaataactaatatccctacattttctaattaaagcaacagacttctcaataatcaatgagttaacc

SEQ ID NO: 125547 - DNA, 2097 bp, Homo sapiens
tttgtgtcctgccaggcaccgtggtctcatccgcctgcacagctgagtccagtgggagctgacgccatgaccctcaccctctcagtcctgatttgcctcgggctgagtgtgggccccaggacctgcgtgcaggcaggcaccctccccaaacccaccctctgggctgagccagcctctgtgatagctcgggggaagcccgtgaccctctggtgtcaggggcccctggagactgaggagtaccgtctggataaggagggactcccatgggcccggaagagacagaacccactggagcctggagccaaggccaagttccacattccatccacggtgtatgacagtgcagggcgataccgctgctactatgagacccctgcaggctggtcagagcccagtgaccccctggagctggtggcgacaggattctatgcagaacccactcttttagccctgccgagtcctgtggtggcctcaggaggaaatgtgaccctccagtgtgatacactggacggacttctcacgtttgttcttgttgaggaagaacagaagctccccaggaccctgtactcacagaagctccccaaagggccatcccaggccctgttccctgtgggtcccgtgacccccagctgcaggtggaggttcagatgctattactattacaggaaaaaccctcaggtgtggtcgaaccccagtgacctcctggagattctggtcccaggcgtgtctaggaagccctccctcctgatcccgcagggctctgtcgtggcccgcggaggcagcctgaccctgcagtgtcgctctgatgtcggctatgacatattcgttctgtacaaggagggggaacatgacctcgtccagggctctggccagcagccccaggctgggctctcccaggccaacttcaccctgggccctgtgagccgctcccacgggggccagtacagatgctacggtgcacacaacctctcccctaggtggtcggcccccagcgaccccctggacatcctgatcgcaggactgatccctgacatacccgccctctcggtgcagccgggccccaaggtggcctcaggagagaacgtgaccctgctgtgtcagtcatggcatcagatagacactttctttttgaccaaggagggggcagcccatcccccgctgtgtctaaagtcaaagtaccagtcttatagacaccaggctgaattctccatgagtcctgtgacctcagcccagggtggaacctaccgatgctacagcgcaatcaggtcctacccctacctgctgtccagccctagttacccccaggagctcgtggtctcaggaccctctggggatcccagcctctcacctacaggctccacccccacacctggccctgaggaccagcccctcacccccacggggttggatccccagagtggtctgggaaggcacctgggggttgtgactggggtctcagtggccttcgtcctgctgctgttcctcctcctcttcctcctcctccgacatcggcatcagagcaaacacaggacatcggcccatttctaccgtcctgcaggggctgcggggccagagcccaaggaccagggcctgcagaagagggccagcccagttgctgacatccaggaggaaattctcaatgctgccgtgaaggacacacagcccaaggacggggtggagatggatgctcgggctgctgcatctgaagcccccccaggatgtgacctacgcccagctgcacagcttgaccctcagacgggaggcaactgagcctcctccatccccaggaaagggaacctccagctgaacccagcatctacgcccccctggccatccacttagcccacgggggacccagatctcatactcaacagaaggagactcagagactccagaaggcacgggagctgcccccagtggacaccaatgaaccccagccagcctgggacccctaacaaagaccaccaggggcatcctggggaactctggggacttcacttagatttttgcagttcaaagatgacttaattattcctttgcattttttgaaattgaagccacagacttctcaataaatcaatgagctgagaaaactga

SEQ ID NO: 125548 - DNA, 2263 bp, Homo sapiens
tctctgtcctgccagcactgagggctcatccctctgcagagcgcggggtcaccggaaggagacgccatgacgcccgccctcacagccctgctctgccttgggctgagtctgggccccaggacccgcgtgcaggcagggcccttccccaaacccaccctctgggctgagccaggctctgtgatcagctgggggagccccgtgaccatctggtgtcaggggagcctggaggcccaggagtaccaactggataaagagggaagcccagagcccttggacagaaataacccactggaacccaagaacaaggccagattctccatcccatccatgacacagcaccatgcagggagataccgctgccactattacagctctgcaggctggtcagagcccagcgaccccctggagctggtgatgacaggagcctatagcaaacccaccctctcagccctgcccagccctgtggtggcctcaggggggaatatgaccctccgatgtggctcacagaagagatatcaccattttgttctgatgaaggaaggagaacaccagctcccccggaccctggactcacagcagctccacagtggggggttccaggccctgttccctgtgggccccgtgaaccccagccacaggtggaggttcacatgctattactattatatgaacaccccccgggtgtggtcccaccccagtgaccccctggagattctgccctcaggcgtgtctaggaagccctccctcctgaccctgcagggccctgtcctggcccctgggcagagtctgaccctccagtgtggctctgatgtcggctacgacagatttgttctgtataaggagggggaacgtgacttcctccagcgccctggccagcagccccaggctgggctctcccaggccaacttcaccctgggccctgtgagcccctccaatgggggccagtacaggtgctacggtgcacacaacctctcctccgagtggtcggcccccagcgaccccctgaacatcctgatggcaggacagatctatgacaccgtctccctgtcagcacagccgggccccacagtggcctcaggagagaacgtgaccctgctgtgtcagtcatggtggcagtttgacactttccttctgaccaaagaaggggcagcccatcccccactgcgtctgagatcaatgtacggagctcataagtaccaggctgaattccccatgagtcctgtgacctcagcccacgcggggacctacaggtgctacggctcacgcagctccaacccctacctgctgtctcaccccagtgagcccctggagctcgtggtctcaggacactctggaggctccagcctcccacccacagggccgccctccacacctggtctgggaagatacctggaggttttgattggggtctcggtggccttcgtcctgctgctcttcctcctcctcttcctcctcctccgacgtcagcgtcacagcaaacacaggacatctgggctgagactctgtccatcttcacccagaccagagaaagactgatttccagcgtcctgcaggggctgcggagacagagcccaaggacaggggcctgctgaggaggtccagcccagctgctgacgtccaggaagaaaacctctatgctgccgtgaaggacacacagtctgaggacggggtggagatttacactcggcagagcccacacgatgaagacccccaggcagtgacgtatgccgaggtgaaacactccagacctaggagagaaatggcctctcctccttccccactgtctggggaattcctggacacaaaggacagacaggcggaagaggacaggcagatggacactgaggctgctgcatctgaagccccccaggatgtgacctacgcccagctgcacagcttgaccctcagacgggaggcaactgagcctcctccatcccaggaagggccctctccagctgtgcccagcatctacgccactctggccatccactagcccagggggggacgcagaccccacactcagcagaaggagactcaggactgctgaaggcacgggagctgcccccagtggacaccagtgaaccccagtcagcctggacccctaacacagaccatgaggagacgctgggaacttgtgggactcacctgactcaaagatgactaatatcggcccattttggaaataaagcaacagacttctcaacaatcaatgagttaataacaaaaaaacaaaaaacaaaaacagacgtaaaggccgggtgtg

SEQ ID NO: 125549 - DNA, 1821 bp, Homo sapiens
atggaattcctgttttatttcttgattcgacaagcacttatagagcacatctcaggatcaggtgctaggaaccaagcccacagagccttgcctgatggtcttcaggagagccaggagaggccagttgtcacgtgcctgaaacatgaggacttcgagttggctttccttctcttgaccaagggcgcagaccaccgtgctatttctctcacggaaggtgatactcatttgcatgcagcactccacatctttctagagattaaaggacagcaatgggaacacgctgatgcacatcctcttccagaagggcatgctaaagcgcgtgaagaagctgttagacctgctggtgaacttgtgcctgatgataacagggggaaggagggcaatgatgatcaggatgactggagcacgcaggagattgaggcctgcctccaggacttcgataacatgacctgggagatcgagtgcacttcagaaatgctgaagaagctgtctagtaagaagctgaaaggtatcaataaaggccaagtgtcagctaacatgaaaattcaaaagcgtatacctcgctgctatgtggaggacacagaggccgagaagggcagggagcatgtcaatcctgagtactttcccccagccagtgcagtggagacagaatataacatcatgaagttccacagcttcagcaccaacatggcctttaacatcctcaatgacacgacagccacagtggagtaccccttccgggtgggtgagcttgagtacgcggtgatcgacctcaatcccaggccactggagcccatcatccttattgggcgaagtggcactgggaagacaacctgctgcttgtacagattgtggaagaaattccacgtttactgggaaaaagctgagcaggcaggaagcccattgctggccaaacagctgcttcttctgcttgatgcttctctgcccaaaccattttttctgagaaacgaagatggaagcttgaaaagaaccatcataggatggtctgcacaggaagagtcaaccattcctagttggcaagaggatgaagaggaggctgaggtggatggggactacagtgaggaggataaagctgtagaaatgcgtacgggtgacagtgacccccggtcaggattcttaagaaatctggtgcagatcccctttgtggaggtgataatgaaggggaagaaggaagggggagcaggagttgacccagctgctgagaaagaagatctggatattgtatgtgaaaggttcactactagtaaactgcagtcctttgaggatttagccagtatttctacctatggctttcgaggtgagaagcacaacaagaagggcctaaagaagatgcaggccaacaatgccaaggccatgagtgcacgtgccgaggctatcaaggccctcgtaaagcccaaggaggttaagcccaagatcccaaagggtgtcagccgcaagctcgatcgacttgcctacattgcccatcccaagcttgggaagcgtgctcgtgcccgtattgccaaggggctcaggctgtgccggccaaaggccaaggccaaggatcaaaccaaggcccaggctgcagctccaccttcagttccagctcaggctcccaaagacaaggatacgtcaaatatttttatttccaacaggaaaaggggctgtgactttaccaaaaaagagactaacatcccaaaagtgctgaccatatccatggccccatcattaatgtcactgtactctgtaacacgtaaccaaaccacaaagccccccagcaggcataaaaacctcacaaaaggacagctggagcccctctactga

SEQ ID NO: 125550 - DNA, 931 bp, Homo sapiens
ggattcgctgttcctcggtcgacccacgcgtccgcccacgcgtccgaggcgcttcgggagccgcggcttattgttgcagacatgtttcaattccaagagaccacaccacacacaaccagtcccgaaaatggcacagaaatggtatcaagaaaccccgatcacaaagatacgaatctcttaagggggtggaccccaagttcctgaggaacatgcgctttgccaagaagcacaacacaaagggcctaaagaagatgcaggccaacaattgccaaggccatgagtgcacgtgccgaggctatcaaggccctcgtaaagcccaaggaggttaagcccaagatcccaaagggtggtcagcccataaacttgattcgacttgcctacattgcccacccccaagcttgggaagcgtgctcgtgcccgtatttgccaaggggctcaagctgtgccggcccaaaggccaaagccaaggccaaggccaaggccaaggatcaaaccaaggcccaggctgcagccccagcttcagttccagctcaggctcccaaacgtacccaggcccctacaaaggcttcagagtagatatctctatctgccaacgtgaggacagaaggactggtgcgaccccccacccccgcccctgggctaccatctgcatggggctgtggggctggggtcctcctgtgctatttgtacaaagaaacctcaggcagggaaaaaaaaattcatcctaagcttcccttggtaaaatgacaggcattcatgcagcttaaaggttctggaaaactgattttcttccatgatggtactactccacagtctagacaaaatgcagccatcaacatgaaaaactgctgcttgattttttttcctccaacatgttttaaacagagctgcagatgctcaagacgaaatcgtcgaccgggaattcggactg

SEQ ID NO: 125551 - DNA, 554 bp, Homo sapiens
  misc_feature (1)...(554): n = a,t,c or g
gcagcctgcacctcagcgagcgcgccgactggcaatactcgcagcgggctggaacgccgtcgaggtcttcttctcgcgcacggcccgggacaaccggctcggctgcatgttcgtgcgctgcgcgccctccagccgctacacgctgctcttctcgcacggcaacgccgtggacctgggccagatgtgcagcttctacattggcctcggctcccgcatcaactgcaacatcttctcctacgactactcgggatacggcgtcagctcgggcaagccctccgagaagaacctctacgccgacatcgacgccgcgtggcaagcgctgcgcaccccggtatggcgtgagtcccgagaacattatcctctatggtcagagcattgggactgtccccacggtagacttggcctcgaggtatgaatgcgcagcggtaattctccattcccctctgatgtctggtttgcgtgtggcttttccggatacaggaaacatactgctttgatgctttcccagattnacaagatatctaagtcactctcctgtgttggtcattcatggt

SEQ ID NO: 125552 - DNA, 1782 bp, Homo sapiens
atgaaaagtggattttatatgacagccagcaacgaccagctcattgattggattgagaagaagctccaagcacttcccaaagccaaaattgcaccaaaaaaaggacatgctcactgtttggtggtctgctgcaggtatggcgtgagtcccgagaacattatcctctatggtcagagcattgggactgtccccacggtagacttggcctcgaggtatgaatgcgcagcggtaattctccattcccctctgatgtctggtttgcgtgtggcttttccggataccaggaaaacatactgctttgatgctttccccaggaacttacagttcagcactcgctcattcattcagagacacttcttgttaaacttgagctgtaacaatatgtgtgatggggcaactagtggtgtagacactcaaaaacttcaagcaagcacagtttggaaatttctcttacttttcagttggacagaacaggacagcttcatggaacagtctttcctttatccgttgatttgtcctgccagtaaaagcttatttgatccagttaccagtgtggaagatgacaggaatgagataaagctagcacagtgggaattcagccagacatttgatctgaccatctgggcaaacttcacagattccatcttagcagaccaggcctggggtggccctaaatccggggaagttttatgtggcgctgaacacttgcgtttcccaggggcgttttccctagctcccggaaacccagtagatgacactgcctcatgcttcattcacagtgaaaggcagacgctttcaggcacaaatatcaccacttctattcctcagggttcctgcttttcccgcctggaacagctgaaactctccccggaccatgagatcccatgggagtggagcaagggccaaggaactggagctgtggtagcccagctggagcatgaatgtccaggtttacagagatctgcccgaacctcagctgtggcgtggaggtctgtggcagaaaacgccccaacgccttgtgtctgggaagagagcgcacgactttcccggagacccagggccacataccccgagtggaggaagtggctgggagctgtccatggtgaaattcaggaagccaatccaagtgtgcccggagggaagtggttctctgaatctgccctcttgacaacacagctcattccatcctcctgcattttacatcaggcacagaaggatccacataagagagattcacacccacccacaattgccctagagaaggaaggggagagacagagagcctttacttatgtaccacggagcttcagagttaagccaggtctcacggtgaagacagcagaaccagatggagtaggggctcaaggaacagaaagttcaggctggaggtcatatcgaagatggataagaggagactatggtggaaaagaatactataaggaacctagagagaccaatttgaggttattagtaaattcaggcaagaaacgaggaatacctgaaaaagttgggggcagtggctgccagctcttcgagagcaggaaccatgtattcaactgccttctcagtgactcattcagggcctgcctcatagaagatgatcaaaaacttgtactcaacttattttctgcttccgattgtggcggactggtgtccttacaagaagaggaagagacacaaggggtgggcacagagaaaagaccatgtgagagcacagcaaaaagcaccagctgcaagccaggaagaccagactcaccagaaacccatctgccagcaccgtga

SEQ ID NO: 125553 - DNA, 1065 bp, Homo sapiens
  misc_feature (1)...(1065): n = a,t,c or g
atggatgatgatattgctgcgctcgttgttgacaacagctctggcatgtgcaaggccggcttcgcgggtgacgatgtcccctgggccatcttcccttccatcgtggggtgcaccaggcaccaggtcatgatgctgcatgtggctcccgaggagcaccctgtgctgctgaccgaggcccccctgaaccccaaagccaactgtgagaagatgacccagatcatgtttgagaccttcaacaccccagccatgtatgtggccatccaggccatgctgtccctgtacgcctccgtccgtaccgcccatgtacaagggcttcacaccacggccgagcgggaaatcgtgcgtgacatcaagaagctgtgctacgtcgccctggacttcgagcgggagatggccatggtggcctccagctcctccctggagaagagctacaagctgctcgatggccaggtcatcaccatcggcaacgagcggttccactgccccgaggcgctcttccagccttccttcctgggcatggaatcctgtggcatccacaaaactaccttcaactacatcatgaagtgtgacgtggacatctgcaaagacctgtacaccaacacagtgctgtctggcggcaccaccatgtaccctggcatcaccaacaggatgcagaagaagatcaccgccctagcacccagcatgatgaagatcaagatcattgctcctcccgagcgcaagtactccgtgtggatcagcggctccatcctggcctcgctgtctaccttccagcagatgtggatcagcaagcagaagtatgaccagtccggcccctccatcgtccaccgcaaatgcttctaggcggactatgacttagttgcgttacaccctttcttgacaaaacctaacttgcgcagaaaacaagatgagattggcatggcnnnnnnnnnnnnnnnnnnnnnnnnnnnggnnnnnnnnnnnnnngggctggccccaggattaaaaaccggaaccgggaagggggacaccacccgttggaggggaccttccccaaaagtaaaaatggggcccggggcttttattggg

SEQ ID NO: 125554 - DNA, 1175 bp, Homo sapiens
ccgagcgcggctacagcttcaccaccacggccgagcgggatatcgtgcgtgacattaaggagaagctgtgctacgtcgcccctggacttcgagcaagagatggccacggctgcttccagctcctccctggaggagagctacgaagctgcctgacggccaggtcatcaccattggcaatgagccggttccgctgccctgaggcactcttccagccttccttcctgggcatggagtcctgtggcatccacgaaactaccttcagactccatcatgaaagtgtgacgtggacatccgcaaagacctgtacgccaacacagtgctgtctggcggcaccaccatgtaaccctggatttgctgacaggatgcagaaggagatcactgccctggcacccagcacaatgaagatcaagatcattgctcctcctgagcgcaagtactccgtgtggatcggcggctccatcctgggcctcgctgtccacctttccagcagatgtggatcagcaagcaggagtatgacggagtccggcccctccattcgtccaccgcaaatgcttctagggcggactattgactttagttgcgtttacaccctttctttgacaaaaacctaactttgcggcagaaaacaagattgagatttggcatgggtttatttgtttttgtttgttttgttttggttttttttttttttttttgggttgaattcaggatttaaaaactgggaacgggtgaaggtgacagcagtcggttggagcgagcatcccccaaagttcacaatgtggccgaggactttgattgcacattgttgtttttttaatagtcattccaaatatgagatgcgttgttacaggaagtcccttgccatcctaaaagccaccccacttctctctaaggagaatggcccagtcctctcccaagtccacacaggggaggtgatagcattgctttcgtgtaaattatgtaatgcaaaatttttttaatcttcgccttaatacttttttattttgttttattttgaatgatgagccttcgtgcccccccttcccccttttttgtcccccaacttgagatgtatgaaggcttttggtctccctgggagtgggtggaggcagccagggcttacctgtacactgacttgagaccagttgaataaaagtgcacaccttaaaaaaaaa

SEQ ID NO: 125555 - DNA, 1191 bp, Homo sapiens
atggaggctgaaaggctgcgactcctcgaggaagaggccaagctgaaaaaggtagccagaatgggatttaatgcatcttccatgctccgaaaaagccagctaggtttcctcaacgtcaccagttactcccgtttagccaacgagctgcgtgtgagctgcatggagcggaaaaaggtccaaattcggagcttggatccctcctctttggcgagcgaccgatttaacttcattctggcgagtaccaacagcgaccagctcttcgtagtgaaccaggtcgaagtcgaaggctccaagtacggcatcatcagtctgcgaactctgaagatcccttcgttccacgtgtacgtgctcagaaacctctacgtccccaaccggaaggtgaagtccctgtgctgggcctcgctgaaccagttggactctcacgttctgctgtgcttcgagggaatcacagatgctccaagctgtgcagtgctgctcccagcgtcgcggttcttaagtgttcacacaagagttaaccagcctggcatgctctgcagtttccagatcccagaggcctggtcctgtgcgtggtccctcaacacccgggcatatcactgctttagtgcaggcttgtctcagcaggtcctgttgaccagcgtggcgacgggacaccagcagtcatttgataccagcagtgatgtcttggcccagcagtttgctagtacggctcctttgctgtttaatggctgtcgctccggggagatctttgccattgatctgcgttgtagaaatcgaggcaaggggtggagggccactcgcctgttccatgactcagcagtgacctctgtgcaaatcctccaagaagagcaatgcctgatggcatcagacatgactggaaagatcaagctgtgggatctgagggccactaaatgtgtaaggcagtacgaaggtcacgtgaatgagtccgcctatctgcccctgcatgtgcacgaggaagagggaatcgtggtggcagtgggccaggactgctacacgagaatctggagcctccatgatgcccacctgctcagaaccatcccttccccgtactctgcctccgaggacgacattcccagcgtggccttcgcttctcggctcgggggcatccggggagcagcaccagggctgctcatggctgtccggcaggacctttattgtttccccttcagctaa

SEQ ID NO: 125556 - DNA, 1368 bp, Homo sapiens
atcatgaaagaagtccggcgagcgctctgcaacgcagccacagacgacagcaaactgctgctcctcagcgcagtggggagcgtgttctgcagcggcctggattattcctacctaattggccggttgtccagcgaccggcgaaaggagagcactcggattgcagaagccatcagggactttgtgaaggcctttatccagtttaagaagcctatcgtggtggccatcaatgggccggccctgggcctgggtgcctccatcctgcccctctgtgacatcgtgtgggccagtgagaaggcctggttccagacgccctacgccaccatccgcctcacgcctgctggctgctcctcctacaccttcccccagatcctgggcgtcgcgctggccaatgagatgctgttctgtgggcggaagctcaccgcccaggaggcctgcagcagggggctggtgtcgcaggtcttctggcccaccacgttcagccaggaggtcatgctgcgggtcaaggagatggcatcctgcagtgccgtggtgttagaggagtccaaatgcctcgtgcggagcttcctgaaatcagtgctggaagacgtgaacgagaaggaatgcctcatgctcaagcagctctggagctcctccaaaggccttgactcccttttcagctacctgcaggacaaaatttatgaagtctgaggggccccagctcacgggcccccaacttccagctctgccctgtgtttcggaaaccagagcacagtgtctgccccggccaaggagtttgtcaaggtgtctctttatacgtagggttgtgtccatttcctcgtgtcctttggttgctcctccttggtttgattttgtgtaatggatggaaaacgcagcatacttggcctcccccacctccctgcccttcctggccagagagctgtccaaggctgtatcttcccaggggctccgccaagcaccgttgttcctttccccatttgctgaaatgcaccatgacggtccaggaaggggaagaccactttcacattcttctgactcaggctgtgtctacacagtgcctctgacttggagacttggccatcatggctctctctggttgtatttagatcgggtgtcagaggacgaccaatcttagggaatttccagaccaatgagcaaaatgattgtgcacacctggcctcagtctcctttccgacgcaaatctgtgtgactattagggcttggtcttaaaacccaattgagtgatttgcaaacccagatattctacatttagaaatgttttgttaaatatatatttttaaaacaatgtaagtggaaattctgataatttatgtgtattatatgtaaagctagttttgcaaaaacaaaaaa

SEQ ID NO: 125557 - DNA, 1401 bp, Homo sapiens
atggagccatggccctgctccccgggcggcggcggcgggacccgcgcccggcacgtcatcatcaacgtgggcggctgccgcgtgcgcctggcatgggccgcgctggcgcgatgccccctcgcgcgcctggagcgcctgcgcgcctgccgcggccacgacgacctgctgcgcgtgtgtgacgactacgacgtgagccgcgacgagttcttcttcgaccgcagcccgtgcgccttccgcgccatcgtggcgcttttgcgcgcagggaagctgcgactgctgcggggcccgtgcgcgctggccttccgcgacgagctggcctactggggcatcgacgaggcgcgcctggagcgctgctgcctgcgccgcctgcgccgccgcgaggaggaggcggccgaggcccgcgcggggccgacggagcgcggggcgcaggggagcccggcgcgcgccctgggacctcgggggcggctgcagcgcggccggcggcgcctgcgcgacgtggtggacaacccgcactcggggctggcgggcaagctcttcgcctgcgtgtccgtgtccttcgtggccgtcacggccgtgggcctctgcctgagcaccatgccggacatccgcgccgaggaggagcggggcgagtgctcccccaagtgccgcagcctgttcgtgctggagaccgtgtgcgtggcctggttctccttcgagttcctgctgcgctccctgcaggccgagagcaagtgcgccttcctgcgcgcgccactcaacatcattgacatcctggcgctcctgccgttctacgtgtcgctgctgctggggctggcggcaggcccgggcgggaccaagctcctggagcgcgcggggctggtgctgcggctgctgcgtgcgctgcgcgtgctctacgtgatgcgcctggcgcgccactcgctggggctgcgttcgctgggcctgaccatgcgccgctgcgcgcgcgagttcgggctgctgctgctgttcctctgcgtggccatggcgctcttcgcgccactggtgcacctggccgagcgcgagctgggcgcgcgccgcgacttctccagcgtgcccgccagctattggtgggccgtcatctccatgaccaccgtgggctacggcgacatggtcccgcgcagcctgcccgggcaggtggtggcgctcagcagcatcctcagcggcatcctgctcatggccttcccggtcacctccatcttccacaccttttcgcgctcctactccgagctcaaggagcagcagcagcgcgcggccagccccgagccggccctgcaggaggacagcacgcactcggccacagccaccgaggacagctcgcagggccccgacagcgcgggcctggccgacgactccgcggatgcgctgtgggtgcgggcagggcgctga

SEQ ID NO: 125558 - DNA, 1242 bp, Homo sapiens
ccttcagagaaaggtgggtagaggtgggtgcctctcccaccttacctgtgggtaggaagggggctgcatctctcaagccagaaacctgaagcaggcaccgagtgctccctgtctgagcctgggtggaagggcagagatatgttcctgagaattcccagcaatctgggggggattcgcacttccttgcagcaggagctctgggttactttgctggttgaagaggaaaagaatttggcccatttaggttcccaccaaattaccacccattcccgttctcagtccttcaaggagggcccccagctttgcagcccccaaccatggctggattcccgtcctccgtccccatcccttgaacctgagaccacagaccccaccctgacagtagagggcagaagctgccaggagagcctgctcagagcacagaacatcgtggagcagcccagggctgtggagcagagtctgaagggcgagtgctcccccaagtgccgcagcctgttcgtgctggagaccgtgtgcgtggcctggttctccttcgagttcctgctgcgctccctgcaggccgagagcaagtgcgccttcctgcgcgcgccactcaacatcattgacatcctggcgctcctgccgttctacgtgtcgctgctgctggggctggcggcaggcccgggcgggaccaagctcctggagcgcgcggggctggtgctgcggctgctgcgtgcgctgcgcgtgctctacgtgatgcgcctggcgcgccactcgctggggctgcgttcgctgggcctgaccatgcgccgctgcgcgcgcgagttcgggctgctgctgctgttcctctgcgtggccatggcgctcttcgcgccactggtgcacctggccgagcgcgagctgggcgcgcgccgcgacttctccagcgtgcccgccagctattggtgggccgtcatctccatgaccaccgtgggctacggcgacatggtcccgcgcagcctgcccgggcaggtggtggcgctcagcagcatcctcagcggcatcctgctcatggccttcccggtcacctccatcttccacaccttttcgcgctcctactccgagctcaaggagcagcagcagcgcgcggccagccccgagccggccctgcaggaggacagcacgcactcggccacagccaccgaggacagctcgcagggccccgacagcgcgggcctggccgacgactccgcggatgcgctgtgggtgcgggcagggcgctga

SEQ ID NO: 125559 - DNA, 1104 bp, Homo sapiens
tcatgctggtgactgcatctgagcttttccatcactgctctgtgttgtctctaaaatccagtccatgtactcagcgactttggtgtagacaccaggttgctccctgcgggcacagccttcaccccagctggtgatgcccaccaaacgccacattccgttgtgtttgcaaactaagggaccacctgaatctcccttacaagcatcttttcccccttctttatagccagcacagaccatccgttgggttattttataatcttgatatcttttctggcattcttcatttgttaccaaaggaatatttaccttttgtagaatattttggatttcacctttctccttcgagaagccccatccggttacccaacagttggtataaattgtgcttgtgtcacctttggaaggtaggcatattggtttttggaattcagtgtaattcaaaggagcctggagttttatcaaggcgatatcatgattcccttctgagactttatagttttggtgaataataatctcttttatttgtgagaaaggtgtatcttttgtaatgtctgacagatttaaaatgccactatagatgcgccaaacatcctgcaggggaagccgggccttagctgccttcccgccgggcagggctcgggacctgcagcccgccatgcctgagcctcccacccgcttcacgggctcctgtgcggcccgagcctctccgatgagcgccgccccctgctccacggcgcccagtcccatcgaccacccaagggcaatcagcgccgtcaaaacagaccattcagctctaccaatcagcaggatgtgggtggggccggataagagaataaaagcaggctgcggagccagcagtggcaacccgctggggtccccttccacagtgtggaagctttgttctttcattctttgcaataaatcttgctgctgctcactctttgggtccacgctgcttttatgagctgtaacactcaccgcgaaggtctgcagcttctctccagaaggaagaaactccgaacacatccgaatatcagaaggaacagactccagacgcgccaccttaagagctttaacactcaccgcgagggtccgcggcttcat

SEQ ID NO: 125560 - DNA, 3018 bp, Homo sapiens
atggcccccacagctatggtacagcaagcagcatcaccaaagctgctgagagataaggaacctggaaagctagcatgccggcaaaaggcttatgaaattgcactaaacatgatgaaaaatacacaagaacttcaagatcactttttcctgaagggaagaactgctcacatggccatgattatcacacagtgttttaaggagataatcacaacgcctgagctcactgcaaaagcaacaggagtgtcacgtcaggccattaactcacgttcagctttcaagcccttacgtaaagaaccattcccatggcgtgaatcacccacaacgagcaggtcaggggcaggtgaaggcggaagttcacatcctaagactttcctgaagcggcaggctcttccacacagaaaccaaccgcaaggccagacaaaactgctggaatggctttcaaatctgtccctttctaaccccgttccccctggacctgcagtggccggaagaggaggaggaggagggtgcgggggtgaggaagcagagccgcgcgttccccggggctgggaggaaggcggaccgcgcctgggccccgcgggctggcagacaccaggaaggggccgcagaggagcgtggtggcggagtccagacccggggcctcgtgctctcgctggggcgccgcggctcagctttctggctctctccccgggtgcgagcacgcctccactccggaactgcatttggaggaccgggtcatcccaggctgaggaaagccatcgtccctcacctcgacttcgactaggacggctgccttcccgtggagcagcgctcgggacctgcaagcccgccatgcctgagcctcccaccccctccgtgggctcctgtgccgccggaggctccccaacaagtgtcgctccctgctccatggcacccagtcccatcgaccacccaagggctgaggagtgtgggctcacagcgtgggattggcaggcagctcctgtgcagccccagtgcgagacccactgggtgaaaccagctgggctcctgagtctagtgggaacttggagaacctttatgtctagctcagggattgtaaatacaccaattggcactctgtatctagctcaagactcatttggaagcagtgcatttttatcagagggactgaaaagcctttcgagaatcagtcaagaaaaaggaatgcgcatgagagtcatgaccccaccttcaaggtttgcttcaccagggaaactcaactgcccctggtctgtgatcccaaggggtcaggccactttaggctggaacttcctccactgcccacctgtgagtcaacaaaagaagccaagagctttaccctcagacgtaggccagcatgctgaaagcccgtcttcctgccctagtgtgtctggaattggtgggttcttggtctcactgactttaacaatgaagccgcggaccctcgcggtgagtgttacagctcttaaggtggtgcgtctggagcttgttccttctgatgttcagatgtgttcggagtttcttccttctggagtgaagctgcagacctttgcggggagtgttacagctcttaaggcagtgcgtctggagtttttcattcctcccggtgggctcgtggtcgcgctggcttcagaagtgaagctacagaccttcgtggtgagtgttacagctcataaaagcagtgtggacccaaagccccttgggtggtcgatgggactgggcgccatggagcagggggtggcactcgtcggggaggctcgggctgcacaggagcccacggagggtatgggaggctcaggcatggcggctgcaggtcccgagccctgccccacgggaaggcagctaaggacaggcgaggaattgagcgcagcgccgaaagtcctgtctgagtacattgagagtgctataacaagttaccataaactgggaaattataaacaacagaaatttatttctcacagtttgaagtctggaaagtccaagattgaggtgctggcagatttgcctactcaacgtgaagatgatgagcctcataactttgtgagaatgtataaagaatgcctttcatgttggttggaatctggcatacctaatttaggtgtctggccaaaaagaatacatactacagcagaaaaatatagagaatatgaagcccgggagcaaacagatcaaactcaagtccaggagttacacagatctcaagatagagattttgaaactatggctaaattacatattccagtaatggtggatgaagttgttcattgtttgtcaccacaaaaaggacagatttttctagatatgacatttggttcgggagggcacacaaaagccattctgcagaaggagtcagatattgttctctatgccttggacagagacccaacagcttatgcattagctgaacatctttcagagttgtatcctaaacaaatccgagctatgctgggccagttcagccaggcagaagccttattaatgaaagctggagtgcagccaggaacttttgatggagttcttatggatcttgggtgttcctccatgcaacttgatactcctgaaagaggttcttcccttcggaaagatggccctttggacataagaatggatgacttactacagcaatctacctatattgccaccaagactttccaggctcttcgcatatttgtgaacaatgagctcaatgaactctacacgggactgaagacagctcagaagtttctgagacttggtggtcgtcttgttgccctctccttccattcactagaggatcgcatcgtcaaaagatttttgcttggaataagcatgacagaaagatttaacctaagtgttagacaacaagtgatgaaaacatctcaattgggttcagatcatgaaaacacggaagaagtctctatgagaagagctcctttaatgtgggaactgatacacaagaaggtacttagtccacaagatcaggatgtacaagataaccccagagggcgctcagccaagcttagagcagctatcaaattataa

SEQ ID NO: 125561 - DNA, 368 bp, Homo sapiens
ttatttccttcctggacactgagaggtgacagcgtgctggcagtcctcacagccctcgctagctctctgcgcctcctctgcctgggctcccactttggcggcacttgaggagcccttcagcccgccgctgcactgtgggagcccctttctgagctggccaaggccggagcccactccctcagcccctccatgggctcctgtgcggcccgagcctccccgacgagcgccaccccctgctccacggcgcccagtcccatcgaccacccaagggctgaggagtgcgggcacacggcaccgggactggcaggcagctccacttgcagccctggtgctggatccactgggtgaagccagctgggctcctgagt

SEQ ID NO: 125562 - DNA, 819 bp, Homo sapiens; identical to SEQ ID NO: 116837

SEQ ID NO: 125563 - DNA, 444 bp, Homo sapiens; identical to SEQ ID NO: 116839

SEQ ID NO: 125564 - DNA, 597 bp, Homo sapiens
atggaggggccgagcctgaggggtcctgcgctccgcctggcggggcttcccacccagcagcatagagctgcagccaagacagtctgtgatgagcagattggagcaacactgtctggaattgatactctcaacagaaattcccttaatagtgtgggattccaaggagggaagaccccttttgttcagagtgataaatcaaggtatctcccagtgggagggacccagtacgagataattgaatcacgtggtagtttctcccatactgttcttctaccactggttctcttcactgaccacatccaactggagctaacggccttagctgccttccctcggggcagggctcgggacctgcagcccgccatgcctgagcctcccacccactccatgggctcctgtgcagcccgagcctccccaacgagcaccaccccctgctccaccgcacccagtcccatcgaccacccaagggctggggaatgtgagcgcacggcgcgggactggcaggcagctccacctgcagccctggtgtgggatccactaggtgaagccagctgggctcctgagtctggtggggacgtggagagtctttatatctag

SEQ ID NO: 125565 - DNA, 386 bp, Homo sapiens; identical to SEQ ID NO: 120294

SEQ ID NO: 125566 - DNA, 350 bp, Homo sapiens
cctgcgatcacaatcacgagggggtagatctggatttccattggtggttttcttttcggctgcaatttccttttcggcgctgtgctctgtttctcgctgggccttagctgccttcccgtggagcaaggttcgggacctgcagcccgccatgcctgagcctcccacccactccatgggctcctgtgcggccggagcctccctgacgagcaccgccccctgctccacggcgcccagtcccatcgaccacctaagggctaaggaatgcgagcgcacggcgcaggactggcaggcagctccacctgcagccctggtgcgggatccactaggtgaagccagctgggctcctgagt

SEQ ID NO: 125567 - DNA, 444 bp, Homo sapiens; identical to SEQ ID NO: 117630
  misc_feature (1)...(444): n = a,t,c or g

SEQ ID NO: 125568 - DNA, 780 bp, Homo sapiens
atgtcagagacattcatggcagccctacccatcataggcctggaggcctacgagggaaaaatggttttgtgggtgaggcccgggacccaaggtacagatcgggccattgcttcagagagtgcaggacacaagccttggtggctttcacatgatgttgatcctgtgggttcacagaagtcaagaactgaggccttagctgccttcccgcggggcagggctcaggacctgcagcccgccatgtctgagcctcccacccactccatggactcccgtgcggcccgagcctccccaacgagcaccaccccctactccacggcgcccagtcccatcgaccacccaagggctgaggaatgcaagcgcacgacgcgggactggcaggcagctccacctgcagccctggtgcgggatccactaggtgaagccagctgggctcctgagtctgctgcacgggcaggcttgtggggacccagcaactccgtccagagagcggctgagtcagccagccgtccccacggctttgggcagccgccgaaggctcctgctaggcccggctggctcaccgggaagttccctgcctccgtcccgtcagcctccaggagggcgccgccggccgccgtgacttcagcaaggcactactatctccgtcagccgccgcctcggccatcttcctgcccggagtgcaacaaaatccggctctggccagccttccagctgacgccactctgccagggccctgcagcctcggagcgggatagaaggaagccgcagaaaagacgctga

SEQ ID NO: 125569 - DNA, 1524 bp, Homo sapiens
atgcaggaaagtgtaaagaagcccattgatttcacttgtaagcacattggaggagaacagacaattgaaggactccaggtgcaagatgtgacacagagagttggatcagagggtaactttatgactgtctttcaagaagaaggcaggggccagaacaggcgatatcttcaccatgcgcacaatgaaatcaatactcagagaaggcagataattctccacgaagccagaaaactaataaatgaacaacttctactgcaatcacgtatttttgacatccttggactatattgtgtccggaattggtgggttctcggtctcactgacttgaagaatgaagccgcggaccctcgcggagtgaagctgcggaccttcacggtgagtgttgcagctcttaaggaggcgcgtctggagttgttcgttcctcccggtgggttcgtggtctcgctggcttcaggagtgaagctgcagaccttcccggtgagtgttacagctcataaaggcagtgtggacccaaagaactcaggagcccagctggcttcacccagtggatcccgcaccagggctgcaggtggagctgcctgccagtcccgcgccgtgacgcacgcactcctcagcccttgggtggtcgatgggattgggcgccgtggagcagggggcggtgctcgtcggggaggctcgggccgcacaggagcccacggggtgggcgggggctcaagcatggcggactgcaggtcccaacccctgccctgcgggaaggcagctaaggcccggcgagaaatcgagcgcagcgccgccataacatatactggctccccttctccttccaccatgattataaacttcctgaggccctcaccagatccagatgccaacattatgcttcctgaacaaccttcaggactcctcagatattcctttatagcaacaaaaatggacagacagaaaactgatacagaagagtggggcattgctataaagattcctgaaggtgtgaaagtggctttggaactgggtaatgagcagagcttagaagaatttggaggctcagaagaagacaggaagatgagggaaagtttggtacttcttagagaattgttaagttgttgtcaccaaaatgttgatagaaatatggatagtaaaggccacactgataaggtctcagatagatacaaagaattcattgggaactggagcaaaggtgtagctcaggatgctgctcctaaaggtgcaagccataacccttggcggcttccatgtgggattaagtctgcaggtgaggacacagcatccctccccactgtgggacgcagcaatgcgactgagagcagcgctatccaaacaaccaaatctgctgatgccttgatcttggacctctcagctccagaactctggcttcagactccagtatctaatggcagcacgactcctcagagagcttcagaagcaagtgggagctcagctactgaccagccctggatgtctgtgacacagtatcatgtttcaggacaacgacacaaatgctag

SEQ ID NO: 125570 - DNA, 1368 bp, Homo sapiens
atgtgggaaagtttggaacttcctagagacttgttgaatggttttgaccaaaatgctgatagtgatgtggacaatgaagtccaagctgaggtggtctcagatggagatgaggaacttactgggaactggaatgaagatcacttttgctatgctttagcaaagagactggtggcattttgcctcttccctagagatatgtggaactttaaacttgagagagatgatctgaaattggaagttatgtttaaaagggaagcagagcataaaagtttggaaaatttgcagcctgatgatgcaatagaaaaagaaaaacccatttctggggagaaattcaagccagctgcagaaatttgcataagtaataaggagccaaacattaatagccaagacaatggggaaaatatctccagggcatcttgcaatgtgcacctggaaaagccacaggccactcaataccagcccatgaaggagtttcccaaggctgtgggggcccgcccccttaatcagtgtgccctggacaatttcagagatgagctgatgaaaggaggacaatttatggaaacgaaaatgggaataaaatacctaggaatccaacttacaagggatgtgaaggacctcttcaaggagaactacaaaccactgctcaatgaaataaaagaggatacgaacaaatggaagaacattccatgctcatgggtgggaagaatcaatatcgtgaaaatggccatactgcccaagataacttgttggtcaccaaaacaatctcttgataaagcaaatcagagtttattgcttgctgtaatacgggagtacaatgtcttgaccatctcagtagcatcttacaaggatgtgatggatttcaggcatgaatttgaggatttggaggtctactttaaggccttagctgccttcccgtggggcagggctcgggacctgcagcccgccatgcctgagcctcccatcccctctgtgggctcctgtgcggcccgagcctcctcgacaagcgccaccccctgctccacggcgcccagtcccatcgaccacccaagggctgaggagtgcgggcccacggtgctggactgggagacagctccatctgcagccccggtgcaggatccactgggtgaagccagctgggctcctgagtctgctaatctggtggggaggagaacctttgtgtctagctcagggattgtaaaggcaccaatcagcactctgtcaaaacagaccactcagctctaccaatcagcaggatgtgggtggggccagcttggattaattcagatgtggaataacaatgaaacaaaaccacctaagcgaaaaaagaggatttatctcaaatttagatttgtggaacaaggtgattga

SEQ ID NO: 125571 - DNA, 654 bp, Homo sapiens; identical to SEQ ID NO: 116005

SEQ ID NO: 125572 - DNA, 795 bp, Homo sapiens
atgcgcgcggcagggagggcgtttccaggagggagcggcctttgctcagcgcgagacggctgggcgccgagtgggacagcgctggtgcggagactgcttccggactccaggtaccgcgcttggcggcagctggccccagacttctgtcttttcagctgcagtgaaggctcggggctgcagagtcagttgctcctctccacggattttaagctcctggaggaaggaactgcggcctatgcatctccatattgcgaattgcagtctgctcagggcttggtctggtggacacagtcaggacagcccatgcacagggcatggcggtttctcgggcttatcatccacttcttggtattggtcattcttggtactggcccatactgtgagccacagcaaacagaggcccctcaaccactggagagctggctggggaagccaggagtaggaaattcaggggcccgcttcctgagtccagtgacgtccctgaaacctgacaagcatatcgaatttgatcaaaaagaagcctggggacttcttggcagggcttgggacctgcagcccgccatgcctgagcctctccagccctccgtgggctcctgtgtggcccgagcctccccaacgagcaccgccccctgctccacggcgcccagtcccatcaaccacccaagggctgaggagtatgggcacacggtgcaggactggcaggcagctccacctgcagccctggtgcaggatccactgggtgaagccagctgggctcctgagtctggtggggaggtggagaacctttatgtctag

SEQ ID NO: 125573 - DNA, 936 bp, Homo sapiens
tcactctattaaatcttggaactgcacacttttctggtccgtgtttgttagggctcgagctgagctttcgcttgctgtccaccactgctgtttgctgccgtcgcagacccgcagctgacttctacccctccggatccagcagggtgtctgctgcactcctgatccagtgaggcgcacattgccactcccaatcgggctaaaggcttgccattgttcctgcacggtggttttaatcattgtctgaagacgagctggagtgtactgattttcagtgaaggcattctgggtacctgatatggtttggttctgtgtccccacccaaatctcatcttgaattgtattcccataattcccatgtgttgttggggggactgaaagtctttccgggggcctggaagctggtgggggatgaataactcctcctttctcaggcccagtccaagggacaaggccaattgtgccagcagcgtgcgtcagcaagatagcagaagcaggaagagagctggccagaagacacgtatccccgggccttagctgccttcccgcggggcagggctcgggacctgcagcccgccatgcctgagcctcccaccctctccatgggctcctgtgcgcccgagcctccccgaggagcgccaccccctgctccacggcgccgaatcccatcgaccacccaagggctgaggagttcgggcgcagggcgccggacttgcaggcagctccacctgcagcccaggtgcaggatccactgggtgaagccagctgggctcctgagtctgtggcttttccaaatgcacagtgcaagctgttggtggaactaccactctggggcctggaggatggtggccctcttctcatggctccactaggaatgccccagtggggaatctggggctccaatcctacattttccctttgcactaccctagtagacat

SEQ ID NO: 125574 - DNA, 810 bp, Homo sapiens
atggcaggagtgaagctgcggaccttcgcggtgagtgttacagctcttaaggcggcacgtctggagttgttcgttcccccccggggtcgtggtctcgctggctttagcagtgaagctgcagacctttgtgactcaggagcccagctggcttcacccagtggatcccgcaccagggctgcaggtggagctgcctgccagtcccctgcagtgcacccgcacttctcagcccttgggtggtcgatgggactgggcgccgtggagcagggggcggcgctcatcggggaggctggggccgcacaggagcccatggagggggtaggaggctcaggcatggcgggctgcaggtcccgagccatgccccgcgggaaggcagctaaggccctgcgagaaatcgagcgaagcgccgctttccacactgtactttttaggaagaagtcactgtgtgtagcccacaaaaaaggggtggagattgaaatttcacctcctagacaggaagcttcacttgattttatttccatggacttattatccaaggatgttgcttctgctgaatcatgctggtataaaaatcttgtcctagaggtggcatgcatgcagtggtttcatggagaccatacaatgcttgagatgattgagaaaaagcgttgcttgtgcaaggaaataaaggctagacagaaaacggaaaagggcctttgcaaacaggatagcatgcctatcttgcccagctggaagaagaatgcaggtgccaagaagtacagccctccaccgtattctaaacagcaaacggtattctgggatactgccatatga

SEQ ID NO: 125575 - DNA, 3342 bp, Homo sapiens; identical to SEQ ID NO: 117636

SEQ ID NO: 125576 - DNA, 901 bp, Homo sapiens
tggctcagaacctgagaacttgtttgacatattctgatattctgtaatttttccattcccttcttcacaatgtggtgaacaaaaactaccaaatgagtagcgtgccttagctgccttcccgcggggcagggctcgggacctgtagcccgccatgcctgagcctcccacccactccatgggctcctgtgcggcccgagcctccccaaggagcaccaccccctgctccacggcgcccagtcccatcgaccacccaagggctgaggagtgcgagcgcacggcacgggactggcaggcagctccacctgcagccctggtgcgggatccactgggtgaagctagctgggctcctgagtctggtggggagccaacaccttcggggccaggggtcgcgggcagcggcagcactcacacacatgcactcacacacgcatgcacacatgcacacacacgcgccgagccccttcggcttcctcctcctcctcgtcctcttcctccacctctttctccacctcccctgcgcctctgctgccttcgaagcctttttccttgtccactgacagaatcagcagcaaaagcaggcagcaaaaagttccattcggtccaagagatcccgagccccgcggtgtgcgagctgggagttggaaccgtactacacattgatccggagaagtggagggctggaagggaaaatgtggagaccggagggaaacgaactggatcaggcaaagattccacgggaagggggtgggggcagacagactatggcttagggaaaaaagagcggaccgaggaggcttccaggagctgcatttgcctggtctgcgtatcaatgcgcagggatgccctctgtgggcaaagcgtgggaagtcacttttgtcaatggagcctgcgaacatcctga

SEQ ID NO: 125577 - DNA, 3066 bp, Homo sapiens
atgaggccgcggaccctcgcgatgagcgttacagctcttaaggtggcgcgtctggagtttgttccttctgatgttcggatgtgttcagagtttcttccttctggagtgaagctgcagaccttcgaggtgagtgttacagctcttaaggcggctcgtctggagttgttcgttcctcccggtgggctcctggtcccgctgacttcaggagtggagccgcagatcttcatggtgagtgttatagctcataaaggcagtgtggacccaaagaactcaggagcccagctggcttcacccagtggatcccccaacggggctgcagatggagctgcctgccagtcccgtgccgtgtgcctgcactcctcagcccttgggtggtcgatgggactgggtgccatggagcagagggtgggaggctcagtgacaagcataagtcagcggttaatgttccctgccaaaggaactctcatgttggataaactttgcagtgcaggtggtagcctaccctgcacttccctgaaaggtgagggtgaagatttcaccccctcgctggcaggcctgcatcttaatgctgcagggctacattgcacaaatgatatcacgacaaggcccagaggaattcctgatgctgctcagagcactctggcaactcccagtgcagctaggtccaatccagcagatgcgcccttaatttgtttcccaagatctgggtcttatctgagaataggtattatacgtctacttccttttgagattaagccacaatgcacagtcattcactggaaagtaacagggattcttgtgatgtggaaacagctcttgggtgcgtgtatgcaagaaaagacggccttcgcagggccttggaaagaagtgaaggtgaaatctggtgtaatgagaggcgaggccagtaagagaagaaatccacgtgagcggtgtgaagcttgttttttggagggctgctgggtgggctccctgactccgagaaaagggagtgaagagctggaatttttcagagaacttcagcggtccatttggagagtgaggccggttacattcccatctcttgaaccctttggaagtgtggtcgcaggcactgtagccatcaaagttcaccatgtagaggacatagcgctcagtcttatcttctgggacggagtcctcatagtgagggcagaaaacatccaggtagtcattgatacagacatcaatatggtagtcacccctctggaatctgttagaaaaagaaaaaaaaatgtgataattcatagagaaagggctttctgcttggaatcagtggttaagccattcaataattttggagctaaagcatctagtatagtaagtagataccacctcgcttttcttccttatgattttcatggtgccgacctgacttcctcctggaccccacactcctgtgttgtggatattgacagctggggaggccacattgaaaggacactcaggcagtgccctgggcttcaggctgcagaggagcagcaccataatcctccttctctgagttcatctttagccactttgccctgcagtcttcctcctttcattccatcctcatttgctaaagccaaaatgcatttcattttagtagctggaaaaggaagggaatgctttgaaaataactaccaagttattagtataagttttttcaaaggcccgtttctcgttctccttattttggtgcctcctttgctagtgccgttgcgtccctgtgtcaattttgccattagtcaaaccattacgcggcagggttgcgcggtttggcttcattcaacattaggttttggtgaccagccatgccgccttcgcgttcccggcgtcgccctttcaaacactacttcttctacaagctccggacaagtcgacttctatatccttaccatatcttcattcacttgtcttcttagtgcgcttctcctaggtctgcctcacagcggccgtgtactcaagtttaaagctcgcttcgatgtcttcatcgtcttcccaaccgttggcggttggaagttctcccttataaatcatatcccctgtgccacgtctttaatgccacactggccgttggcacatcaggccgtggcacgtcgggtagtgctgggagtttccactgttcggttaaagtacctgtatatcctccccccgctttcgcatatgtcaacgggtacttgtcccctctccggccaagtccatcttaatcgtcacgtgctcgccacgccctcggccgtccccaaaagtgtcagcgctgtttccgtcagctacgtaccatcatctatttgtccttcggcggttgcattcttcactaggcaatcttggatcttcattgctgccgctgcttctaacattcggtgccactttcctcaaactaaagttaagatgggacgcattttgcacccgttcttcggcattgcgattttcgtcgcactgatgtttatgtttgtgcgttttgtgcatcacaacatcccggataagaaagatattccgtggctgttgaacattgtcgaagtattgaaaggcaatgagcataaagtggcggatgtcggtaagtacaacgccgggcaaaagatgatgttctggtcgatcatgagcatgattttcgtgctgctggtgaccggggtgattatctggcgtccgtactttgcgcagtacttcccgatgcaggttgttcgctacagcctgctgatccacgcggctgcgggtatcatcctgatccacgccatcctgatccatatgtatatggcattttgggtgaaaggatcgattaaagggatgatcgaagggaagattagcgaccgaacagtcgatcgcttcgatctcaatcttcacgtctttcggcagacgggcaacttcacgcagaacgtgccgggaagatcttttacaaacacggtagttttaacgatgtcgcccactcaggccagcggcttcgacgatcgcttttacgttatccagcgactgacgtgggggtgcagcgacgtctgccggtacttcgcccgttttcggatttaccgggatctgaccggaggtgatgatcatattgcccagatcaacgccctgtaa

SEQ ID NO: 125578 - DNA, 789 bp, Homo sapiens
atgaagccacggacccccgcggtgagtgttacagttcttaaaggcagcacgtctgcatgtctggagtttgttccttctgatgttcggatgtgttcggagtttcttccttctggagtgaagctgcggaccttcgcggtgtgtgttacagcttttaaggtggcgcgtctggagttgtccgttcctccctgtgggttcgtggtgtcactggcttcaggagtgaagctgcagaccttcgtggtgagtgttacagctcataaaggcagtgtggacccaaagaactcaggagcccagttggcttcacccagtggatcccgcactggggctgcaggtggagctgcctgccagtcccgcgccctgcgcctgcactcctcagcccttgggtggtcgatgggactgggcgccgtggagcacggggcagtgctcatcggggaggctcgggcggcacaggagcccatggagggggtgggaggctcaggcatggcgggctgcaggtcccaagtcctgccccgcgggaaggcagctaaggcccggcgagaaatagagcgcagcgccgctgagggagtgggctccggccttggccagcccagaaaggggctcccacagtgcagtggtggactgaagggctcctcaagtgccgccaaagtgggagcccaggcagaagaggctccgagagggagcgggggctgtgaggactgccagcacgctgtcacctctcaccaggagcctgctaaactcaaagatgatgagcataaaaacctttatgatgatctgtttccacttaatggatag

SEQ ID NO: 125579 - DNA, 2806 bp, Homo sapiens
tttttttttttttttttttgcagagtcggccgtgtggaagaccggagttttattattattcaaatcagtctctctgaaaactcagggattgaggtttttaaggataacttggtgagtagagggccagtaagtcgggagtgctgattgttcgggtccaagataaaatcttagggagctgaagctgtcctcttgagctgagtccattcctgggtgggggccacaagaccagatgggccaatttatctatttgggtggtgccagctgatccactgaatacagggtctgtaaaagatgttaagcactcatcttaggttatcacaggagcaatttaaggaggttcagaatcccgccacctccagctgcattactcctacaccataatttctaatctcatggcaaatttgttagtcctacaaaggcagtctgatcctcaggcaggcagggactttgttttggaaaagagttgttattgtctttgtttcaaagttaaaccattgtgaaccccaaatatctgagacaggtctcagtcgatttaggaagtttattttgccaaagttaaggatgtgtgcccgtgacacagcctcaggaagtcctgacgacatgtgcccaaggtggtcgggcacagcttggttttatacattttagggagacatgggacatcaatcagtatatgtaaggtatacattggttccatccagaaaggtgggacaactcgaagcagggagggacttctgggtcataggtagataagaggcaaacggttgcattcttttgagtttctgattggcctttccaaaggaggcaggcagagacgcatctatctcagtgagcagaggtggctttgagttctgtcatttgtccacaaggaatttccttgtgagggaggtatgtagctttttaatcgtagtagctatcttttttaggaatagaatgggaggcaggtttgccctaagcagttcccagcttgactttctgctttggcttagtgattttggggccccaagatttattttcctttcacactgtaaactaagttcctcccaaagtaggttgagcctacgcccggggatgaacaaggacagcttggagattagaagcaagatggagtcggttaggttagttgtcctttcacggtcataattttctgttataatttttgcagaggcggtttcagcaccacggcggtcatggccagagcaaaaagtatgtttttgatgttgaaaggaaaggctggacctgactttggtatcagatttactgccagttccgggtggtttacatgatttgaggatcgttatgcattacataatgttaacatgaatgctgagtctgtgggtgctgatgtgaaggcagctgaagagttttggaagcttgattatggaggagatttacttgccacagcaaatcttcaatatggaggaaacctcgctattctggaaacagatgcctgaaagaacttttgtatctgcccaaggggtttttcctgaccactgcacaaagaaagaccatggcatttttgtagagaaagagtttaacagacacaagggtggccacgccatgtgggagactgagttgagaggtgacagcgtgctggcagtcctcacagccctcgctcgctctcagtgcctcctctgcctgggctcccactttggcggcacttgaggagcccttcagcccaccgctgcactatgggagcccctttctgggctggccaaggccacagccggctccctcagcttgcagggaggcgtggagggagaggcgcgagcgggaaccggtgctgcgtgcagcgcttgcaggccagctggagttccaggtgggcatgggcttggcgggccccacactcggagcagccggccggccctgccggccccgggcagtgaggaacttggcacccgggccagcggctgcagaggatgtactgggttctccagcagtgccggctcaccggcgctgtgctcgatttctcgccgggccttagctgccttcccgcagggcagggctcgggacctgcagcccgccatgcctgagccttccacccactccatgggctcctgtgcggccggagcctccccgactagcaccaccccctgctccatggcgcccagtcccatcgaccacccaagggctgaggagtatgagtgcacggcgcgggactggcaggcagctccacctgcagccccggtgcgggatccactaagtgaagccagctgggctcctgagttctttgggtccacactgcttttatgagctataacactcaccgagaagatctgcagcttctctcctgaagccagcgagaccatgagcccaccaggaggaacgaacaactccagacgtgctgccttaagagctgtaacactcacagcgaaggtctgcagcctcactccagaaggaagaaactccgaacacatctgaacatcagaaggaacaagctccagacgcaccaccttaagagctgtaacactcaccgcgagggtccgcggcttcattgttaaagtcagtgagaccaagaacccaccaattccagacacactagggcaggaagacgggctttcagcatgctggcctacgtctgagggtaaagctcttggcttcttttgttgactcacaggtgggcagtggaggaagttccagcctaaagtggcctgaccccttgggatcacagaccaggggcagttgagtttccctggtgaagcaaaccttgaaggtggggtcatgactctcatgcgcattcctttttcttgactgattctcgaaaggcttttcagtccctctgataaaaatgcactgcttccaaatgagt

SEQ ID NO: 125580 - DNA, 1893 bp, Homo sapiens
atggcaaagaagattcaactgacatataagtgtgtccagaattggtgggttcttggtctcactgacttcaagaacgaagccgcagaccctcgcagagtgaagctgcagaccttcgtggtgagtgttacagctcttaaggcggcgcacctggagttgttcattgcgcgcctggagttgttcgttcctcccagtgggcttgtggtctcgctggcttcaggagtgaagctgcagacctttgcggtgagtgttatagctcataaaagcagtgtggacccaaagagtgaacagtagcaagatttattgcaaagagtgaaagaacaaagcttccacagtgtggaaggggacccaagcgggttgccactgctggctcaggcagcctgcttttcttctcttatctggccccacccacatcctgctgattggtccattttacagaaagtcagtctgttttacagagagctattggtccatttttacagggttctgattggtgcatttacaatccctgagttagacacaaaagttctccacgtccccactagattagctagatagagtgtcgattggtgtatttacaaacactgagctagacatagagtgctgattggtccatttacaaaccttgagctagatacagagtgccgattggtgcattcacaatcccttagctagacataaagattctccaagtccccaccagattaactagatacagagtgctgattggtgcattcacaaaccttgtgctaaacacagggtgctgattggtgtatttacaaaccttgagtggggctgcaggtggagctgcctgccagtcctggtgccgtgcgcctgcactcctcagcccttgggtggtcgatgggactgggcgccgtggagcagggggtggcgctcgttcggggaggctcgggctgcacagaagcccatggagggggtgggaggctcaggcatggcgggctgcaggtcccgagccctgcccttagactcagagccacagtggatgcctgaggccagcaggcccctctgctccacaggtggaaaagcctgaggttcgccgacctccagagcccgcagctgcaccacggagaggtgagtgctgctcttccctggctgcggcatatagggcgaaggctggttgacctctggccttctggggcaggtcacacagaaggaaggctccttctcagagccttcactgtggcatctgtcaaatggtcttgtattctttaccttgttcagtgcaaggatgaatgataggatgcctgtcaagggcttttggcagtgcctagtgatgcattcagcattgccaccactgttgctgttaccgttgccgtgcttcagcagctggagcagcctctttgcaaggcagtacccatgtgagaattcagcacatgcactccatgaccctgtgcttctgacgcccagtgtgcgactcagagacgtctgtaccaggtccatatggcccctggtggtcaccgggctgccatcagcaatgaatgtgagttcctggtgctccacatcctcgccagcatttggtgtgttagtgctttggatatgagccactccagtaggtgcgtggcagtatctcatggttggtttaacttgcagctccctaatgatatacctatgtggagcatctttcaggtgcttatttgccatctgtgtatcttcttgaatgaggtgtctgtttagatcttctgcccactttttaattgggttgttttcctgggagcagcctggacacgtgatcccagggaaagtgtggggtgcccctcggaggactccgtagcaggcaccagcaacagacaagatgtgcgccaacaggaaggaacacttaacactgctgaccgtcagggtcaggtggtttagaggacatcgttctgcaagccccat

SEQ ID NO: 125581 - DNA, 1917 bp, Homo sapiens
aaaccaaaatcttcatgctgaaagatactgcaattctactttagaaagaaatgatacgccaatagaaagcttaaaaccaaaaagggagagtgaagatggactaggagaacacaatggaagtacaatggaagaagtgggtgcagaaactagggtgcagcgccactgggttagggtctccatgactgagctggccttggcaagtgatgcccatatgtggggctcaaacccaggtcaaagggtcaccggagtgatggttggagaatgtggaactatgctgggggacacccaagtactcttaagcaatccctgtgttgtttcaatttttgaaattaattggattctccctaaaataactaaatttaaaccaattgaaggtgctgaaaatgccttcacagatgggtctagtaatggtaaagctacttattctgcctcgaaaggtaaagtttttccaacgccctatacttcagctcaaaaagcggagcttgtagctgtaattgagtgttttccagtgatgcgcattccagcttctactaaaacggacaatgccccaggctatactagccaagctgtagctacatttttctctatatggaatattaaacacattactggtatcccatgtaattctcaaggacaagccatagtggaaagaatgaatctctccctgaaacagcagttgcaaaagcaaaaagggggaaatagggactatgggacaacccatatgcaattgaatctagcattatcgactttaaattttttgagcctgcctacaggccagatgctatcagcagctgaacagcatctacagaaaccagctgcaaagacagaagcagaacaactggttaggtggagagatccgataacagaaagttgggaagtagaatggccaaaattcagaaaactgacaacaaaaaatgctggcaaggatgtggagcaacaggaactatcattcattgctggtggtactgtgtccggaattggtgggttcttgggtctccctgacttcaagaatgaagctgccgaccctcgcggtgagtgttacagttcttaaaggcggcgtgtctggagttttgttccttctgatgttcggatgtgttgggagtttcttccttctggagtgaagctgcagaccttcgcggtgagtgttacagctcttaaggccgcgcgtctggggttgttcgttcctcccggtgggctcgtggtctccctgggctcaggagtgaagctgcagatcttcgcggtgagtgttacagctcataaaagcagcgtggacccaaagaactcaggagcccagctggcttcacccagtggatccagcaccagggctgcaagtggagctgcctgccagtcccggtgccgtgtgcccgcactcctcagcccttgggtggtcgatgggactgggaccccctgcagtggagcagggggtggcacttgtcggggaggcttgggccgcacaggagcccatggagtgggtgggaggctcaggcatggtgggctgcaggtcccgagccctgcccccacgggaaggcagctaaggcccggcgagaaatggagcgcagcgccagtgggccggcactgctgggggacccagtacaccctccgcagccactggcccggtgcagcggtgggctgaagggctcctcaagtgtcaccaaagtgggagcccaggcagaggaggtgcccagagcgagcgagggctgtgaggactgccagcacgctgtcacctctcctaaccacctggactcagtgatatggtttggctgtgtccccaccgaaatctcatcttcagttgtagctcccataatccccacatgtcatggaaaggaactggtgggagtaggaggtgctgctcaggcaatgcatgctcaggcacacaggactgctcaggcaatgcgtgctgagcaaatgaatacatga

SEQ ID NO: 125582 - DNA, 1353 bp, Homo sapiens
  misc_feature (1)...(1353): n = a,t,c or g
atggaagccccggagggcggcggaggggggcctgcagcgcggggccccgaggggcaaccggcgcccgaagccagggtgcacttccgagtggcgaggttcatcatggaggcaggtgtcaagctagggatgaggtccattcccattgccactgcttgcaccatttaccataagttcttttgcaataccaacctggacgcttatgacccttacctgattgccgtgtcttccatttacttggccggcaaagcggaaaagcagcacctgcggactcatgacatcatcaatgtgtccaacaggtactttaacccgagcggtgagcccctggaattggaatcccgcttctgggagctccgggacagcattgtgcagtgtgagcttctcatgctgagagttctgcgcttccaggtctccttccagcttccacacaagtacctgctccactacctggtttccctcgaaaactctctgaaccgccacagctggcagcggaccccggttgccgtcactgcctgggccctgttgcgggacagctaccacgggggtctgtgcctccgtttccaggcccagcacatcgcggtggcggtgctctacctggccctgcaggtctacggagttgaggtgcccgccgaggttaaggctgagaagccgttgggtggcaggtgtttaatgacgaccttaccaagccaatcattgataatattgtgtctgatctcattcagatttataccatggacacagagatcccctaaggtcctggcccaggcctgcccaaagagaagcccaggatggtcggctgcctggggacattgtcaacacgtcggcatgacgggctggtccccacaggacccagncgggaggactggttgtgctgctggagaagggctggagaaggcaatggcatcgtgccgctttgccagtccctagaagtcgcggtgcaggtgatggtgggagccgcgcctccagcgggcaggccgggagtgtactaccatggggcgctgtgcctccgcttccaggcccagcacatcgccgtggcggtgctctacctggccctgcaggtctacggagttgaggtgcccgccgaggtcgaggctgagaagccgtggtggcagatttataccatggacacagagatcccctaaggtcctggcccaggcctgcccaaagagaagccacatctgcgtttgtcctttgagaggactttgactacaatacaggcatgacatcaatgaaaggaaagtcatgaaatcgatgagactgaatccctacggatttcttaaaagccagatttgtagggagaatgaatgtgcaacgtggctgaaatctattttgtgtaataaaaggtgatacaagtca

SEQ ID NO: 125583 - DNA, 342 bp, Homo sapiens
ctcatggtcaactccctgactgaagtggacattaagtcccgtggagtgcctgtcttagacctgttccttgcccaggaggctgagcggctgaggaaacagactggggcagtggaaaaggtggaagagcagtgccatccattgaatgggttgaacttttcacaggtcatctttgctttgaaccagaccctcctgcagcaggaaagcctgcgagcaggcagtcttcagatcccctacacgacggaggatctcatcaaacactataactgcggggacctcagctccgtcatcctcagccatgacagctcccaggagcgcatcactgctcaggagattgacagctac

SEQ ID NO: 125584 - DNA, 3084 bp, Homo sapiens
atggcacgagatcgggtgaagaatggtctcaccaagctactagaaacaaacatactagtagataaaatgaaactagatctttcagctttagagcctgtacttttagcaaaatcagaagatgttgaagccctgatggaaaaattggcagtggatcaagaaagtgccgatcaggtccgtaacactgtgcaggaggatgaagcaacagcaaaagtcaaagctgaagaaacccaagcaatagctgatgatgctcaaagagatcttgacgaggcactacctgcactagatgctgccaataaagcactggattccttagataaggcagatatatctgaaatcagagtttttacaaagcccccagatttggtcatgacagtaatggaagcaatctccattcttttgaatgccaagcctgattggccatcagcaaagcaacttcttggtgactctaactttctaaaaaggcttttagaatatgataaggagaacataaagcctcagatattggcaaagcttcaaaagtatattaataatcctgattttgtgcctgaaaaagtggagaaagtgtccaaagcatgtaaatctatgtgcatgtgggctgaacttgacattaccatggctaccctgagagaaaagcaagcattactaagacaagtagaagatcaaatacaggccttacaagatgaatatgacaaaggtgtaaatgaaaaagaaagcctggcaaagaccatggccctgacaaaagcacgtctagtacgtgctggaaagctgacagcagcattagaagatgagcaggttcgatgggaagaaagcatacagaagtttgaggaagaaatatcaaatatcactgggaacgtgttcatagcagcagcttgtgtggcctactatggggctttcacagcccagtacaggcagtcacttatagagtgttggatccaggactgtcagtctctggagatcccaatcgatccttccttcagtctcattaacattcttggagatccctacgagatacggcagtggaacactgatgggctgccccgtgacttgatatcaacagaaaatggcattttggttactcaaggcagaagatggcctttgatgattgatccccaagatcaggtatgcattaaagttaccattatcaatttcactgtaacaaaatcaggcctggaggatcagttgttaagtgatgtggtgcgacttgaaaaacccaggttggaagaacaaagaattaagctcatcgtgaggatcaacactgataaaaaccagttgaaaactatcgaagagaaaatcctgagaatgctctttacctctgaaggaaatattctggacaatgaagaacttattgacacactccaggattcaaaggcaagttcctgcacagaggtacgtagcaggctctcaatcaatgctggttcaacacatgaaggaactcgtctttatattatatgtagacaatacctcaccactctgtttggagcagataaagctgatcggatttatgatgacatgcctgatatagagaaaactgcaaatgttctacaggactatcttgatgattataatctcacaaatcccaaagaagtaaagttggtgttcttccaggatgctatagaacatgtttcaaggattgctcggatgatacgtcaagaaagaggcaatgccctgcttgttggagtaggaggcacaggaaagcagtcactcacgagacttgcagctcatatatgcggttacaaatgtttgcagattgaactcagccggggatataattatgatagttttcatgaagacctgaggaagttgtacaaaatggctggtgtagaagacaagaatatggttttccttttcactgacacccagattgtagtggaggagttcctagaagatataaataacatcctgaactcaggtgaagtgcctaatttatttgaaaaggatgaactggagcaggttttagcggccaccagaccaagagcaaaagaagtaggaatttctgaggggaacagagacgagatttgttacctgctctggcttgtgaccaatagagggatgggaaggatgggaacacagtatggtctagagggtaccaagacagaagaggctattgtgcagaaccttggggagacgccttccagagagactggaggtgcctctgccagagaaaaggaggagaccctcctgcagcaggaaagcctgcgagcaggcagtcttcagatcccctacacgacggaggatctcatcaaacactataactgcggggacctcagctccgtcatcctcagccatgacagctcccagggcccctacaggaggtcagggaatgtgctgtcactagaggctggtagagaggggggctctgctgaagagaagagattttgggaaatgggcaggggatcttacataaatgacatgattaaaaaaaaagatgacagagtagaagatgaaggctgtcgatttgaaaatgaaagaatatcatttcgaggccgtcgcaaaaggagatctgttatccataagatggaagttaatgctgtcacagagtctgaggactttggaaagctttttgagaggctactggaagcagcagcagcaggcagggagcgcatcactgctcaggagattgacagctacttacgccgggagctgatctacaagcggaatgagagaatagggaagcgggtgaaggcccttttggaggagttccctgacaaaggcttcttctttgcctttggagctgagcaggtctttgatctgaggggaatgaaagtgctggaaagaggagagactcgctggggggcctttgtttttgacaaaaaagacatctgccggactcgaaccccctcacccaccccctcaacccctgggctaacgcaacaatgccccaactgggacttgggtctccccacagctgaacaagtctcaggaaagagaaaaaggtctgctgcaaatgtggacaggagcttaatcgattctttccacagcccagaaagaaagggagagagaagaagggctgtggggaggcaaggggagagtggaaagggggacgtgggggctagggggcaaggaagggtagaatttgaaccctga

SEQ ID NO: 125585 - DNA, 371 bp, Homo sapiens
atgggccttctgcttccttctcggggcctatttgctgtactgccgcacgcccagggttccctggttgtgactcctgagactacagtgggtcatttcatgggcaacaacacagtgctggatgttttgcggcgtgaaggctatgaggtagaacacgcccctgctggacgacccatccacaagagtgccagcctggcaggaataaagatgaccaaggaaggaaaaaagagggtagcggatctggtgaaagcagagacgcagactcccttcatttccactacagagaaataccagccctctgtgccaactaaccaggtttctcctttcctctcccacccccacccctccaaacacgcattaacttctgcagtctg

SEQ ID NO: 125586 - DNA, 630 bp, Homo sapiens
tgggtgatgctcatggtcaactccctgactgaagtggacattaagtcccgtggagtgcctgttttagacctgttccttgcccaggaggctgagcggctgaggaaacagactggggcagtggaaaaggtggaagagcagtgccatccattgaatgggttgaacttttcacaggtcatctttgctttgaaccagaccctcctgcagcaggaaagcctggaagcaggcagtcttcagatcccctacacgacggaggatctcatcaaacactataactgcggggacctcagctccgtcatcctcagccatgacagctcccaggttcccaattttattaatgctacgctaccacctcaggagcgcatcactgctcaggagattgacagctacttacgccgggagctgatctacaagcggaatgagagaatagggaagcgggtgaaggcccttttggaggagttccctgacaaaggcttcttctttgcctttggagctgcttcacagtagccttgaaaatcaggagcctcggattacagtagctgtgaaaactgtttgcctaatggtactgggaggggacagaatgggttcaaagttcctccaaagctccatccttaaagaatcatcactatttga

SEQ ID NO: 125587 - DNA, 1523 bp, Homo sapiens
  misc_feature (1)...(1523): n = a,t,c or g
atgaccaagcagatttgttacctgctctggcttgtgaccaatagagggatgggaaggatgggaacacagtatggtctagagggtaccaagacagaagaggctattgtgcagaaccttggggagacgccttccagagagactggaggtgcctctgccagagaaaaggaggagaccctcctgcagcaggaaagcctgcgagcaggcagtcttcagatcccctacacgacggaggatctcatcaaacactataactgcggggacctcagctccgtcatcctcagccatgacagctcccagggcccctacaggaggtcagggaatgtgctgtcactagaggctggtagagaggggggctctgctgaagagaagagattttgggaaatgggcaggggatcttacataaatgacatgattaaaaaaaaagatgacagagtagaagatgaaggctgtcgatttgaaaatgaaagaatatcatttcgaggccgtcgcaaaaggagatctgttatccataagatggaagttaatgctgtcacagagtctgaggactttggaaagctttttgagaggctactggaagcagcagcagcaggcagggagcgcatcactgctcaggagattgacagctacttacgccgggagctgatctacaagcggaatgagagaatagggaagcgggtgaaggcccttttggaggagttccctgacaaaggcttcttctttgcctttggagctggtcatttcatgggcaacaacacagtgctggatgttttgcggcgtgaaggctatgaggtagaacacgcccctgctggacagacccatccacaaagggaagagtaaaaagacctccacactggcccacttctgtccaccatctttgctccaaaagtccctgaccctggggaagtacccggcaccaagaagccgtattccttcagggcactcaacggctggcctccccttggtgttcccggcctggaagttgccgacacggcccagtgaggccgaacagaggttccggaagaagccgaaggggttcacagcggaagctgctactccggcaattcaagcgatctgtgggtccgcctggaggagagtgacatagtccccgcaactccaggtccctgtcctggacaggcacatctcccactgaactgcggctcccttcgccgtgggcattcccacccacagccagatggtggcccagcagtgccctgccctgtctcttctggactcctgtgttcctgggtgctggtgctgggctttcccaaacagagacacccctcctgtaactactggaaagcaccaggctaagaacctgacccctcggacttgaagaatggccattcctgtactccacattctggtctagccttgttgggcccaatccagaagagactgctctttgaaaaagcggcccagtgttgattcttctctttccaaggaatgtgactttgggttatccaactttgggggcaggtgtacagttttgtaacataagtgagtgtgntgtgaaaataaattat

SEQ ID NO: 125588 - DNA, 576 bp, Homo sapiens
cccggagtctagaatcagagagacctcccgcgaggatatgctaaaagtcccatagaaaacagtggggaaaacaacttcctcttctgaacaatctttcagaggacattcctcctagagtttaaaacattacagtctccagagcccagcgccaattccgtgtcagcccacaacccgctctggttgcacagcttcacgagtcacaaggactggatggacaagtgtgtgtgcctagtgactgccttctcccagcacatgcaccatgtcccggtggcattgccggagatggtccgtgccctctcagcccagcagcagaccctcaggcagatcaccatctgtggagaccgccaggccaaggacaccaaagttctggtgcagtgcgtccaccctgtctacattcctaacatggtgctgattctggctgatggggacccctcgagtttcctgtcccactggctgcctttcctgagtaccctccgaaggcaggaagaccaggccactgcgtatgtgtgtgagaatcaagcctgctcaatgctcatcatggatccctgtgaattacgaaaactgctacatccgtga

SEQ ID NO: 125589 - DNA, 870 bp, Homo sapiens
cgcaattgcgcacgacgcagaccctgctggggcttcctggaggactacgccttcgtggtgcggggcctgctggacctgtatgaggcctcacaggagagtgcgtggctcgagtgggctctgcggctgcaggacacacaggacaggctcttttgggactcccagggtggcggctacttctgcagtgaggctgagctgggggctggcctgcccctgcgtctgaaggacgaccaggatggagcagagcccagcgccaattccgtgtcagcccacaacctgctccggctgcatggcttcacgggccacaaggactggatggacaagtgtgtgtgcctattgaccgccttttccgagcgcatgcgtcgtgtcccggtggcgttgcccgagatggtccgcgccctctcagcccagcagcagaccctcaagcagatcgtgatctgtggagaccgtcaggccaaggacaccaaggccctggtgcagtgcgtccactctgtctacattcctaacaaggtgctgattctggctgatggggacccctcgagcttcctgtcccgccagctgcctttcctgagtaccctccgacggttggaagaccaggccactgcatatgtgtgtgagaatcaagcctgctcagtgcccatcactgatccctgcgaattacgaaaactactacatccatgactgccccaacccccttggggtggggcagaaggtgaagcatcccaactgactagagactcaggccctgcagggccctatagaacctgtggccatccctgagcaccctgccaccaggtgacctcggccatactcactgccccccttgggcacccactcaccctaaaataaacttaacaggtgtcccgtggtaaa

SEQ ID NO: 125590 - DNA, 1574 bp, Homo sapiens
gctgtgcactggttaagcctgagcgcagagtctgttcaacgagttcattgtgtggtatttgcttccgcttgctgttgagttggactggcctggatgctggccaggagcccaagtggacttggtgcttctctttgacagccaggattgaaaagcccagtcaagtgggcagagcacgaggccccgggccggagcggggtgttggcggcggccggttcgggtggcgactcgcgcttctctgggcggcggcgcttggccatatcgtgtcggggaaggtaatgagccgcagagccccggggtctcggctgagcggcggcggcggcggcggcggcggcggcggcaccaacggcaccaactattcgcggagctggaatgactggcaacccagaactgatagtgcatcagctgacccaggtaatttaaaatattcttcatccagagatagaggtggttcttcctcttacggactgcaaccttcaaattcagctgtggtgtctcggcaaaggcacgatgataccagagtccacgctgacatacagaatgacgaaaaggagagatcgatgtcttattgtgatgagtctcgactgtcatatcttcttcggaggatcacccgggaaaacgaccgagaccgaagattggctactgtatagcagttgaaagaatttattcagcaaccagaaaataagctggttagagtgcagtgccaggctgtctttgactccggaacccctgatcaccttgcttcgcctcccggagtacctggatatacgcatgagcaccgtgccagcccgtcatcctatataattatttctagtgtctcccctgaagactatctctgggtctcgaaatgggacatgatggatcacgggatgtacagcagagagcctgaagttccaaccgccgtagacaggaagaaaagagtttcttcctttcgaggaaataaaattgtcctgaaagacgtcattactctacggagacatgtggaaacaaaagttagagctaaaatccgtaagaggaaggtgacaacgaaaatcaaccatcatgacaaaatcaatggaaagaggaagaccgccagaaaacagtaagatgtgccttgacacaaatactgttgtatgaaccatgtgccaatcaaagtagacaactgtaaagtccttgagaatattttctacaatatttgtggcaaattcagtgggttcaaaattgagtttgtcctttctgcttcattagtttaagctgtataattcctttcccttcctacattcttgtttgtaattttttcgggggaagaggagttgctagtactggcattggttttcctttctctctttttttttttttttttcctgagatggagctttgctgttgttgcccaggctgttagtgcaatggcacaatctcagctcactgccttttgggttcaagcaattctcctgcctcagcctcccaagtagctgggattacaggtgcccaccaccacgcccagctaatttttgtatttttactagagatggggtttcaccatgttgtccaggctggtctcgaacttctgacctcaggtaatccacctgcctcagcct

SEQ ID NO: 125591 - DNA, 375 bp, Homo sapiens; identical to SEQ ID NO: 121886
  misc_feature (1)...(375): n = a,t,c or g

SEQ ID NO: 125592 - DNA, 547 bp, Homo sapiens
caaccgaatgggcaaccattttattgcggagtttaagcgcaagcataagaaggacatcagtgagaacaagagagctgtaagacgcctccgtactgcttgtgaacgtgctaagcgtaccctctttccagcacccaggccagtattgagatcgattctctctatgaaggaatcgacttctatacctccattacccgtgccccatttgaagaactgaatgcctgggggatttcctggtggtggagcctccctcctcctgtgggtgcttcctcaggccccaccattgaggaggttgattaagccaaccaagtgtagatgtcgcattgttccacacatttaaaacatttgaaggacctaaattcgtagcaaattctgtggcagttttaaaaagttaagctgctatagtaagttactgggcattctcaatacttgaatatggaacatatgcacaggggaaggaaataacattgcactttataaacactgtattgtaagtggaaaatgcaatgtcttaaataaaactatttaaaattggcaccataaaaaaaaa

SEQ ID NO: 125593 - DNA, 1662 bp, Homo sapiens; identical to SEQ ID NO: 122725

SEQ ID NO: 125594 - DNA, 1056 bp, Homo sapiens
gctgggaaaccccactgtggtggggaattttgcaccccgaatgtccaccatttttttcgctgattttaagccaaccctaagaggacaatcattggaacaaagaagctttaacccccccccctactgtttttgacgggctaagcctaccctctcttccgcaccccgggcagtaattgaatcgattcttcctaagaagaatcggactctatacctccattacccctccccgatttgaagaactgaatgctgacctgttccttgcacccttgaccccagtagagaaagcccttcgaaatgcccaaactagacaagtcacagattcatgatattgtcctggtttggtggttctactcgtatccccaagattcagagctttctccaagacttcttcaaatggaaaagaactgaataagagcatcaaccctgatgaagctgttgcttatggtgcagctgtccaggcagccatcttgtctggagacaagtctgagaatgttcaagatttgctgctcttggatgtcactcctctttccctgggtattgaaactgctggtggagtcatgactgtcctcatcaagcgtaataccaccattcctaccaagcagacacagaccttcactacctattctgaccaaccagcctggtgtgcttattcaggtttatgaaggcgagcgtgccatgacaaaggataacaacctgcttggcaagtttgaactcacaggcatgccaggaggaatgcctgggggatttcctggtggtggagctcctccctctggtggtgcttcctcagggcccaccattgaagaggttgattaagccaaccaagtgtagatgtagcattgttccacacatttaaaacatttgaaggacctaaattcgtagcaaattctgtggcagttttaaaaagttaagctgctatagtaagttactgggcattctcaatacttgaatatggaacatatgcacaggggaaggaaataacattgcactttataaacactgtattgtaagtggaaaatgcaatgtcttaaataaaactatttaaaattggaaaaaaaa

SEQ ID NO: 125595 - DNA, 2424 bp, Homo sapiens
  misc_feature (1)...(2424): n = a,t,c or g
cccacgcgtccgcccacgcgtacgccccgcgtccgctcgcctgcagctcttgggttttttgtggcttccttcgttattggagccaggcgctacaccccagcaaccatggtccaagggacctgcagttggtattgatcttggcaccacctactcttgtgtgggtgttttccagcacggaaaagtccgagataattgccaatgtatcagggaaaccgaaccactccaagctatgtcgcctttacggacactgtaacggttgatcggtgatgccgcaaagaatcaagttgcaatgaaccccaccaacacaagtttttgattgccaaaccgtcttgattggacggcagatttgattgatgctgttgtcccagtctgatatgaaacattgggccctttatggtggtgaatgatgctggcaggcccaaggctccaagttagaataccaagggagagaccaaaagcttctatccagaaggaggttgtcttctatgggttctgacaaagatgaaaggaaatttgcagaagccttaccttggggaagactgttaccaatgcttgtggtcacagtgcccagtttactttaatgacttctcagcgtcaggctaccaaagatgctggaactattgctggtctcaatgtacttagaatttattaatgaggccaactgctgctgctattgctttacggcttagacaaaaaaggtttggagcagaaagaaacgtgctcatctttgacctggggaggtggcactttttgatgtgtcaatcctcactattgaggatggaatctttgaggtcaagtctacagctggagacacccacttgggtgggaggaagattttgacaaccgaatggtcaaccattttattgctgagtttaagcgcaagcataagaaggacatcagtgagaacaagagagctgtaggacgcctccgtactgcttgtgaacgtgctaagcgtaccctctcttccagcacccaggccagtattgagatcgattctctctatgaaggaatcgacttctatacctccattacccgtgcccgatttgaagaactggaatgctggacctgttccgtggcaccctgggacccagtagagaaagcccttccgagatgccaaactaggacaagtcacagatttcatgatatttgtcctgggttggtggttctacttcgtattccccaagattgcagaagtcttgctgccaagacttctttcaatgggaaaaagaacttgaattaaggagcatcaaccctggatggaaggctgttggtttattggtgccagctgttccagggcagcccatctttgtctgggagacaagtcttgaggaatgtttcaagatttgctgctcttgggatgtcactcctctttcccttgggtattgaaactgctgggtggagtcatgactgtcctccatccaagcgtaataccaccattcctaccaagcagacacagaccttcactacctatttctggacaaccagcctgggtgtgcttattcaggtttatgaaggcgagcgtgccaatgacaaagggtaacaacctgccttggcaagttttgaactcacagggcatacctcctggcaccccgagggtgtttcctcaggattggaagttcacttttggacattggatggccatgggtatccttcaatgtctctgctgtggacaagagtacgggaaaagagaacaagattactatcactaattgacaagggccagtttgagcaagcaagacattgaacgtatggtccaggaagcttgagaagtaccaagctgaagatgagaagcagagggacaagggtgtcatccaagaattcacttgagtcctatgccttcaacatgaaagcaactgttgaagatgagaaacttcaaggccaggattaacgatgaggacaaacagaagattctggacaagtgtaatgaaattatcaactggcttgataagaatcagcactgctgagaaggaagaatttgaacatcaacagaaagagctggagtatagtttgcaaaccccatcatcacccaagctggtacccagagtgccaggaggcatgccagggaggaatgcctgggggatttcctgggtggtggagctcctccctctggtggtgcttcctcagggcccaccattgaagaggttgattaagccaaccaagtgtagatgtagcattgtttccacacattttaaaaccattttgaagggacctaaatttcgtaggcaaaatttcttttgggcaagttttaaaaaagtttaaggctngcttattagttaaggtttacttgggcattcttcaattactttgaattttgggaacatatggcacaggggagaggaaataacattgcactttataaacactgtattgtaagtagaaaatgcaatgtcttaaataaaactatttaaaattggaaaaaaaaaa

SEQ ID NO: 125596 - DNA, 879 bp, Homo sapiens
atgacgatgctgctgcaaaatctggggtacaaggtggacgtgaaaagaaatctcactgcttgggaaatgactacagagctggaggcatttgctcaccgcccagagcacaagacctctgacagcaccttcccggtgttcttgtctcatggtgttcgggaaggcatttgtgggaagaaatactctgaacaagtccctgatatattacaattcaatgaaatatttaaaatgttgaatagcaagaactgcccaagtttgaaggacaaacccaaggtgatcatcttcgaggcctgctgtggtgacaaggtcctgaaggagaagagaaagcagtttatccgttcagtgggcgaaggtacaataaatggcttactgggtgaattattggagacaagggtgctgagccaggaagagatagagatagtaaaatgtgaaaatgctacagttatggataaggcccgagctttgcttgactctgttattcggaaaggggctccagcatgccaaatttgcatcacatacatttgtgaagaagacagtcacctggcagggacgctgggactctcagcaggaaatgactacagagttggaggtattttctctgcaccaagagcacaaggcctctggtctcatggtattcgggaaggcatttgtgggaagaaatactctgagcaagtcccagatgtattacaactcaatggaatctttaaaacgttgaatagcaagaactgcccaagtttgaaggacaaacccaaggtgataatcatccaggcctgccatgttgagacacatgaatggactctaatttccctgtgtccctcatggacattagatccaaccacagatttaaaacgccctgaggagagtgattcaatgcttagataa

SEQ ID NO: 125597 - DNA, 1203 bp, Homo sapiens
aatagacagctttgaagcattccgcacgagccatggccggtgagtcttttactgttccaagaacaggtccctgggaagaaagagttgcggaaagggctggctcttctggaagccataattagtatctgtggaagtttagacaaggtcctgaaggagaagagaaagctgtttatccattccatgggtgaaggtacaataaatggcttactggatgaattattacagacaagggtgctgaaccaggaagagatggagaaagttaaacgtgaaaatgctacagttatggataagacccgagctttgattgactccgttattccgaaaggggcacaggcatgccaaatttgcatcacatacatttgtgaagaagacagttacctggcagagacgctgggactctcagcagatcaaacatctggaaattaccttaatatgcaagactctcaaggagtactttcttcctttccagctcctcaggcagtgcaggacaacccagctatgcccacatcctcaggctcagaagggaatgtcaagctttgctccctagaagaagctcaaaggatatggggaacaaaagtcggcagagatttatccaataatggacaagtccagcccgcacaccgggttgctctcattatctgcaatgaagaatttgacagtattcctagaagaactggagctgaggttgacatcacaggcatgacaatgctgctacaaaatctggggtacagcgtagatgtgaaaaaaaatctcactgcttcggacatgactacagagctggaggcatttgcacaccgcccagagcacaagacctctgacagcacgttcctggtgttcatgtctcatggtattcgggaaggcatttgtgggaagaaacactctgagcaagtcccagatatattacaactcaatgcaatctttaacatgttgaataccaagaactgcccaagtttgaaggacaaaccgaaggtgatcatcatccaggcctgccgtggtgacagccctggtgtggtgtggtttaaagattcagtaggagtttctggaaacctatctttaccaactacagaagagtttgaggatgatgctattaagaaagcccacatagagaaggattttatcgctttctgctcttccacaccagataatgtttcttggagacatcccacaatgggctctgtttttattggaagactcattgaacat

SEQ ID NO: 125598 - DNA, 654 bp, Homo sapiens
cgcgggtcctgagctgagaggactgtttcctggtgtgcggcagctgccgatcagtcccattgagatgacggctgccatgatgtacggcatcaccagctgccggatgcggactgagagcgagccatcgtgtggctccccggtggttagcggagaccctaaggaggatcacaactgcaccaatgccaaatcctccaacgcccggagcaccttgcccaccagcgactccatcccctcctcctccttggccgacgaccactacaagtttgccagcaaggagagccaggagggcaatgagggcagcgaggggagcttccggagccacgagagccacagcgacagggaagaggacgacaggaaacacagccagaaggagcccagggatgctctgggggacagcgggtacgcatcccagcacaagaaacgccaggactttgctaaggccaggaaggtccccagcgacacactgcccctcaaaaagagacgcactgtaaagcaccgcccccgcaccgccccccaccagggcgaagaagaggagattaaagaagcggcggggtcgctcctgcacttagcagagatccgatcctgtttgaataacatcaccaatcggacggcaaaggggcaggaagagcaaaacgaaatcacaaaaaaattaaa

SEQ ID NO: 125599 - DNA, 480 bp, Homo sapiens
  misc_feature (1)...(480): n = a,t,c or g
ccttgatcccccctcttttgagaccactagtccagagtgggggaattcccgaaatgggcaagttcatgaaacctgggaaggtggtgcttgtcctggctggacgctactccggacgcaaagctgtcatcgtgaaggtactctgtggatatccccttggacaaaactgtcgtcaataaggatgtcttcagagatcctgctcttaaacgcaaggcccgacgggaggccaaggtcaagtttgaagagagatacaagacaggcaagaacaagtggttcttccagaaactgcggttttagatgctttgttttgatcattaaaaattataacgnnnnnnnnnnnnnnnnnnnnnnnnnnnnnnnnnnnnnnnnnnnnnnntaaattaataaaaaaacaaaaaacnnnnnnnnnnnnnttaaaatttaaaaccaaataaagggttttccgcccccttggaaaaaaaagcccctcccannnnnnnnnng

SEQ ID NO: 125600 - DNA, 386 bp, Homo sapiens
ttgggttgaatctttcaatctgctgccatccgcggcttgggggtcgaaggtccgggcggcgccgggtgcattccttccctaggtctctggcggctacgtatccgatcctgtcctgcgagcagggccctcgggcggccttgaccaaggcgacagtgaacacagtctgaagttccggcccaagacctgggcttgctggcaggagtcagctctgggcatctttggctttacggatttttaagtggccctttctccttgctctctgcagaaatgggcaagttcatgaaacctgggaaggtggtgcttgtcctggctggacgctactccggacgcaaagctgtcatcgtgaaggtatcagcctcgcgggactctgcgtccttgcatgccgg

SEQ ID NO: 125601 - DNA, 591 bp, Homo sapiens
tttctggcaggagtcagcttctgggcatctttggctttccggatttttaagtggccctttctccttgctctctgcagaaatgggcaagttcatgaaacctgggaaggtggtgcttgtcctggctggacgctactccggacgcaaagctgtcatcgtgaagaacattgatgatggcacctcagatcgcccctacagccatgctctggtggctggaattgaccgctacccccgcaaagtgacagctgccatgggcaagaagaagatcgccaagagatcaaagataaaatcttttgtgaaagtgtataactacaatcacctaatgcccaccaaggtactctgtggatatccccttgggacaaaactgtcgtcaataaagatggctttacagatcctagctcttaaacgcaacgcccgaatggaggcccaaggtcaagtttgaagagagatacaagacaggcaagaacaagtggttctttccagaaactgcgggttttagatgcttttgttttgatcattaaaaattataaagaatagctcgaacttaatgtcttggcggcgaggacctaattcagaagggggtagaattagtat

SEQ ID NO: 125602 - DNA, 426 bp, Homo sapiens
ttggggggactgaagggtacgtggggcgaaacaaaaccggccatggcagcagcggaggaggaggacgggggccccgaagggccaaatcgcgagcggggcggggcgggcgcgaccaagaccctcttgtatactggaaaccaccttttttctccccagtggctggagacacggccagaacggcaagagtgtccagtatgtaaagctgggatcagcagagagaaggttgtaggagaaaaatccctgttaactttctctctccacttcctcagattaaaaactccacagatttgccggcttcccgtctgactttttctgcctccctagggattccagccatttggtgataccgggggcttccacttctcatttggtgttggtgcttttccctttggctttttcaactccccatcttactgatttaattta

SEQ ID NO: 125603 - DNA, 657 bp, Homo sapiens
atggcagcagcggaggaggaggacgggggccccgaggggccaaatcgcgagcggggcggggcgggcgcgaccttcgaatgtaatatatgtttggagactgctcgggaagctgtgggccagagaccagctccagagagcagagggggattccagccatttggtgataccgggggcttccacttctcatttggtgttggtgcttttccctttggctttttcaccatcgtcttcaatgcccatgagcctttccgccggggtacagctgccactcaaaaaagcatttgttctgtggctccttttccagatccaggctttttctactacagggtccgcaaggttatttctgctccagtcggggagccagctagcttgtggtctgttactcctctgcattcaaaaggattcatctttgtcagtgcctttctgggagagtgggcctggcttggagatgtcactgtggatccaggattttgccactggatatggaacgaagacctcgtcagtcaatcttccatgatcccggccaccgcaattggctcagccttccaagaggccgtggttgtcaccagggcgcccccacccctacccctgaatcccagctgcagggactgccattcaaacatccacgtgtccaagatggctgcggcattggcatga

SEQ ID NO: 125604 - DNA, 1151 bp, Homo sapiens
  misc_feature (1)...(1151): n = a,t,c or g
atcgtgggcaggaggtggtttctggtttgttggggcgtgtgtatgtgtatttggggggactgaagggtacgtggggcgaaacaaaaccggccatggcatcagcggaggaggaggtctggggcccccaatgttccaaatcgcgagcggggcggggcgggccgccngaaaacccccttcgaatgtaatatatgtttggagactgctcgggaagctgtggtcagtgtgtgtggccacctgtactgttggccatgtcttcatcagtggctggagacacgggccagaacggcaagagtgtccaagtatgtaaagctgggatcagcagagagaaggttgttccgcctttatgggcgagggagccaagaagcccccaggatcccagaattaaaaactccccccgccccccagggggcagaggaccagctccggagaagcagagggggatcccagccaatttggtgatacggggggcttccacttcttcatttggtgttggtgcttttccctttggctttttcaccaccgtctttcaatgcccatgagccttttcgccggggtacaggtgtggatctggggacagggtcacccaagcctccaacttggcaaggaattccctcttcctggtttctcggcaatcttcttccttttttggctgctcagtaattgagctaatgtctgcttcctgcccacctccagccagagaagaatcaagtattgagggtcccctgctgacccttccgtactcctgggacccccttgaacccctctatttctgttgggtaaaggccagccctgggacattgtccaggaaggcctggggaggaggagtgaagtctgtgcatagatgggagagccttctactcagaggctcactcagtaacgttgtttaattctctgccctggggaaggaggatggattgagagaatgtctttctcctctcctaagtctttgctttccctgatttcttgatttgatcttcaaaggtgggcaaagttccctctgactcttcccccactccccatcttactgatttaatttaatttttcactccccagagtctaatatggattctgactcttaagtgcttccgccccctcactacctcctttaatacaaattcaataaaaaaggtgaaatataaaaaaaaaaaaaa

SEQ ID NO: 125605 - DNA, 369 bp, Homo sapiens
ctgccttcccacggggcagggctcgggacctgcagcctgccatgcctgagcctcccacccactccatgggctcctgtgcagcccgagcctccccgacgagcaccaccccctgctccatggcgcccagtcccattgaccacccaagggctgaggaatgcgagcacagggtgcaggactggcaggcagctccacctgcagccccactcaaggtttgtaaatacaccaatcagcaccctgtgtttagcacaaggtttgtgaatgcaccaatcgacactctgtatctagctgctctggtgaggacgtggagaacctttatgtctagctcaaggattgtaaatacaccaatcggcactctgtatctagctcaag

SEQ ID NO: 125606 - DNA, 1083 bp, Homo sapiens
ctaaatgagaaaagctaaattcaagcgagttatgcaaacgaggcgtttggcaacttttacttgcatgcttatggttttctggggaaattcaaatgcgggctccggagccgcagccctgagcgtcccgggggtggccatggcgccaccttggcctcccaaagtgctggaattacaggtgtgagccaccgcccctggcttgggcagctgatttttaaaccatttgatgaagtgactttctttaaaggaaacatacttagcatcgccaccacagtcccatagctcgaattcacagcccgtgcctttgttgttgctggtaacatgcgggttctcaaattctaggatcctcactccttgggttgggctgtattcagtgatgtcagaagattctgtcagaaagttggccaaaacagtttttccactctgtgaaaatgagtgcaaataaaggtctttgcttgggccttcggggctcattaacaccgggctcgcctccactacctcctccgggcagtggttggaatcaaggtctccagaatagggggcagcgggcgagagattccccagcggcgttgcaggagcccacgtggagcccacgtggagcccacgggcttccttgccctgagcagctgcagctgcagcccctgccaccccgagagtccagccccgagggcagctcctgccttgcctgcggttaccgccgccgccagacaaagacaggcttcctttatcatctccagagcctggtttgtggtgtgcaattagcatacactgtgtgtcctgtaaggacggctgttggacaaagcaggaataccacatctccatttccttccggtggcttgggatgtcagcattgaagacgatcaccactccatgagcatccttcatcagggccggccagcaggactcaaaccgagccttagctgccttcccgcggggcagggctcgggacctgcagcccgctatgcctgagcctcccacccactccatgggctcctgtgcagcccgagcctccccgacgagcaccaccccctgctccagggcgctcagtcccatcgaccacccaagggctgagaagtgcgagcgcat

SEQ ID NO: 125607 - DNA, 930 bp, Homo sapiens; identical to SEQ ID NO: 116844

SEQ ID NO: 125608 - DNA, 845 bp, Homo sapiens
tcatgtattcatttgctcagcacgcattgcctgagcagtcctgtgtgcctgagcatgcattgcctgagcagcacctcctactcccaccagttcctttccatgacatgtggggattatgggagctacaactgaagatgagatttcggtggggacacagccaaaccatatcactgagtccaggtggttaggagaggtgacagcgtgctggcagtcctcacagccctcgctcgctctgggcacctcctctgcctgggctcccactttggtgacacttgaggagcccttcagcccaccgctgcaccgggccagtggctgcggagggtgtactgggtcccccagcagtgccggcccactggcgctgcgctccatttctcgccgggccttagctgccttcccgcggggcagggctcgggacctgcagcccgccatgcctgagcctcccaccccctccatgggctcctgtgcggcccaagcctccccgacgagcgccgccccctgctccacggcgcccagtcccatcgaccacccaagggctgaggaatgcgagcgcacggtgcaggactggcgggcagctccacctgcagccccagtgcgggatccactagaaacagggaaaattgaccaagagattcacaaatacaacaccccaggattcactggttgcctctccagagtccagttcaaccagatcgcccctctcaaggccgccttgaggcagacaaacgcctcggctcacgtccacatccagggcgagctggtggagtccaactgcggggcctcgccgctgaccctctcccccatgtcgtccgccaccgacccctggcacctggatcacctggattcag

SEQ ID NO: 125609 - DNA, 2378 bp, Homo sapiens
  misc_feature (1)...(2378): n = a,t,c or g
gagaaatggcgtggcaggggacccagcgagcccagagggattttgccgctgcttcctctacccctgtatttcacgcagctctctaaattgactcagctccaggctagtgtgagaaacaccaacagcaggcccatctcagatcttcactatggcaacttatgcaagaaactgttgaattagacccgtttcctatagatgagaaaccatacaagctgtggtatttatgagcctccatttcttatactactgcagtgaaccaacattggatgtgaaaattgccttttgtcagggattcgataaacaagtggatgtgtcatatattgccaaacattacaacatgagcaaaagcaaagttgacaaccagttctacagtgtggaagtgggagactcaaccttcacagttctcaagcgctaccagaatctaaagcctattggctctggggctcagggcatagtttgtgccgcgtatgatgctgtccttgacagaaatgtggccattaagaagctcagcagaccctttcagaaccaaacacatgccaagagagcgtaccgggagctggtcctcatgaagtgtgtgaaccataaaaacattattagtttattaaatgtcttcacaccccagaaaacgctggaggagttccaagatgtttacttagtaatggaactgatggatgccaacttatgtcaagtgattcagatggaattagaccatgagcgaatgtcttacctgctgtaccaaatgttgtgtggcattaagcacctccattctgctggaattattcacagggatttaaaaccaagtaacattgtagtcaagtctgattgcacattgaaaatcctggactttggactggccaggacagcaggcacaagcttcatgatgactccatatgtggtgacacgttattacagagcccctgaggtcatcctggggatgggctacaaggagaacgtggatatatggtctgtgggatgcattatgggagaaatggttcgccacaaaatcctctttccaggaagggactatattgaccagtggaataaggtaattgaacaactaggaacaccatgtccagaattcatgaagaaattgcaacccacagtaagaaactatgtggagaatcggcccaagtatgcgggactcaccttccccaaactcttcccagattccctcttcccagcggactccgagcacaataaactcaaagccagccaagccagggacttgttgtcaaagatgctagtgattgacccagcaaaaagaatatcagtggacgacgccttacagcatccctacatcaacgtctggtatgacccagccgaagtggaggcgcctccacctcagatatatgacaagcagttggatgaaagagaacacacaattgaagaatggaaagaacttatctacaaggaagtaatggattcaggaagaaaagacttaaaaatggtgttagttaaaaggacagccttctcctttcagcacaggtgcagcagtgnaacagcagtgagagtctccctccatcctcgtctgtcaatgacatctcctccatgtccaccgaccagaccctggcatctgacactgacagcagcctggaagcctcggcaggacccctgggttgttgcaggtgactagccgcctgcctgcgaaacccagcgttcttcaggagatgatgtgatggaacacacacacacgcagacacacacacacacacaaatgcagacacacaacatcaagaaaacagcaagggagagaatccaagcctaaaattaaataaatctttcagcctgcttcttccccagggttctgtattgcagctaagctcaaatgtatatttaacttctagttgctcttgctttggtcttcttccaatgatgcttactacagaaagcaaatcagacacaattagagaagccttttccataaagtgtaattttaatggctgcaaaaccggcaacctgtaactgcccttttaaatggcatgacaaggtgtgcagtggccccatccagcatgtgtgtgtctctatcttgcatctacctgctccttggcctagtcagatggatgtagatacagatccgcatgtgtctgtattcatacagcactacttacttagagatgctactctcagtgtcctcagggctctaccaagacataatgcactggggtaccacatggtccatttcatgtgatctattactctgacataaacccatctgtaatatattgccagtatataagctgtttagtttgttaattgattaaactgtatgtcttataagaaaacatgtaaagggggaatatattgggggagtgagctctctcagacccttgaagatgtagcttccaaatttgaatggattaaatggcacctgtatacca

SEQ ID NO: 125610 - DNA, 1564 bp, Homo sapiens
tcaggatgttcgcaggctccattgacaaaagtgacttcccacgctttgcccacagagggcatccctgcgcattgatacgcagaccaggcaaatgcagctcctggaagcctcctcggtccgctcttttttccctaagccatagtctgtctgcccccacccccttcccgtggaatctttgcctgatccagttcgtttccctccggtctccacattttcccttccagccctccacttctccggatcaatgtgtagtacggttccaactcccagctcgcacaccgcggggctcgggatctcttggaccgaatggaactttttgctgcctgcttttgctgctgattctgtcagtggacaaggaaaaaggcttcgaaggcagcagaggcgcaggggaggtggagaaagaggtggaggaagaggacgaggaggaggaggaagccgaaggggctcggcgcgtgtgtgtgcatgtgtgcatgcgtgtgtgagtgcatgtgtgtgagtgctgccgctgcccgcgacccctggccccgaaggtgttggctccccaccagactcaggagcccagctagcttcacccagtggatcccgcaccagggctgcaggtggagctgcctgccagtcccgtgccgtgcgctcgcactcctcagcccttgggtggtcgatgggactgggcgccgtggagcagggggtggtgctccttggggaggctcgggccgcacaggagcccatggagtgggtgggaggctcaggcatggcgggctgcaggtcccgagccctgccccgcaggaaggcagctaaggctcggcaagaaatcgagcacagccccggtgggccggcactgctgggggacccagtacaccctccgcagccactggcccgggtgctaagtcccccattgcccggggccagcagggctggccggctgctccgagtgcggggcccaccaagcccaagcccacccggaactccagctggcccgcaagcgccgcacgcagccccggttcccgctcgtgcctctccctccacacctccctgcaagctgagggagtgggctccagccttggccagcccagaaaggggctcccacagtgcaggggggaggctgaagggctcctcaaatgccaccaaagtgggagcccaggcaggggagaagaattgtggcattcacgatagaagtgggggtgttgagggaagatctgttttgaatggtgatcctactttgaacattttgggtgtagagcagtacgaggccatcaggtatccaggtggagatggcatactgctgagccagcaggaaaaggcaacaggacgaggggcaggatttgccactggaatgtcagcaggccatacctcaggcgttcagctccatggagcaaagacagtagtgatcacgttccttgacaacagtgctagtgtgcggggagcttttagttttccttttctctgctccttgaaccaagaatccagcatcagcatcagcatcagcatcagcatcagcatctgctcagctgtaggccatgattgtctgtactgtttaccagcagctcatgtaatatgcttgatgtaa

SEQ ID NO: 125611 - DNA, 1111 bp, Homo sapiens
atggataggcctgaaacctgggtacacaagggcagacctgacgcctatgtctgcaaatatttgcctacatctgtagaggctggccttatccttgggtccacagggggctacttggctctgggattggctttgagtctgagtctgcaggaaatagtcagttactgggatggatctgatgtccaggattataggggacagcccagtgctggagaagttccagaggctgggctgctaaggggtcctggacaaggtcgcttggatagcggcctaaccacagcattatacatgctcaggaagaggcaaagccggaaatttaccacttggcaaagcgtctttacaaaaccagagtttggctttgtggtagcttccttagaacttatctacaaggaagtaatgaattcagaagaaaagactaaaaatggtgtagtaaaaggacagccttctccttcagcttgcagggaggtgtggagggagaggcacgagcgggaacccgggctgcgtgcggcgcttgcgggccagctggagttgcaggtaggcgtgggcttggcgggcccccgcactcgggacagccagccagccctgctggccccgggcagtgagggacttagcacccgggccagtggctgcggaaggtgtactgggtcccccagcagtgccggcccaccggcgctgtgctcgatttctcgccgggctgtagctgccttcctgcggggcaaggctcaggacctgcagcccgccatgcctgagcctcccacccactccatgggctcctgtgcggcccgagcctccccgacgagcaccaccccctgctccatggcgcccagtcccagcgaccacccaagggctgaggaatgcgagcgcacggcaccgggactggcaggcagctccacttgcagccctggtgctggatccactagcccgagcctccccgatgagtgctgtcccctgctctactgcggccagtcccattgaccacccaagggctgaggagtgcgggcgcatggcgcaggactggcatgcagctgcacctgcagtcccggtgcagaatccagtgggtgaagccagctgggtttctgagtctggtggggacgtggagaacctttatgtctag

SEQ ID NO: 125612 - DNA, 906 bp, Homo sapiens
  misc_feature (1)...(906): n = a,t,c or g
atgggctcgccaggggtccacaggaaaacaggaaccaataaaatggatggatggattggagggatggatggaaggaatggatggatgaatagaggtgaagtcccaaagtctgctgtctgcaaggctgtatacccaggaaagtctgtggtattgttcaaaggcctgagagccagagaggcaacagatggtgtagattccactcaagatctgaaggctggagaactaggagcactgaaaaccactgaggaccggagattgatgtcccagcttaaggagnatgaattaaaccttgctgattctgaagtggataaccaaaaacgagggaaacgacattatgaagaaaaacaaaaagaacacttggataccttaaataaaaagaaacgagaactggatatgaaagagaaagaactagagaaaattcagaaatttggaggcacagtagttaggattcaggccaaactggtaaatgacgaaggggcttcttccagagccaaggaggaagggttgtccggttgctttgacagcatcttggcaagattccctaaattagcgacactctctgttattggttatcagaacagactcatttcagaactggttggcaggtccaggtggggccatctgttgttagaaatgcaaaaatctgaaaagacatctcaaaaagcagatcttaggttcacaatagtgatgttaccttcaagagtgattgaggaagttgcaaattttatgaccgccaaaaaaatcattcggaatatggcaaacacaagacaaaataacctagagtgtaccaaccaccgagtgcatgataaaagctcaggacctaattttgaaggtcctccaatgcccagcggaggagtcaacactgtttccactaggtaccgaggggcaggaaacagagaagagtga

SEQ ID NO: 125613 - DNA, 768 bp, Homo sapiens
tcatggtaaacggcatccttttgcttccatgtttagagctcccttgagtattccttgtagggccagtgtagtgatgaggaatttccgcagcttttgcttatctggatgtgaaaagtaaagtagaggttcctctttgaaggctttcctccccatctttctcagcattccacaagttacttcctccttcctttggtctcctctgcctttgcctcttttaaaaagttctaagttgctagccagttgggacaaatacagaatgtgagatcccattccagccaatggaaaccggacacagcagcagggtggatgcgtcaggttataaatgaccctgtctcctttgttcagtgtactctcgtggcaaaactgctggcgagtgtacccttttttaagttcatcattttctttcatcactttgtccagtgaatttaggagcaaacaaccaacttcattatattccttggttctccacagatggttaaaggtattatgtatagagtcactaaactccttgcctctcaagagcggtgaatcaggagtatcaaatgcatttattttgcttaactctccaaacaggcatgtaagaatacgcagtatttgtttttctgctactgtggcattttgcttaggaaaatggcttctagctccatccatgttgctgcgaatgacatgatcatgttcctttttatggctgcatagtgttccatggtgtatatgtaccatattttcattatccaattcacagtggatgggcaccgaggttgattccat

SEQ ID NO: 125614 - DNA, 648 bp, Homo sapiens
atgggaccaaatagcaccttagagaacctcctgaagggggccacttcggtcttttataatagggaccaggaggaggcccaaaagaaagagagaaagctcaggggaaggacaaaggctctagcagcagctttgcaggctggcaaagtccaggagccccaagatgcatccattagttgctatcagtgtggcaggccagggtattttaaagaggaatgcccaggcagcaagacgaagccacctcaaccctgtccatccagtggcaaaaaccagtggagacagaactgtccccagatatggaggtcactgggttcagagccagtctcacagatgaaagggtacacttgccagaagttttgccacaagagtacaccgaacaaaggaggcagggtcatttataacctgacgcatccaccctactgctgtgtccagttccagtttccattggctggaatgggacctcacattttgtatttgtcctgattggctagcaacttagaacttttaaaaagaggcacagacctagaagtagagcatcattctaaatcctcaccacgtgcaaccttgttagacaagtacgacaaccagatctctgacctctctttgacatctctggctttccaggcttttgtagcctttttaccaacttag

SEQ ID NO: 125615 - DNA, 1135 bp, Homo sapiens
  misc_feature (1)...(1135): n = a,t,c or g
atggagaaaatccccatactgaggagcctccgcgcccgagagcagcaggctgggaaggatgtcaccctccagggtgagcaccagcaccttccggaaccaggctgccagcagacagtgcccctgagtgttggcaggaggcccccggacacacccggaccagaaaccaattccatggaggcagcccctggctccccaccaggggaggggtgccccgcttgcagccgatgtttacgttgggaacctccccggggacgcccgtgtgagtgacctgaagagagccctgcgggaactcggctccgtgcccctgcggctcacctggcagggcccgcggcgcagagccttcctccattacccggactctgccgcagcccagcaggccgtctcctgcttgcagggcctgcgcctgggcaccgacaccctgagggggaggcctgtggggacagttcccaaggagcgtggctggagaatcgggaagggagaaggctacgccgatctggaatatgccatgatggtatccatgggcgccgtcagcaaggagacgccggtggtcaccatcgtccacgactgccaggtcgtggacatccntgaagagcttgttgaggagcacgacatcactgtggactacatcctcactccaaccagagtcatcgccacaggctgcaagcgcccaaagcccatgggaatcacctggttcaagaccagtctaatacacgctctgtttgagtgcagttactgtaaacagcgcatctccttgattgaccatcaacatccggtgggctcttctcagcttgtgtctcatgattttaaagaaaggaaaccaggtggccactacaccaaggatctctgccaggctggagatggtaccagagacctgggcctgaagctggaacgtggtcctgaacctctgggcagttcgtccagctccattgatcttctgatccttggagacagtcgtgcgatgtctctccctgtgacagccgtgtgtcagtggcagatgggagtcaatgcaacagagaccatacggcacacagagatgaaaatatttactatccagaccttcacaaaaggtttgccaacccttgccttagaaaaaagagaagctatagtatctatcaaacaaagacagcaagaatag

SEQ ID NO: 125616 - DNA, 840 bp, Homo sapiens
atggaagcaggcgaggcctcaagctctgaggaagagcctccatctccagaggacaaagaaaaccaggtccccaaacgggttggtccacacctgcgctttgagatcagcagtgatgatggcttcagtgtggaggcagagagcttggagggaatgagtggagcgcggctcctgggcatccaccacgatgctgtcatcttcctggcagagcagctccctggggcccagcgctgccagcattataagttccgctaccaccagcagggagagggccaggaagagccacctctgaatccccatggggctgctcgtgctgaggtctatctccggaagtgtacctttgacatgttcaacttcctggcctcccagcaccgtgtgctccccgagggagccacctgtgatgaagaagaggatgaggtgcagcttcggtccaccagatcagctatccatggacgaggtctgttttgtaaacgcaacatcgatgcgggagagatggtcattgagtactctggcattgtcattcgctctgtgctgactgacaagcgagagaagttctatgatgggaagggtattgggtgctacatgttccgcatggatgactttgatgtggtggacgccaccatgcacggcaatgctgcccgattcatcaaccactcatgtgagcccaactgcttctctcgtgtcatccatgtggaaggccagaaacacattgtcatctttgccttgcgccgcatcctgcgaggtgaggagctcacctatgactacaagtttcctatcgaggatgccagcaacaagctgccctgcaactgtggcgccaagcgctgccgtcgctttcttaactga

SEQ ID NO: 125617 - DNA, 1054 bp, Homo sapiens
ttgccagcactataagttccgttaccaccagcagggagagggccaggaggagccgcccctgaatccccatggggctgctcgggcagaggtctatctccggaagtgcacctttgacatgttcaacttcctggcctcccagcaccgggtgctccctgagggggccacctgtgatgaggaagaggatgaggtgcagctcaggtcaaccagacgtgccaccagcctggagctgcccatggccatgcgttttcgtcaccttaagaagacgtccaaagaagctgtgggtgtctacagatcagccatccacgggcgaggcctgttctgtaagcgcaacatcgacgcgggggagatggtcatcgagtactctggcattgtcatccgctcggtgttgactgacatgcggaagaagttctacgatgggaagggcatcgggttgctatatgttctccatggatgactttgatgtagtggacgccacgatgcatggcaatgccgcccgcttcatcaaccactcctgtgagcccaattgcttctctggggtcatccccggtggagggccagaaaacaaaattgttatcttcggcctgcgccgcatcctgggtggtgaggaggtcaaccttcggactaaaaagttccccatcgaaggatgccaagaaacaagttgccctgcaaactgtggcgccaagcgctgccgtcggttccttaactgaggccgtggctgccccaccacgacccctcacacctcctgatgccgtcgttgccattttgcccctagcctgggggctcccctagcccctcccaagagcatctcacaacccaccctcatgttacagggtggatgtgggcatgcaggtgaccaagggccctgcctccacccctccagcccatccagcaatcgccccctttctgccctgggggcccaggatgtaaatattgtacaaaggtttctaaatcccttcttttctatgcacttttttatttaagaaggtggggtcccaggtgggaacccccccacaaataaagtctgtcaatgtttgggaaaaaaaaaaaaaaaaaa

SEQ ID NO: 125618 - DNA, 1050 bp, Homo sapiens
ggtttattttccagatgcaatcaatgccccagtcacctgctgttataacttcaccaataggaagatctcagtgcagaggctcgcgagctatagaagaatcaccatcagcaagggtcccaaagaagctgcgatgtgagttcagcacaccaaccttccctggcctgaagttcttccttgtggagcaagggacaagcctcatagaacctatagtcacatagtgcactatttaacttaatgtacaaaggttcccaatgggaaaactgaggcaccaagggaaaaagtgaaccccaacatcactctccacctgggtgcctattcagaacaccccaatttctttagcttgaagtcaggatggctccacctggacacctataggagcagtttgccctgggttccctccttccacctgcgttcctcctctagctcccatggcagccctttggtgcagaatgggctgcacttctagaccaaaactgcaaaggaacttcatctaactctgtcctccctccccacagcttacagaccattgtgggccaagggagatctgtgctggaccccaaggcaggaagttgggtttcagggtttccatgggaccacctggggcaaggcaaacccaaactccttgaagacttgaacactcaactccacaaccccaagaatctggcagcctaaccttattttcccccctagctttcccccagacacccctgttttattttattaataaatgaattttgtttgttggatgtggaaacatttatgcccttaagtaatggttaattccttatttaaggttattggatgttttaaagtttatcctttccatggtactaagtgttttttagatacagagaccttggggaaattgcttttcctcttttgaaccacagttctaccccctgggatgttttgagggtctttgcaagtatcattaatacaaagaattttttttaacattccaatgtcattgctaaaatattattgtggaaatgaatattttggtaactattacaccaaataaatatatttttgtacaaaaaaaaaaaaaaa

SEQ ID NO: 125619 - DNA, 551 bp, Homo sapiens
gccattttgtatgccaagagggccagtgtcttcgtcaaattacagaagccaaatgctgccatccgagactgtgacagagccattgaaataaatcctgattcagctcagccttacaagtggcgggggaaagcacacaggcacagaaaattgcagaacatcggagaaagtatgagcgaaaacgtgaagagcgagagatcaaagaaagaatagaacgagttaagaaggctcgagaagagcatgagagagcccagagggaggaagaagccagacgacagtcaggagctcagtatggctcttttccaggtggctttcctgggggaatgcctggtaattttcccggaggaatacctggaatgggagggggcatgcctggaatggctggaatgcctggactcaatgaaattcttagtgatccagaggttcttgcagccatgcaggatccagaagttatggtggctttccaggatgtggctcagaacccagcaaatatgtcaaaataccagagcaacccaaaggttatgaatctcatcagtaaattgtcagccaaaaaa

SEQ ID NO: 125620 - DNA, 807 bp, Homo sapiens
atggagaacagcaagagcaaggacctagggacaaggtactcagaggacccaagaccttccatctgcgacactgccctatcaaacaccctggaaggggatgagagctgccgctcatcagattccccagaagcagactttgagatggagttgtccgcatacctcatccttcctgaatgtgggacaagaactcaggacctgctgaatggtgggactggaagacctgtaacacaaacagggctgaaacacatccccctgcttgccacattgcagggctctgtagtttctggcatctttgagctttcaggtgctatcatgttccccctgcccagacactggtgcctgcagcagaagccacttgtggtatgtctggttcagctgcagccttgcatggaggcggtgcctgtgccagtgcctggagctgcctgcgccactgcagcagctggggtctgcaggagtgaggtcacccatgctgtctggcagctgagggtcaggcagccagaagatgagggcagcaaggaagacctgccacatacaaaattggtgcctgtcaagtggaactcatttttcaagcggcttcaccgcccctttcatggaatgggagggggcatgcctggaatggccggaatgcctggactcaatgaaattcttagtgatccagaggttcttgcagccatgcaggatccagaagttctggtggccttccaggatgtggctcagaacccagcaaatatgtcaaaataccagagcaacccaaaggttatgaatctcatcagtaaattgtcagtcaaatttggaggtcaagtgtaa

SEQ ID NO: 125621 - DNA, 1675 bp, Homo sapiens
ctgcaggaattcggcacgagcggtcacgccgagccagcgcctgggcctggaaccgggccgtagccccccagtttcgcccaccacctccctaccatggacccccgcaaagtgaacgagcttcgggcctttgtgaaaatgtgtaagcaggatccgagcgttctgtacaccgaggaaatgcgcttcctgagggagtgggtggagagcataggtggtaaagtaccacctgctactcagaaagctatatcagaagaaaataccaaggaagaaaaacctgatagtaagaaggtggaggaagacttaaaggcagacgaaccatcaagtgaggaaagtgatctagaaattgataaagaaggtgtgattgaaccagacactgatgctcctcaagaaatgggagatgaaaatgcggagataacggaggagatgatggatcaggcaaatgataaaaaagtggctgctattgaagccctaaatgatggtgaactccagaaagccattgacttattcacagatgccatcaagctgaatcctcgcttggccattttgtatgccaagagggccagtgtcttcgtcaaattacagaagccaaatgctgccatccgagactgtgacagagccattgaaataaatcctgattcagctcagccttacaagtggcgggggaaagcacacagactttttaggccactgggaagaagcagcccatgatcttgcccttgcctgtaaattggattatgatgaagatgctagtgcaatgctgaaagaagttcaacctagggcacagaaaattgcagaacatcggagaaagtatgagcgaaaacgtgaagagcgagagatcaaagaaagaatagaacgagttaagaaggctcgagaagagcatgagagagcccagagggagggaagaagccagacgacagtcagggagctcagtatggctctttttccaggtggctttctggggggaaatgcctggtaattttccccggaggaaatgcctggaatgggagggggccatgcctggaatgggttggaatgcctggactcaatgaaattcttagtgatccagaggttcttgcagccatgcaggatccagaagttatggtggctttccaggatgtggctcagaacccagcaaaatatgtcaaaataccagagcaacccaaagggttatgaatctcatcagtaaattgtcagccaaatttggaggtcaagcgtaatgtccttctgataaataaagcccttgctgaagggaaaagccacctagatcacccttagggatgtcgcaataatacaaaccagtgttacctctggaccttcttcattcaaggagagctgggggtgctttggaaggattaatcccttacccctctcccccaaatgcagctggaaggctttttacagtggtttgccattaggggtattcctttcaggtaatgttttcctattagggattacaaactttaaacactttttaaatcttcaaaatatttaaaacaaatttaaagggcctgttaattcttatatttttctttactaatcattttggatttttttctttgaattattggcagggaatatacttatgtatggaagattactgctctgagtgaaataaaagttattagtgcgaggcaaacataactcatttgaggataaagtttgtgttggatatgtgaaa

SEQ ID NO: 125622 - DNA, 356 bp, Homo sapiens
gtcaaagccaaaattcaagacaaggagggtatcccacctgaccagcagcgtctgatatttgccggcaaacagctggaggatggccgcactctctcagactacaacatccagaaagagtccaccctgcacctggtgttgcgcctgcgaggtggcattattgagccttctctccgccagcttgcccagaaatacaactgcgacaagatgatctgccgcaaaagtgtggtcacaccaacaacctgcgtcccaagaagaaggtcaaataaggttgttctttccttgaagggcagcctcctgcccagccccgtggccctggagcctcaataaagtgtccctttcattgactggagcagcaa

SEQ ID NO: 125623 - DNA, 403 bp, Homo sapiens
agaatgtcaaagccaaaattcaagacaaggagggtatcccacctgaccagcagcgtctgatatttgccggcaaacagctggaggatggccgcactctctcagactacaacatccagaaagagtccaccctgcacctggtgttgcgcctgcgaggtggcattattgagccttctctccgccagcttgcccagaaatacaactgcgacaagatgatctgccgcaagtgctatgctcgccttcaccctcgtgctgtcaactgccgcaagaagaagtgtggtcacaccaacaacctgcgtcccaagaagaaggtcaaataaggttgttctttccttgaagggcagcctcctgcccaggccccgtggccctggagcctcaataaagtgtccctttcattgactggagc

SEQ ID NO: 125624 - DNA, 489 bp, Homo sapiens
ttatgaagatttttcaactttcttggtggaataccacttaatctgggccaaaaggaatgaccctagccagactcagggatcaaagagcaaacagattcagtggcctgcattgactttcaaacctctggttgaaagaaatatacccagttcagtcactgcagtagaattccttgtagataagcaactggattttttaactgaagatagtgcctttcagccctaccaggtaagaaattttagattactttttaaaattaaaggttaattaaactttattgatattcagacattctttaaacaatattctttaaatatcatttcatctaacttctagttgtgtgaaaaacccaatgaatgcagtcagttgattttgcttataggataaacggtttattaattcaattaacaatatatactgagaacctactatgagccaggcagtgttctgtgcaaggaatacagaatacgaaatcgtcgacccgggaattc

SEQ ID NO: 125625 - DNA, 2112 bp, Homo sapiens
atgatccgcctgccttggcctcccaaagtgctgggattacaggtcacggcagttgcacaacagaatcaaggagaggtccctgaaccccaagatatgaaagtggctgaggttctctttgatgctgcagatgcaaatgccattgaggaagtaaaccttgcttatgagaacgtcaaggaagtggatggactggatgtttccaaagagggcacggaagcctgggaggctgctatgaagaggtacgatgagaggatcgacagagtggagacccggatcaccgctcgccttcgggatcagcttggcacagccaagaatgccaacgagatgtttaggattttctccaggtttaatgcactgtttgtcaggcctcacatccgtggggccattcgcgaataccagacccagctgatccagcgcgtgaaagatgacattgagtctcttcacgacaagttcaaggtccagtacccacagagtcaggcttgtaagatgagtcacgttcgtgacttgccccctgtgtcagggtctatcatctgggctaaacagatcgacaggcagctgacggcctacatgaagcgggtggaagatgtccttggcaagggctgggagaatcacgtggaggggcagaagctgaagcaggatggagacagcttccgcatgaagctcaacacgcaggagatctttgatgactgggcaaggaagcacgccatagtgactggcgatgctgtcggaatggacgatatcccgcaagaggcccggcagtaccggcataaccaagcctatgcctacagcatccagggtgacggtgccgaggatgacgatgagcgcattgttagatttcatacacgggtcaccgtcgacagcgacacacttgcatcggatgcagcccggttaacgtgccggcacggcctgggtaaccagtacacagtgtatagtcaagccagcaccatgagcattccggttgcaatggagacagatgggcctttatttgaagatgtgcagatgctgagaaagacagttaaggacgaggctcatcaggttctccagctctatcagatcacccagatcaatcatggcctgatgatggtggggccctcgggaagtgggaagagcatggcctggcgtgtcctgctgaaggcattggagagactcgagggtgtggaaggtgtggcccatatcatcgaccccaaggccatcagcaaagaccacctctacggaaccctggaccccaacaccagggaatggacagatgggctcttcacacacgtgctgagaaagtacgtcttctttgatctgtctattttaaaatccttcccaaccaggatcatcgacagcgtgagaggcgagctgcagaagcgccagtggatcgtcttcgatggcgatgtggatccagagtgggttgagaacttgaactcagtgctggatgacaataagctcctaactttgcccaatggagagcgcctcagtcttccacccaataaactacccacccccccaccaccccccaaccatctgtggaaaaatcgtcttccacgaaactggtccctgttgccaaaaatgttgagggccactgatatagaaagcaaagcaaagcatggtctaaaacaggctttggaaactgtgaatgactacaatcctctgatgaaagatttccctctgaatgatttgctgtctgccacggagctggacaaaataagacaggcgcttgttgccattttcacacatttgagaaagatccgaaacacaaaatatcctattcagagggcactgcgtttggtggaggcaatttcaagagacttgagttctcaattactcaaagtattgggcactaggaaattgatgcatgttgcttatgaagaatttgaaaaagttatggtagcatgctttgaagtttttcagacttgggatgatgagtatgagaaacttcaggtattgttgagagacatcgtcaaaagaaaaagggaagaaaatctgaagatggtgtggcgtatcaaccctgcccacaggaagctgcaggcccgccttgaccagatgagaaaatttagacgccagcatgaacagctaagagctgttatcgtcagggtcctgaggccacagagtgctggattacatgcatga

SEQ ID NO: 125626 - DNA, 448 bp, Homo sapiens
ccacgactagagagtgctcatgccagcagcttgagccacttagcgctagcacaccagcaacaacaacagttgttacagcaccagtcacctcatcttcttggacaagcccatccttctgcttcatataatcagcttggactttatccaattatttggcagtatccaaatggaacacatgcatactcaggacttggtttgccttcttctaagtgggttcacccagaaaatgcagttaatgctgaagcttcattaaggaggaattctcccagtccttggctacatcagcccacccctgtgacctcagcagatggtattggattacttagtcacattcctgtcagaccttccagtgcagacgctcatcggcctcttaaaattacagcccattccagtccaccattgacaaaaactttagtagatcatcataaggaagaattagaaagaaaaa

SEQ ID NO: 125627 - DNA, 2435 bp, Homo sapiens
atgggtaacgttagaccttcaagagaagacagggacaagcggactcacaatgtgctgttttgcataaaagcatgtgacagggcaaggaggaagggaagtccaggtggggaaagcagagccaaggtggccgcgcagctgccagtggcttgggtgccactccacatgtcacagaagccttcacgtccctgccaggaacagagcatgaaggctgccagggcggcctgccatgcctctgatgagggagttcagtgccaggacccactcaggccttcagctgcaggcccagccccccaactcgccctcgtctgtgtcccccacgcacgcttgcgcccatcttggcttctgcttcttagaggacctgatcagcacagacgaggctgtgtgggacctgctcatgctcttatctcacagagacacgccatcataccgtccccaccatcaccaggatgtgtcactacctcgcaacatcctggagtcagatgccttagaggcaagctgaccagagaagctcgacgcggtacctccacccgtgtatattatgagcgcagacgagcacaacgagcaagaacgcaaacaaaacaaaaaccgcagagaaaacagaaccacacagagaaagcaaagaaatcaagtaaaatacagacaaaaagcagcagcgaattccagtacgacaaaaagcgaagagcccgaagagaagcccatgcctgtatcccagcagctcaggaggcaaggcaagaaaatcgcttgaacacgagagacggacgaggcaaactatctgcagatcctggcatgagtcttcacccgggcgaagtacgagcagacgagtccaaaccaacgccgacgacagcagattccgaaagcgaggccagacagacaagagtacgcagcggcaccaccggcagcgacggacgggccccgaggtcacgcagagagcagtctagacgggggccccacgcacgcaccaccacgcgaggaacagacgacgcgggcagggcaaggaccgcacacgacggggcacccggacgaagacacgataccatacgagaactcacgcaagccggcagcccgagacacgacccgcagcatcggagcgccagcgcggcgacggatgcgcagagcgcgaggcgaacgcgctccgcaaaagagaacgacagcgaacacacccccacccacccaccccccacagggagaaaatggtctggaatgacacacagcaaactccaggcagcagtcactttgagatgtggggatggtagaccaatctcaggggataagtacacagtgtatagtcaagccagcaccatgagcattccggttgcaatggagacagatgggcctttatttgaagatgtgcagatgctgagaaagacagtgaaggacgaggctcatcagactttcaaacctctggttgaaagaaatatacccagttcagtcactgcagtagaattccttgtagataagcaactggattttttaactgaagatagtgcctttcagccctaccagaattctcccagtccttggctacatcagcccacccctgtgacctcagcagatggtattggattacttagtcacattcctgtcagaccttccagtgcagagcctcatcggcctcttaaaattacagcccattccagtccaccattgacaaaaactttagtagatcatcataaggaagaattagaaagaaaagcttttatggaaccattacggtctgttgcatccacatcagccaaaaatgacctggatctaaataggtcacagactggaaaagattgtcacttacataggcattttgtggatccagtattaaatcagttacagaggccaccccaggagactggagagaggttaaacaaatacaaagaggaacaccgtcgaattcttcaagaaagtattgatgttgctccctttacaacttaaaatcaagggacattgagggtgagagagagaattattccagagtggcatcatcatcttccaagtcctaaaagccatatcatcaaacaagatattggatgtagaacgctcagtatcagatctttataaaatgaagcactcagtgcctcagagtttaccccaaagtaactatttcactacattgtctaatagtgtggtcaatgaaccaccaagatcgatacccatccgaaagaagtttcaaatatttacgggtgataaacagagtaatgcccttgcagcggcagcagctaatcctcaaactctgacttcatttataacatctctttcaaagcctccacctttgattaaacaccaaccgagaaagtgaaggtttagaaatggataagcaaatggtgttacttttatataatgagacaacactgagaaggaaaaggaacaaactgtgtgacaacatggacgaatgtccaatgcatcaagctaagcgaaagaagctagacccaaaggctatacactga

SEQ ID NO: 125628 - DNA, 481 bp, Homo sapiens
atggtgggcaaacgtcagtacacatttgtccaaaccacagaatgcacaacgagtgagccctcccagctgcttagtgtccgcgaggaggccgtccggatgcgcgatgattcaggccttctccgccagctccacccgggacgcgagcacccggcgtggacctctgcgtcccgggcccacgacgcccgcgcgggattccggggcagacgcaggggggggacaccagctggctcctctgactcagtaccagaatcggcactggagggcagacctggggccaccgtctcctgccctacctgagcaggagttccatgggaaacctctatggagaatcggctgcggctgcccttgtgatggacattctcatccaagttatctcccatgtacctctgaggactcaggacacccctgcacggcggccgaccctgacagctgcttcacgcctgtgtctccgcagcacttcatcgacctcttcaagttttaa

SEQ ID NO: 125629 - DNA, 1142 bp, Homo sapiens
ctaattttaacttctgtgttgcttttccagaggcatggctattgcaccttgggagaagcctttaatcggttagacttctcaagtgcaattcaagatatccgaacgttcaattatgtggtcaaactgttgcagctaattgcaaaatcccagttaacttcattgagtggcgtggcacagaagaattacttcaacattttggataaaatcgttcaaaaggttcttgatgaccaccacaatcctcgcttaatcaaagatcttctgcaagacctaagctctaccctctgcattcttattagaggagtagggaagtctgtattagtgggaaacatcaatatttggatttgccgattagaaactattctcgcctggcaacaacagctacaggatcttcagatgactaagcaagtgaacaatggcctcaccctcagtgaccttcctctgcacatgctgaccaacatcctataccggttctcagacggatgggacatcatcacctttaggccaggtgaccccccacgttgtatatgcttagtgaagacagacagctgtggaagaagctttgtcagtaccattttgctgaaaagcagttttgtagacatttgatcctttcagaaaaaggtcatattgaatgggaagttggatgtaactttgcaactttcaggaaacattacccagcgaaggagcagtacgggagacaacactgcattttctgtcggcactgcagcattctcttttggaaggactcaggacatcccctgcacggcggccgaccctgacagctgcttcacgccttgtgtcttcccagcaattcatcgccctcttccaggttttaagggctgccccctgccatccctattggagatttgtgaatcctgctgtctgtgcagggctcatagtgagtgttctgtgaggtgggtggagactcctcggaagcccctgctttcagaaagcctgggaagaactgcccttctgcaaaggggggactggatgggtgcattttcatcacttgaaggccgaaggccaaggaaatcatttttacttctttaaaaactccttctaagcatattaaaatgggaaattttgcgtactctctctctctctatatatatagttcaaaaataaaaaaaaaaaaaaaaggtttt

SEQ ID NO: 125630 - DNA, 1038 bp, Homo sapiens; identical to SEQ ID NO: 120543

SEQ ID NO: 125631 - DNA, 652 bp, Homo sapiens
atccttaattaaattaatcccccccccccgccctttcggccggaaccgccatcttccagtaattcgccaaaaatgaacgaacacaaaggggaaagaggagaggcaacccgatatatgttctctaggcccttttagaaaaccatggagttgttcctttgggcccccatatatgccgcatctcataggaaaggtgatattgtagacactcaagggaatggggtactgttcaaaaaaggaatgccccacaagtgttacccatggccaaaactggaaggagtcttacaattgttaccccagcatgcttgttgccattgttgtaaaccaaccagttttagggcaaagttttttcccaagagaataaattgtgcgtattgagcacatttaagcactctaagagcccgagataagcttccctgaaaccgttttgaaggaaaatgattcagaaaaagaaagaagcccaaatgagaaaggtacctggggttccaacttaaagcgccaccttgctccaccccagaagaagcacactttgtgaagaaccaatgggaaggagcctgagcttgctggaacctattccctatgaatttcatgggcataataggtgttaaaaaaaaaaaataaaggacctttgggctacaaaaaaaaaaaaaaaaaa

SEQ ID NO: 125632 - DNA, 559 bp, Homo sapiens
atgatgaatacaaaggcaaaaaggaaaggcactggatatatgttctctaggcctttacaaaaacatggagttgttcctttggccacatatatgctaatctataagaaaggtgatattgcagacatcaagggaaggggtactgttcaaaaaggaatgccccacaggtgttaccatggcaaaactggaagagtctacaattttacccagcatgcttttggcattgttttaaacaaacaagttaagggcaagattcttgccaagagaattaatgtgcatattgagcacattaaacactctaagagccgaggtagcttcctgaaatgcgtgaaggaaaatgatcagaaaaagaaggaagccaaagagaaaagtacctgggttcaactgaagcaccagcctgctccacccagagaagcacactgtgtgagaaccaacgggaaagagcttgagctgctggaatctattccctatgaattcatgcataataggtgttaaagaaataaaataaaagacctctggactatttaaaaaaaaaaaaaaaaaaaggccaggcgcggtggct

SEQ ID NO: 125633 - DNA, 536 bp, Homo sapiens; identical to SEQ ID NO: 120551

SEQ ID NO: 125634 - DNA, 691 bp, Homo sapiens
  misc_feature (1)...(691): n = a,t,c or g
cccacgcgtccggaaattatgagtttatcaagttggaaaggaacgccttagtgcaaagtttaattattgatgaagattactattactatgattaaaaaccctcctagtgaaagctgtgttcttctgtgacctggatttaaatgtatcttggcactcgagcttaatgatgactgttttttttgattgcttgaagcaatgtgaaaaacacatttcaccggctctgaaagctcttgagttgccatttgaaagaaatcttagaatactttacagttacttaaagtcagaattttaaaggaaggggaaatgctggtatataacattggtttctttaatagggaatgggtactgttcaaaaaggaatgccccacaagtgttaccatggcaaaactggaagagtctacaatgttacccagcatgctgttggcattgttgtaaacaaacaagttaagtaagtagtgttgtagttctttgtggctaaccagtattccctcatatacccccttttcactttgccagttggacttatgtctttattggtcattcaagtggggcaaaggaaatatccttttaaaactcaggcaaactgggtgtttgtctgtatcctgtcagaggaaacaaattgaaatagatttactggaaagtcttacacagttagttactaagcggnttgtttgttttgtttcgagacgga

SEQ ID NO: 125635 - DNA, 686 bp, Homo sapiens
tgggcctttcggccggaaccgccatcttccagtaaattcgcgcaaaatgacggaccacaaaggggaaagaggagaggcaccccgatatatgttcctctaggcccttttaggaaaaccatggagttgtccctttggcccacatatttatgcgaaatctataagcaaaggtgatattgttagacatccaaggggaatggggtactgttcaaaaaagggaatgccccccacaagttgttacccatggcaaaaacttggaagagtcttacaatgttaccccagcaatgctgtttggcattgtttgtaaacaaacgaagcttaagggcaacgattctttgccaaggggaatttaatgtggcgtatttgagcacatttaaggcacttttaaggagcccgagataagcttccctgaaaacgtgtggaagggaaaatggatccaggaaaaaggaaaggaagcccaaaggaggaaaggttacctgggggtttcaacttaaaaggcgccaccttggcttcccaccccaggaggaagccacatttttgttgaaggaacccattgggggaagggagccttgagcttgcttggaaccctatttcccctattggatttcatggggcattaataggtgttaaaaaaaaaaataaaaaggaccctctgggctacaaaaaaaaaaaaaaaaaaaagtcgacgc

SEQ ID NO: 125636 - DNA, 843 bp, Homo sapiens; identical to SEQ ID NO: 125328

SEQ ID NO: 125637 - DNA, 1254 bp, Homo sapiens
  misc_feature (1)...(1254): n = a,t,c or g
actgagatcgctagacagtgcggnggaattcgaagaagaggcgagaacgacccccggaccgaccaaagcccgcgcgccgctgycatgcccgsgtkccagcacctacgtcccgctgccgtcgccgccgcgcaccattgcccaaaaaaaaggctgaaggggatgctaagggaaataaagcaaaggtgaaggacgaaccacagagaagatccgcgaggttgtcgtgctaaacctgctcctccaaagccagagcccaagcctaaaaaggcccctgcaaagaagggagagaaggtacccaaagggaaaaagggaaaagctgattgctggcaaggagggggaataacccttgcagaaaaatggagatgccaaaacagaccaggcacagaaagcttgaaggtgcttggagatgccaagtgaagttgtgtgcattttttgattaactgtgttacttctgggtgactgtacagtttgaaaatactattttttatccaagttttattaaaaatgcagaatttttgttttactttttttttttttttttaaaagctatgttgttagcacacagaaacactttcattgttgtttttttgggggaaagggggcataatgtcactaataagaatgtctccaaagctggattgatgtgggagaaaacacctttcccttctaagttttgagagacttcctcttggctcccaggaggagggattccctgactttgacacacatggccaccttggcacaaaaagccttgtggtatagaaaaacaaatttgtttttatgtcctcttctccctttccatctttcagcatagacttaactcccttaagcccagacatctgttgagacctgacccctagtcattggttaccagtgtgtcaggcaatctggactttccagtgatgccactgagatggcacctgtcaaaagagcagtggttccatttctagattgtggatcttcagataaattctgccattttcatttcacttcctgaaagtcagggtcggcttgtgaaaagttgttaaacaacatgctaaatgtgaaatgtcaaccctcactctaaactttccctgttcagagcatcagatgaagacttcattgggttttatagtggctttctgatttttggtagtccattgaagaagggagtttgaaagttgttgtatactgttaacgattgtctgcccatgtcctgcctgaaataccatgattgtttatggaaagtatctttaataaagctggatacagtttggc

SEQ ID NO: 125638 - DNA, 493 bp, Homo sapiens
tgcggccgctcctgctgctgctactgccgccgccgcagcggctgctcgggctgagcacgccccggaacaggccgccgcgcgctgcgcgccggacccgctgcccctgccggcccggccgggtcgggcggcccgagggaccgacagacttgacaacgtgtgacagcactggggcggcaccttcctacttctgcccagccacagtcctcccctcacagttgagcacctgtttgcctgaagttaatttccagaagcaggagtccccagagccaggcagggggatgaaccgcgaggatgctcccgagaagagtctcggagcagatgtacattcagcagaaggtccgagtgctgctcatgctgcggaagatgggatcaaacctgacagccagcgaggaggagttcctgcgcacctatgcaggggtggtcaacagccagctcagccagctgcctccgcactccatcgaccagggtgcagaagacgtggtgaatggcgttt

SEQ ID NO: 125639 - DNA, 759 bp, Homo sapiens
ttctgttggtcaagatttaaaaaaaaaaaaagtttcttcctgcagccaatcacaagtccatccctttaagccaattataaacgcaccactggtgtctcccttgatgccagccccactgagtagctgtgaggtggggtggggcagggcagggttgggtaggggaaggcggaggtggggcaaggggggctgctgccactcagccggcccaggagccacaacagatctcttggccctcaacagcatccaggggtgttccaagggctttgcagctactgcctccggtcttccgtctccgacctggaaaacgccatcaccacgtcctctgcaccctggtcgatggagtgcggaggcagctggctgagctggctgttgaccacccctgcataggtgcgcaggaactccttcctcgctggctgtcaggtttgatccccatcttccgcagcatgagcagcactcggaccttctgctgaatgtacatctccttcaggactcttcccgggagctccctcgcggttcatccccctgcctggctctggggactcctgcttctggaaattaacttcaggcaaacaggtgctcaactgtgaggggagggctgtggctgggcagaagtaggaaggtgccgccctgggccgcccgacccggccgggccggcaggggcagcgggtccggcgcgcagcgcgcggcggcctgttccggggcgtgctcagcccgagcagccgctgcggcggcggcagtagcagcagcaggagcggccgc

SEQ ID NO: 125640 - DNA, 1002 bp, Homo sapiens
atgcatgccttgcgctccccaacacgaggagcccgatgtagctctcaggccctggcggcaccttcctacttctgcccagccacagccctcccctcacagttgagcacctgtttgcctgaagttaatttccagaagcaggttaggtccctgctgcatgtggacacgctgctggccttcccagctgcctgcaggagctaccctctgacaggtagaaacaaccagcagtccaggtcatctcagttttcctggacgcagcagcttcatgcacagaggcagcaggcagtccagcccttgcagcgcctgctggagaacagagctgctcagttcagcctgctgggaccagcatgggagtccccagagccaggcagggggatgaaccgcgagggagctcccgggaagagtccggaggagatgtacattcagcagaaggtccgagtgctgctcatgctgcggaagatgggatcaaacctgacagccagcgaggaggagttcctgcgcacctatgcaggggtggtcaacagccagctcagccagctgcctccgcactccatcgaccaggggagggtcgctttgaccccagctgcttactcagcacctggctgcggctccagggagggtcgctttgaccccatcaccccgcgtcatgggttctgttgtttagaactgagaacagatgcccgaatggcctcagagaagtccttgtgggactctacacttcccccctcaagccctggggcaaagctggcattgggcataggatgggagggcctgctggataccctgtcctggtttagaaagctgcgcctttgccagtgtcctggccctggtttccagggcagcctttctgagtttcttcctagcgaggccgagagggtctttgaggaaaatcccgcatccggacacgccttgagggatggcgtcaaacccagaggcttggaaaagcccacatcccatccattgcaaatcacattggctgtatgttccaaatacacccagaattga

SEQ ID NO: 125641 - DNA, 648 bp, Homo sapiens; identical to SEQ ID NO: 118026

SEQ ID NO: 125642 - DNA, 739 bp, Homo sapiens
gaggaacaagagtatagtgaagtaacagaagaggttacagagcaggtttatttgccagctaaagccaaagtggcaaaggagggagaggttcatccctacccttctgcaccccctcattattattttgaagaaaatgaccccccaaatctttcttttccggaggacactgggcgaaaagtagttgcccccgtgactgttcgagcagcacctcgagggactgctcttagttctattcaggcaggcattcagcaagctagacaagagggtgatttagaggcttggcagttccctgttagaatacaccccccagatcaacagggaaatattatagctacatttgagccttttccttttaaattactcaaagaattcaaacaagcaataagtcagtatggaccaggttctccctttgtaatgggactgttaaagaatgttacagtttccagtcagaagattcctactgactgggacactcttactcgagcttgtctaactcctgctcagttcttacaatttaaaacttgtgctatgaaacagggaccaagggaaccatatgttgattttatagctcggttacaggagtctcttaaaaagatgattgcagattcggctgctcaggagatagtgttgcagttactagctttcgacaatgctcatcccgattgccaggctgctctgcgacctatcagagggaaagcacatttagttgattatgtcaaggcctgtgatggtattggag

SEQ ID NO: 125643 - DNA, 747 bp, Homo sapiens
atgggacaggtgtggggtctggttcatttcaccttggatctttttcacactgatgatgaggaggaacgagagtacagtgaagtaatagaagaggttacagagcatgtttatttgccagctaaagctaaagtggcaaaggagggagagataagatgtcttcagcacccaggctcagcagcaccacacacgctgacttctgagggtctgagagagctaaggaaagcaacagcctggatgatgaatccactcaggatgtgggccaaagctgtacaaccaaaagatgatgagaaacaatgcttagaagtaagatcaatacaggagactagaacccaaatccgtcctggaatttggcacatgtatgggatatggatagaaaataagagcaaagaggaattcaagataatgaagcaatataaacaaaagttgaaaagagaaaatgagcatgcagtgcctagagatgccaaggaatccagatcactgaggtcggatagatgtgtctttccagaatttgatgaggttaaccaggtagagccagatgggttacctaccatgggatctgaagcaggagctggaaacgttctcaaaactgtcctgaaagcaagtaatgctttcagtcgttgtcaccttcgtgaggaacatgctgcaacttcgctttctgacttcattctccgggtgacatttttcacgcaggctctgacagagacagcaattataaagacatccaggttggcattcaaggattcttga

SEQ ID NO: 125644 - DNA, 1185 bp, Homo sapiens
tcatccatgaatctcacccctgagtttttctgagagtgaatgtagctggaaggtgtttagggaggcagcaagccctttccgactggacagcagcatattctggagcttcttgcctgggtccagtgccaagacttccgttcggactttggagccatgtgtgaccacatctgtgccatgtgtgatcctcagtagagctttcttctggttcagtggggagattgtaacccagcaggaacagcgccctgggggtggctgcacaagtgcttctgctctggggcctccctcctggccccctgccagccccagtatggaggggaaggggctttgaaaagcttctcgcctgttagctgtccaatatgctccgataacatcacaggccttgataaaatcaactaaatgtgctttgcctctgataggtcgcagagcagcctggcagtcaggattagcattgtcaaaagctaataactgcagcactatatcctgagcagccaaatctgcaatcacctttttgttttgagatgaaatctcactctgtcgcccagcctttttaagagactcctgtaaccaagctataaaatccacatatggttcttttggtccctgttttatagcactaaaggaagcgtattgttctccacataaagggattttttcccaagctctaatgcacactcctctaagctgttctatggcatcatcctgcatgaccacttgtgcatctaaaccagcccagccgccaacccccaaaagttggcctgtagttatattaatttgaggctgggcctgggcgttgcaagcagcctgaatggaagcttcatgggcccaccaagttttaaattgtaagaactgagcaggagttagacaagcctgagtaagagcatcccagtcagtaggaatcatctgactggaaacagcaacattctttaacagtcccattacaaaatgagaacctggtccatactgatttatagcttgtttaaattctttgagcaatttaaaaggaaaaggctcaaatgtagctgtaatatttccccgttgttctctctcctttaccgctttagctttagctggcaaataaacctgctctgtaatctcttctgttacttcgttatactctccttcctcctcatcatcagtgtgaaaaagttccaaggtggaacgaaccacagcccacacttttcccat

SEQ ID NO: 125645 - DNA, 1467 bp, Homo sapiens
ttattcattgtgactgtttgtcccgctttcctcaggttttcttccgccatctgtgacagcttcttgatctgtccacaggtgggtggctgtgttcgacgggtgttgctcgtgacagttggggtcctcctcagcatcagtctcgacatggctgcaactggggtgtccttgggatcttcctggagtctcttcctcggcatctggctcatgataaggtttcaggtgtcttgatggtatccaaattggctgttgattttgtcctggagaaatataagcataacctctaccccaagttattattttacctatttcccaactttttgttatcagatctctccaccaaatcagttgttctgtttttgtctttgcagctggtttctgtagatgctgttcagctgctgaaaacatctggcctttgggcaggctcaaaaaatttaaagttaataatgctaggttcagttgcatctgtggggttccatattctctgtctcttcctttctgcttttgcaactgctgttttagggagagattcattctttccactatggcttgttcttgagaattgtatgggataccagtaatgtgtttactattccacatagagaaaaatgtagctagagcttggccagtatagcctggggcattatctgttttactagaagctggaatgcccatcaccgcaaaacactgcaaaagatgacgtttaacacaggcagaagactctcctgattggtatgtagcccagacaaagtgagaaaaggtgtccacacatacatgtacataagctagtctcccaaatgagggaacatgtgtgacatccatttgccaaagagagttaggttccagtcctcgaggattaactcctcctgtaaaagatgaggaatgtaccatttggcaagttgggcattgctggataatagctttagcttctttccaggtaatgctgtatctgcgtttgagaccagaggcattaacatgggttaaattgtgaaagtgtctagcattagatattgcattagcaactaggcaatcagccatttgattcccttcagtcaaaggtcctccgataccatcacaggccttgatataatcaactgaatgtgctttcccgaatttaaaaggaaaaggctcaaatgtagctataatatttccctgttgatctggggggtgtattctaacagggaactgccaagcctctaaatcaccctctcgtctagcttgctgaattcctgctttttgcccagtgtcctccagaaaagaaagatctggagggtctttgtcttcaaaataataaggagggggtgcagaagggtagggatgaacctctccttcctttgccgctttagctttagctggtaaataaacatgctctgtaacctcttttgttacttcgctatactcttgttcctcctcattatcagtgtgaaaaagttccaaggtgatacaaaccagacaccatacctgtcccat

SEQ ID NO: 125646 - DNA, 783 bp, Homo sapiens
atgcccaaacaccaacaaacatctacaagcatcaagatcatgcaggaaaacatggcctcaccaaaagaactaaataagcatgaaggagaaataaagaccttcccagacaagcaaaagctgagagatttcatcaacaccagacctgtcctacaggaactgctaaaaggagttcttccatctgaaagaagagaggatgttaacggcaagaagaaatcatctgaagatacaaaactcactgaactttttcacactgataatgaggaggaacaagagaatagtgaagtaacagaagaggttacagagcaggtttatttgccagctaaagctaaagtggcaaaggaaggagaggttcatccctacccttctgcaccccctccttattattttgaagaaaatgaccccctggatctttcttttccggaggacattgggcgaaaagtagttgccccagtgactcttcgagcggcacctcgagtgacggctcttagttctattcaggcaggaattcagcaagctatacgagagggccaaaatcaacagccgatttggataccatcaagacacctgaaaccttatcaggagccagatgccgaggaagagactccaggaggatcccgaggaccccccggttgcagccatgtcgagaccgatgctgaggaggaccccaacagttacgagcaacacccgtcaaccacagccacccacctggggacagatcaagaagctgtcagagatggaggaagaaaacctgaggaaagcgggacaaccagtcacaatgaataa

SEQ ID NO: 125647 - DNA, 1464 bp, Homo sapiens; identical to SEQ ID NO: 118626

SEQ ID NO: 125648 - DNA, 2304 bp, Homo sapiens
atgggctgggactgcggcttggctcgctgggcaagggtagggctgcgggagcgagcggcggtccagcccctggcgcccgggtgcgcggccatgtcttttgcctttcctccttttattcctcaaggctacaagactgcttttggtgttggcaccaacaaaattgttacgcaagacaataggtgggaactaccaggggcctggtatttccccagagcctcctcccaggccagggagatgccacagtgcccgactttggaaagccaggaaggggaaaactccgaagagaagggggacagttccaaagaagatccaaaagaaaccgtcgcgctggcttttgtgagagagaacccaggggcacaaaacggacttcagaatgcccagcagcaaggcaagaagaagaggaagaaaaagaggttaggattgaaagctggggaatggggagccatgttgatgattggtgatcaatctatccagctgccggcctttctttcttcaatagtgcgcagggctgcccaacagtacggctttagagagggaggggaagacgatgactggactctctattggacagattactcagtgtcactggagcgggtgatggaaatgaaaagttaccagaagatcaatcacttccccgggatgagtgaaatctgccggaaggacttgctggccaggaacatgagccgcatgttaaagatgttccctaaagatttccgctttttccctaggacctggtgtcttcctgctgactggggagatttgcagacctacagcaggtcaagaaaaaataagacatacatttgtaagccggattcgggctgccaagggaaaggtatattcatcacccggacagtgaaagaaatcaaaccaggggaggatatgatctgtcagctgtatatttcaaagccctttatcattgatgggtttaagtttgacctacggatttatgtactggtgacatcctgtgaccctctcaggatttttgtgtacaatgaaggactggcccgctttgcgacgacctcttactcccgcccttgcacagacaacctggatgatatctgcatgcacctgactaattattccattaataagcacagttcaaatttcagtcgagatgcacactctggcagtaagaggaagctctccaccttcagtgcatacttggaggaccacagctacaacgtggagcagatatggagggatattgaggacgtcatcatcaagaccctcatctcggcccaccccatcatcaggcataactaccacacctgcttccccaaccacacactcaacagcgcctgctttgagatcctgggctttgacattttgttggaccacaaactcaaaccctggctgctggaggtcaaccactctccaagcttctccaccgactctcggttggataaagaggtgaaagatggtctgctgtatgacaccttagtcctgatcaacctggaaagctgtgacaagaagaaagtcttggaggaggagagacaacgggggcagttcctgcagcagtgttgttctcgggagatgaggattgaggaagccaagggtttccgggccgtgcagttaaagaaaactgaaacgtatgagaaggaaaactgtggagggttccgactgatttatcccagtctgaattcggagaagtatgagaagtttttccaggacaacaactccctcttccagaatactgttgcttccagggctcgggaggagtatgcccggcaactgatccaggagctgagactaaaacgggagaaaaagcccttccaaatgaagaagaaggtagagatgcagggggaatcggcaggcgagcaagtgagaaagaagggcatgaggggctggcaacagaaacaacagcagaaagacaaggccgccacccaagcctccaaacagtacatccagccattgacattagtatcctacacacctgacttgctcttgagtgtcagaggtgaaaggaaaaatgaaacagacagcagcctcaaccaggaggctcccacggaggaggccagctctgttttccccaagctgacgtctgcgaagcccttcagttctctacccgatctgaggaatatcaatctcagcagctcgaagttggagcccagtaaacccaacttcagcatcaaggaggccaagtctgcctctgcagtgaacgtattcactggcactgtggtaagtattctggaggctgagaagtccaagatcaaggtgctggcaagtttgatgtctggtgagggcctattcctcatagacggcagcttcttgctgtgtcctcacacagtggaaggagctagttaa

SEQ ID NO: 125649 - DNA, 381 bp, Homo sapiens; identical to SEQ ID NO: 118657

SEQ ID NO: 125650 - DNA, 732 bp, Homo sapiens
atggtgaaggtgaaggccagagtcaacgaatttggctatactgggtgcctggtcactagggctgcttttaactctggtaaagtggatattgttgccatcaatgaccccttcattgacctcaactacctggcctacatgctccagtatgattccacccatggcaagttccatggcaccatcaaggctgagaatgggaagcttgtcatcaatggaaatcccattaccatcttccaggacatcttcaccgccatggagaaggttggggctcatttgcagaggggagccaaaagggtcatgatctttgccccctctactgaagccatcatgttcatgatgaaagtgaattatgagaagtatgacaacagccttaagatcatcagcaatgcctcctgtaccaccaactgcttagcgcccctggccaaggtcatccatgacaactctggtgttggtcgtggacccgacctgccatctggaaaacctgccaaatattatgacatcaagaagatgatgaagcaggcttcagaggatcctatcaagggcatcctgggctacactgagcaccagattgtctcctccgacttcaacagtgacacacagtcttccacctttgatgctggggctggcattaccctcaacgaccactttgtcaagctcatttcctggtatgacaatgaatttggctacagcaacagggtggtggacctcatggcccacatggcttccaaggaataa

SEQ ID NO: 125651 - DNA, 1007 bp, Homo sapiens
atggtgaaggtgaaggccagagtcaacgaatttggctatactgggtgcctggtcactagggctgcttttaactctggtaaagtggatattgttgccatcaatgaccccttcattgacctcaactacctggcctacatgctccagtatgattccacccatggcaagttccatggcaccatcaaggctgagaatgggaagcttgtcatcaatggaaatcccattaccatcttccaggagtaagatcccaccaaaatcaaatggggcgatgctggcactgagtacgttgtggagtccaccagcatcttcaccgccatggagaaggttggggctcatttgcagaggggagccaaaagggtcatgatctttgccccctctactgaagccatcatgttcatgatgaaagtgaattatgagaagtatgacaacagccttaagatcatcagcaatgcctcctgtaccaccaactgcttagcgcccctggccaaggtcatccatgacaactctggtattgttgaaagactcatgattacagtccatgtcatcactaccacccagaaaactgtggatggcccttgcaggaaactgcggcctgatggccacagggctctccagaacatcatacctgcatctactagcactgccaaggcaatggtcaaggtcatccctgagctgaacaagaagctcactggcatggcctcccatgtccccactgccaaggtgttggtcgtggacccgacctgccatctggaaaacctgccaaatattatgacatcaagaagatgatgaagcaggcttcagaggatcctatcaagggcatcctgggctacactgagcaccagattgtctcctccgacttcaacagtgacacacagtcttccacctttgatgctggggctggcattaccctcaacgaccactttgtcaagctcatttcctggtatgacaatgaatttggctacagcaacagggtggtggacctcatggcccacatggcttccaaggaataa

SEQ ID NO: 125652 - DNA, 509 bp, Homo sapiens
caccccaggccaagatcatccatgacaactttggtactgtggagggactcgtgaccacagtccacaccatcactgccacccagaaaactgtggatggcccctccaggaaactgtgtcataacagccgcagggctctccagaacatcatccttgcctctaccggcactgccaagcctgtgggcaagggcatcctggcctacactgagcaccaggctgtctcctccgacttcaacagtgacacccactcctccacctttgatactggggctggcattgccctcaatgaccactttgtcaagcttatttcctgttatgacaatgaatttggctacagcaacagggtggtggacttcatggcccacatggcctccaaggagaacctgagctccacaggactcaatgaaaaagcaactgtaacagaagagatagatgtctacctggattctggagctccaggaaagaacccccctgtgttcacaatggcggtccctggtgcctgcagaacttag

SEQ ID NO: 125653 - DNA, 5101 bp, Homo sapiens
atgacaacccctgtgcagtcaaaaatctgcatatcttttcaggctgcctttcgagctcaggggcccctggctatgctgcagcactttgatactatctacagcattttgcatcactttcgaagtatagatcctggcctcaaagaagatactctgcaattcctgataaaaggtgtttatgggtcaggggtggtatcccgccactcccaggagcttccagctatcctggatgatacaactttgagtggatcagatagaaacgcccatctaaatgccctcaaaatgaactgttatgctctgatacgtctcctggaatcctttgagaccatggccagccagacaaaccttgtggacctggaccttggtgggaagggtaagaaagctcggaccaaggcagcccatggctttgactgggaagaagagaggcaaccaattcttcagcttttaacacagctacttcagttggacatccgtcacctgtggaaccactcaataattgaagaagaatttgtcagtttggttactggctgttgctaccgccttctggagaatcccaccattaatcaccagaagaaccgccccactcgggaagccataacacacctgcttggtgtagccttgacccgttataaccatatgctcagtgctacagtgaagatcatccagatgctgcagcactttgaacacctggcacctgtactggttgcagccgtgagtctatgggcaactgactatggaatgaagagcatagtgggagagattgtaagagagattggacaaaagtgtccccaagagctgagtcgagacccttcagggacaaagggctttgcagcattcctgacagaactagcagaacgtgtcccagctatcctgatgtccagcatgtgcattttgctagatcacctggatggagaaaattacatgatgcgtaatgctgtgctggcagccatggcggagatggtgctgcaggttctcagtggcgatcaactggaagcagcagcccgagacaccagagaccagttcttggatactttacaagcccatggccatgatgtcaactcctttgtgcggagccgtgttttgcagctcttcacccgaattgtccagcagaaggctctccccctgacacgtttccaggcagtggtggctttagctgtgggacgtctggcagacaagtcagtgctagtatgtaaaaatgccatccagctgctggccagttttctagccaataatcctttctcctgcaagcttagtgatgctgaccttgccggaccactgcagaaggagacccagaaattacaagagatgagggcccagaggcgaactgcagcagctttgctggacccagaggaggagtgggaagccatgctgccagagttgaagtctaccctgcagcagcttctacagcttccccagggagaggaggagattcctgagcaaattgccaatacagagacaactgaagatgtgaaaggacgcatctatcaactgcttgccaaagctagttacaaaaaggccatcattctcactcgagaagccacaggccacttccaggagtccgaacccttcagtcatatagacccagaggagtcagaggagaccaggctcttgaatatcttaggacttatcttcaaaggcccagcagcttccacacaagaaaagaatccccgggagtctacaggaaacatggtcacaggacagactgtctgtaaaaataaacccaatatgtcggatcctgaggaatccaggggaaatgatgaactagtgaagcaggagatgctggtacagtatctgcaggatgcctacagcttctcccggaagattacagaggccattggcatcatcagcaagatgatgtatgaaaacacaactacagtggtgcaggaggtgattgaattctttgtgatggtcttccaatttggggtaccccaggccctgtttggggtgcgccgtatgctgcctctcatctggtctaaggagcctggtgtccgggaagccgtgcttaatgcctaccgccaactctacctcaaccccaaaggggactctgccagagccaaggcccaggctttgattcagaatctctctctgctgctagtggatgcctcggttgggaccattcagtgtcttgaggaaattctctgtgagtttgtgcagaaggatgagttgaaaccagcagtgacccagctgctgtgggagcgggccaccgagaaggtcgcctgctgtcctctggagcgctgttcctctgtcatgcttcttggcatgatggcacgaggaaagccagaaattgtgggaagcaatttagacacactggtgagcatagggctggatgagaagtttccacaggactacaggctggcccagcaggtgtgccatgccattgccaacatctcggacaggagaaagccttctctgggcaaacgtcacccccccttccggctgcctcaggaacacaggttgtttgagcgactgcgggagacagtcacaaaaggctttgtccacccagacccactctggatcccattcaaagaggtggcagtgaccctcatttaccaactggcagagggccccgaagtgatctgtgcccagatattgcagggctgtgcaaaacaggccctggagaagctagaagagaagagaaccagtcaggaggacccgaaggagtcccccgcaatgctccccactttcctgttgatgaacctgctgtccctggctggggatgtggctctgcagcagctggtccacttggagcaggcagtgagtggagagctctgccggcgccgagttctccgggaagaacaggagcacaagaccaaagatcccaaggagaagaatacgagctctgagaccaccatggaggaggagctggggctggttggggcaacagcagatgacacagaggcagaactaatccgtggcatctgcgagatggaactgttggatggcaaacagacactggctgcctttgttccactcttgcttaaagtctgtaacaacccaggcctctatagcaacccagacctctctgcagctgcttcacttgcccttggcaagttctgcatgatcagtgccactttctgcgactcccagcttcgtcttctgttcaccatgctggaaaagtctccacttcccattgtccggtctaacctcatggttgccactggggatctggccatccgctttcccaatctggtggacccctggactcctcatctgtatgctcgtctccgggaccctgctcagcaagtgcggaaaacagcggggctggtgatgacccacctgatcctcaaggacatggtgaaggtgaaggggcaggtcagcgagatggcggtgctgctcatcgaccccgagcctcagattgctgccctggccaagaacttcttcaatgagctctcccacaagggcaacgcaatctataatctccttccagatatcatcagccgcctgtcagaccccgagctgggggtggaggaagagcctttccacaccatcatgaaacagctcctctcctacatcaccaaggacaagcagacagagagcctggtggaaaagctgtgtcagcggttccgcacatcccgaactgagcggcagcagcgagacctggcctactgtgtgtcacagctgcccctcacagagcgaggcctccgtaagatgcttgacaattttgactgttttggagacaaactgtcagatgagtccatcttcagtgcttttttgtcagttgtaggcaagctgcgacgtggggccaagcctgagggcaaggctataatagatgaatttgagcagaagcttcgggcctgtcataccagaggtttggatggaatcaaggagcttgagattggccaagcaggtagccagagagcgccatcagccaagaaaccatccactggttctaggtaccagcctctggcttctacagcctcagacaatgactttgtcacaccagagccccgccgtactacccgtcggcatccaaacacccagcagcgagcttccaaaaagaaacccaaagttgtcttctcaagtgatgagtccagtgaggaagccgagccacatcgctcagacaccatggggaaggtgaaggtcggagtcaacggatttggtcgtattgggcgcctggtcaccagggctgcttttaactctggtaaagtggatattgttgccatcaatgaccccttcattgacctcaactacatggtttacatgttccaatatgattccacccatggcaaattccatggcaccgtcaaggctgagaacgggaagcttgtcatcaatggaaatcccatcaccatcttccaggagcgagatccctccaaaatcaagtggggcgatgctggcgctgagtacgtcgtggagtccactggcgtcttcaccaccatggagaaggctggggctcatttgcaggggggagccaaaagggtcatcatctctgccccctctgctgatgcccccatgttcgtcatgggtgtgaaccatgagaagtatgacaacagcctcaagatcatcagcaatgcctcctgcaccaccaactgcttagcacccctggccaaggtcatccatgacaactttggtatcgtggaaggactcatgaccacagtccatgccatcactgccacccagaagactgtggatggcccctccgggaaactgtggcgtgatggccgcggggctctccagaacatcatccctgcctctactggcgctgccaaggctgtgggcaaggtcatccctgagctgaacgggaagctcactggcatggccttccgtgtccccactgccaacgtgtcagtggtggacctgacctgccgtctagaaaaacctgccaaatatgatgacatcaagaaggtggtgaagcaggcgtcggagggcccccctcaagggcatcctgggctacactgagcaccaggtggtctcctctgacttcaacagcgacacccactcctccacctttgacgctggggctggcattgccctcaacgaccactttgtcaagctcatttcctggtatgacaacgaatttggctacagcaacagggtggtggacctcattggccacattggcctccaaggagtaagacccctggaccaccagccccagcaagag

SEQ ID NO: 125654 - DNA, 758 bp, Homo sapiens
ttaacatgtcagggatggtaacagagacccagtatcttctgacttttgcttttctaacctgtagccactacgtgtgagtgcatcttcatccaccttggcgaggctgatgtctggattggcaatgctgccgggagctctactacctggaacaaagcatccagcacgatagcccaatgccaagtgacaagaccactgggtaaggagataattgattctacgcctcttcagtgagcaggcaagtttgtgtccagggcagtgtttataaacctggaacccatagtcactgatgaagtttgcactggcacctaccaccagctcttccaccctgagcagctcatcacagacaaggaagacgctgcccataactatgcctgggggcatcacgacattggcaagatcattggctgctattccactaacaagaccaaatgcaccatccagtttgtggattggtgtttcactagcctcaaagttggcattaattgccagcttcccactgtggtacctgctggaaatctggccaacataaagagagctgcgtgcatgctgagcaacaccatagccattgctgaggcctgggtttgcctgggccacaagtctgacttgagttatgccaactgttcctttgttcaccaatttttcaacaagtctatccattgatattttgaatactagggatctgaaagaattaggatctattttacatggactcaatagaacaacggcagttatataactgaaacctacatcagtcattc

SEQ ID NO: 125655 - DNA, 1173 bp, Homo sapiens
ttaggagtaaaagtccaaaattgagatttttttaatcattgtgtaagatctgtattccagattgttttggtcaagatcagtttttggtttcttattggcactaggccttgttagtgatagccagattatggggaccacaggagccccgtagtttctccaagccactctatccggatcttctgctgttgggtcctggcttgggtaatcatagaaggcacctgggagcatcagggcaggagctgagattccagggcttctagctggaatggggagctcctgcctgtatgaacccacagctgaaacttgtacactaagcagagcaggcactgatgggtaaacacatgtgtttgtggctgcagtctgtctcctaacacgctctggggtctctgaggctcttctccagctctgctgtagctgcagttctgactgtggcactgtctcctcttctggagagggagaggaagggagcgtgcagagtatgctccctgatggtgatgtgtgcgtctgtgaatcttcacatgtgcaggtgggttccagtgcgcccgtatgtgcatagagcctgggctgctgtccactgtagccactacgtgtgagtgcatcttcatccaccttggcgaggctgatgtctggattggcaatgcctgccgggagctctactacctggaacccatagtcactgatgaagtttgcactggcacctaccaccagctcttccaccctgagcagctcatcacagacaaggaagacgctgcccataactatgcctgggggcatcacgacattggcaagatcattggctgctattccactaacaagaccaaatgcaccatccagtttgtggattggtgtttcactagcctcaaagttggcattaattgccagcttcccactgtggtacctgctggaaatctggccaacataaagagagctgcgtgcatgctgagcaacaccatagccattgctgaggcctgggtttgcctgggccacaagtctgacttgagttatgccaactgttcctttgttcactgggaaatgggtgaggagatgggagaagaagcattttctgaggcctgtgaggacatggctgcccttgaaaaagattatgaggaggttggtgtggattctttcagttttaggattatacgtgtatttttccccttctttgtagtgcat

SEQ ID NO: 125656 - DNA, 532 bp, Homo sapiens
attggtgtgatggtccacaaaacaggtatgcacttatatgtcagcagtgttttctcataatggcatggctttgaaggaagaatttgaatacattgcttttcgatgtgcctactgttttttcttgaaccctgcaagaaaaaccagacctcaggctccaagacttcctgagtttagttttgagaagaggcaggtggtggaaggttcaagttcagttggtcccttgccatcaggaagtgtgctttcatcagacaaccagtttaatgaagaatctttagaacacgatgttcttgatgataatacagagcagacagatgacaaaataccagctacagaacagacaaaccaagtgattgaaaaagcatctgactcagaggaaccagaggagaaacaagagactgagaatgaggaagcctcagtgattgaaaccaactccacagttcctggagctgattctattcctgatcctgaactaagtggagaatctttgacggcagagtagtaaatgcttccacgtgccttcaactggaaaaaa

SEQ ID NO: 125657 - DNA, 766 bp, Homo sapiens
ggcagccctatcatcaaatgtgttaccaagacatcttggatcccctgctacttcagtgcctggaatgggtcttcatcctccaggtccacctttagcaagacctattctcccccgagaacgaggtgctttggatagaattgttgaatatttggttggtgatggtccacaaaacaggtatgcacttatatgtcagcagtgtttttctcataatggcatggctttgaaggaagaatttgaatacattgcttttcgatgtgcctactgttttttcttgaaccctgcaagaaaaaccagacctcaggctccaagacttcctgagtttagttttgagaagaggcaggtggtggaaggttcaagttcagttggtcccttgccatcaggaagtgtgctttcatcagacaaccagtttaatgaaggaggagcaataccccagacgtctcattttctgtctgaaattcctggaaagaagtcttactggctcaaacccaaccccaataaggcaaaggagcactgcattgagtgtggaattcaagatccagaaatgacagccagatttgtctggagggaggaaaaagtgctcttaggtttgatgatgtcctacaaaagaacatgcaaagtactggggatgaaggtgccagttgagcacaggatgaccaccgaaggatgtgtgaagaaggaagggaaaagcagaaaacctagaggcacaagaaaatccaaagatttcttcattcgagtaccccaaatgtcagacgaggtgcggatctga

SEQ ID NO: 125658 - DNA, 447 bp, Homo sapiens
atgagcggttctaggggcttccacttggtccttgctaccacaattttcacctcgcagggaaaggaaccaatgtggggcacctgcaaattagttccatctcaggatgattccaaaccaacccagaggcaatttactattctcaactttaatgatttaatgtcatctgccgttcccatgacacctgaagatccttcattttgggactgtttttgcttcacagaagaaattccaatacgaaatggaggagcaggagaaggagaaggaggaggaggaggagaagcagaagcagaagaagaggaggagggggaaggggaagaggaaaaggaaggggaagaggaggaggaaggtgaggaggaagaaggagaagaagaagacaacaagaggaagaggaagaggaaggaggaggagaagaaggaggaggaggaggaggagaaggagaagaaataa

SEQ ID NO: 125659 - DNA, 2469 bp, Homo sapiens
tttttttttttttttttttcataataaatgttcatttttttattattataatgacaagacaaagtttttcatatcaccattacactcatgctagggataacaatacttcctctattataaatgctacttgacctttatttactatgcttggcataactgggcatgcttaataaaataaaaaaaaaaacattcaaatttttttcttttactaatcgaagtacctaattttatacaatttgcacacttttaatgttagtaacagaaacaatgaaattattttacttcttgatacttaagagtttaactccaagacatgcactacaaccacataatagatttttgtcatcaatatgatggtcctggcatcttatatattaagttcacactttaaattaagtactacttgctaaaacgaaaacaggtaaaaacaatgaacagacggatcacgttaagaggaatacgaaaagccaataacaatactgacataacaatcttatttgtaatgaaagaaatacaaattttaaaaatgacataccattttttaattacattggcaaaaattaaaccaaaaagaatacctacaattgaccaaggagtattctggcagggggagggaagtcacatacatatagtactaattagaggggtaaattgtataattaaagccctatgaaccagtcaaaccaatcattccactattagaaactttctcaaggacataattaagcatgtaactcaaaatgtacaaggacattcactctgccactgcttgtagtaataaactgcagataatcaaaatgtctaacacagaaaaaagtaagtaaattatggtaaacctttcttatgggaaggcagtgggcttccaattccattctccacacctagcttagcttctttcttttcaacagagtctacttctaacagagaccaaaaatgtcagacattgcctttctctgtaacctgatctaagtcaatggaaactgaggggaaatcttctggaggcttttgttaaaaatcttcctcatggataaaacaaatgagagacgaaatggccttttctgcctttgagatacaattttacaaagatgtaaaactggaagttatagcagcagctcttgtgatcgagaggtggaatagcctaaggcaaaacaaaccaactgaggtcaaggcaaaaaaagtgtgtctttaatgacacccctgaaccctgtgttatgtcaaacaatttcctaggttacttaggccaattatatttggacactgttacctctggccaaaagcatcctaacttgtattagctatacaacagagtacattagaaccacaaaaagttatgttacagaggtatatttatgaacagtagatgtgcagttaaaaagaatttacaaaacagtacgtttccatgtttttaaaaaaaatcaaatatgtcaatatggattcatttgccaagaaaaaggtctgaaaagatactcaaggttttaagagtagttatctttgaaagatagcatttaaatgtttccttttgcttatgtgcattttctatttttttctacagttagcatgtatcactttaagattccgccatccttcctatcaattcaatgcaatttaggaaagaaagaggtaaacatgtattccagtgagctatcttgaaccagaagtctgctttttttttttaattggaaaagtttctgttctttaaaaaaactttcgtgaaataaaatttgatactaatacattcatttatttttcagtgaatacggaagatcacaaacagtttcaattccccttggttaaccccagggaatccatcatggactttgtacccatttccgtaatgggaatttcctcctgtggaagcaaaaacagtccccaaaatgaaggatcttccaggtgtccatgggaacggcagatggacattaaatccattaaagttgagaatagtaaattgcctctgggttggtttggaatcatcctgagatggaacatcctgatgtcctagatccatcggggtttcctaagagcaactgcaacaaaatggtgctcatctattttgctttcccccaaatgccccattcctttttcctcctctccatccagggaataaaccgtgtttctttataaacttgggcctatatccaaggttttaatgggagatagattcaaattcaagccgctggcaattcaaatcctagtccaacaccaatggcttttatgaagctttccttaagtgcccaattcctataaaacatatccagctgagtccactcatccttaaagcttctgattgtttcccattctttgttggtaaactttcttttcataatatgaaagaattctggaattgaaccacgacctggaaaactagtcttcattatatcaattccaacttgcagctcaggttcagcagcaagcactgcatagtctccttgatgagagatgttaaagttgaaattcgggtatggattcgat

SEQ ID NO: 125660 - DNA, 1134 bp, Homo sapiens
atgtctcacagaaagttctccactcccagacatgggtccctcggcttcctgccttggaagcacagcagcaggcatcgtgggaaggtgaagagcttccctaaggatgacccatccaagccggtccacctcacagccttcctgggatacaaggctggcatgacccacatcgtgcgggaagtcgacaggccaggatccaaggtgaacaagaaggaggtggtggaggctgtgaccattgtggagaggccaccagtgggcattgtgggctgcgtggaaacccctcaaggcttccggacttgcaagactgtcttcgctgagcacatcagtgatgaatgcaagaggcgtttctataagaactggcataaatctaagaagaaggcctttaccaagtactgcaagaaatggcaggatgaggatggcaagaagcagctggagaaggacttcagcagcatgaagaagtactgccaagtcatctgcgtcattgcccacacccagatgcacctgcttcctctgtgccagaagaaggcccacctgatggagatccaggtgaatggaggcactgtggctgagaagctggactgggctggcgagaggctcaagcaccaggtacctgtgaaccaagtgtttgggcaggatgagatgatcgacgtcatcagggtgaccaagggcaaaggctacaaaagggtcaccagtcattggcacaccaagaagctgccccgcaagacccaccaaggcctgtgcaaggtggcctgtattggggcatggcatcctgctcgtgtgggcttctctgtgggctaccttatcaaggatggcaagctgatcaagaacaatgcctccactgactatgacctgtctgacaagagcatcaaccctttgggtggcttcgtccactatggtgaagtgaccaatgactttgtcatgctgaaaggctgtgtggtgggaaccaagaagtgggtgctcaccctccacaagtccttgctggtgcagacaaagcagcgggctctggagaagattgaccttaagttcattgacacctcctccaagtttggccatggccgcttccagaccacggaggagaagaaagcattcatgggaccactcaagaaagaccgaattgcaaaggaagaaggagcttaa

SEQ ID NO: 125661 - DNA, 552 bp, Homo sapiens
atggtgatatttgagcagatgagagccaatgtgggcatgttgctccagggtatcaacaggaacaatcctgagaagctggccaccctggagtgctacgtggagatgcaggccaaggacactgcctatgatctggaagccaacccagttgtcctgaagctgtaccagtccaacccagtgttttttcagaccacggacactgcccagatccagctgaaggccctcaccaacctgccacataccaacttcaccccgtccctggatgaaaacgtggacctcttggaaggtataactggctttgaagactctgtccgaatgtgtatctgccctgtcgtgggtatcacttaccagcacatcgaccactggctgctggccgagatgcctgggtatctgtcggacagccagctgaaggtgtggatgagaaaatacacctggagggctgatgagtcccagcagatcttcatctgtagccaggaagagaacattaagcccaagaaccctgtggagaagatagactttgacagtgtgtccagcatcatggccttcttccagtaa

SEQ ID NO: 125662 - DNA, 589 bp, Homo sapiens
tgggcggatcacttgagccccaggagtttgaaatcagcctgggcaatattagtgagccctcgtctatgtaaccaacagcagcaacaaattcttagcactttggggggctgaggcgggaagatcacttgagcccagaaattcgagaccagcctgggcaacgtagtgagaccccatctctataaataaataaaaataaaagcaaataatttaaaagaataaacattgtgaacatcaattcccatcacagcacgccctggatgaaaacatggacctcttggaaggtataactggctttgaagactctgtccgaaagtttatctgccatgttgtgggtatcacttaccagcacattgaccgctggctgctggccgagatgctcggggatctgtcggacagccagctaaaggtgtggatgagcacataccgctggagtgccgacgagtcggggcagatcttcatctgtagccaagaagagagcattaaacccaagaacattgtggagaagattgactttgacagtgtgtccagcatcatggcctcctcccagtaacttcaggtgtttaataaagatgtgttgactcaaaaaaaa

SEQ ID NO: 125663 - DNA, 1010 bp, Homo sapiens
gaaagcgtggcggctgctgctagagcctttccctttaccgcacccaaggagctggagcgacaacaacgacgtcgtttccgtttccaccacctcttcctgttcccgtccttgaggacgccgtgccgggtcagtgttagcctccagccctggttgtggaaggcgacagaagtcatggcgatgtttgagcagatgagagccaacgtgggcaagttgctcaagggtatcgacaggtacaatcctgagaacctggccaccctggagcgctaatgtagagacgcagggccaaggaaaatgcctatgatctggaacccaacctggctgtcctgaagctgtaccagttcaacccagccttctttcagaccacggtcaccgcccagatccttctgaaggccctcaccaacttgccgcacacagacttcaccctgtgcaagtgcatgatcgaccaggccaccatccaagaaagaaacggcccaattccggaccagatttttgtaccctcggggaccttgctggaagaccctgcccatttcccaggccctttctggcaaacccctggaaatggcagggcttgccagaaggcctgggatgaaaaccattggaccctctttggaaaggtattaacttggcttttgaagacttcttgtccgaaagtttatctgcccatgttgtgggctatcacttacccagccacattgaccgcttggctgctggccgagatgctcggggatcttgtcggacaagccagctaaaaggtgttggatgagcaaaatacggctgcgagaagacgacagaagggggcagatcttcgatctgtagcccaagaatgagagcatttaaacccaagaaacaattgtggagaagattgactttgacagtgtgtccagcatcatggcctcctcccagtaaacttcaggtgttttaataaagatggtgttgactcagcctgaaaaaaaaaaaaaaaaaaaaaaaaaaaaagtcgtatcgatgtcgagcgatcatgatgattggat

SEQ ID NO: 125664 - DNA, 500 bp, Homo sapiens
gcatggttggggggcatcagcaggacaaaccaacaggtactccgcaagtgtactggcacagcaagcccaccaattattagcagctcttcatcagcctgctgtctactcagacgcttgcctactgaagggacctgtccagagatcttctggaatcccaggttgggaatctctgcagaatgtcgtgacagttgtggcccaactagcttctgagtagaaacaaggaagctaccctgagatatagtcagctgcccacctgccatagtatttgctactgaatgccagccttttaacataccatttcagatttgtccttcaacaaaaatataaattgcaagtcataccatttaagggtcttttacaaatatgtctaaattgtgtgtcatttttaagttccaaaggtctactggactaagtactatcagaccagctgtagaacctgatggcgctgatccggggtggaataaccctcagtactggtgtgtagaagatgaattgtaggc

SEQ ID NO: 125665 - DNA, 3646 bp, Homo sapiens
ctgcctttggagaaagtggagtgtggcgcttggttgtcgttatttcttcggactgcttcgcggtgcacggattcagcttctgcccagtggggctttcagctgtttgcgcgtctctctgtccccctcccctccccccggcacacctctgtctacgatgaggaaaggtctgcgggcgacagcggcccgctgcggactgggactgggatacttgctgcaaatgctcgtgctacctgccctggccctgctcagcgccagcggcactggctccgccgcccaagatgatgacttttttcatgaactcccagaaacttttccttctgatccacctgagcctctgccacatttccttattgagcctgaagaagcttatattgtgaagaataagcctgtgaacctgtactgtaaagcaagccctgccacccagatctatttcaagtgtaatagtgaatgggttcatcagaaggaccacatagtagatgaaagagtagatgaaacttccggtctcattgtccgggaagtgagcattgagatttcgcgccagcaagtggaagaactctttggacctgaagattactggtgccagtgtgtggcctggagctccgcgggtaccacaaagagccggaaggcgtatgtgcgcattgcatatctacggaagacatttgagcaggaacccctaggaaaggaagtgtctttggaacaggaagtcttactccagtgtcgaccacctgaagggatcccagtggctgaggtggaatggttgaaaaatgaagacataattgatcccgttgaagatcggaatttttatattactattgatcacaacctcatcataaagcaggcccgactctctgatactgcaaattacacctgtgttgccaaaaacattgttgccaagaggaaaagtacaactgccactgtcatagtctatgtcaacggtggctggtccacctggacggagtggtctgtgtgtaacagccgctgtggacgagggtatcagaaacgtacaaggacttgtaccaacccggcaccactcaatgggggtgccttctgtgaagggcagagtgtgcagaaaatagcctgtactacgttatgcccagtggatggcaggtggacgccatggagcaagtggtctacttgtggaactgagtgcacccactggcgcaggagggagtgcacggcgccagcccccaagaatggaggcaaggactgcgacggcctcgtcttgcaatccaagaactgcactgatgggctttgcatgcagactgctcctgattcagatgatgttgctctctatgttgggattgtgatagcagtgatcgtttgcctggcgatctctgtagttgtggccttgtttgtgtatcggaagaatcatcgtgactttgagtcagatattattgactcttcggcactcaatgggggctttcarcctgtgaacatcaaggcagcaagacaagatctgctggctgtacccccagacctcacgtcagctgcagccatgtacagaggacctgtctatgccctgcatgacgtctcagacaaaatcccaatgaccaactctccaattctggatccactgcccaacctgaaaatcaaagtgtacaacacctcaggtgctgtctccccccaagatgacctctctgagtttacgtccaagctgtcccctcagatgacccagtcgttgttggagaatgaagccctcagcctgaagaaccagagtctagcaaggcagactgatccatcctgtaccgcatttggcagcttcaactcgctgggaggtcaccttattgttcccaattcaggagtcagcttgctgattcccgctggggccattccccaagggagagtctacgaaatgtatgtgactgtacacaggaaagaaactatgaggccacccatggatgactctcagacacttttgacccctgtggtgagctgtgggcccccaggagctctgctcacccgccccgtcgtcctcactatgcatcactgcgcagaccccaataccgaggactggaaaatactgctcaagaaccaggcagcacagggacagtgggaggatgtggtggtggtcggggaggaaaacttcaccaccccctgctacattaagctggatgcagaggcctgccacatcctcacagagaacctcagcacctacgccctggtaggacattccaccaccaaagcggctgcaaagcgcctcaagctggccatctttgggcccctgtgctgctcctcgctggagtacagcatccgagtctactgtctggatgacacccaggatgccctgaaggaaattttacatcttgagagacagacgggaggacagctcctagaagaacctaaggctcttcattttaaaggcagcacccacaacctgcgcctgtcaattcacgatatcgcccattccctctggaagagcaaattgctggctaaatatcaggaaattccattttaccatgtttggagtggatctcaaagaaacctgcactgcaccttcactctggaaagatttagcctgaacacagtggagctggtttgcaaactctgtgtgcggcaggtggaaggagaagggcagatcttccagctcaactgcaccgtgtcagaggaacctactggcatcgatttgccgctgctggatcctgcgaacaccatcaccacggtcacggggcccagtgctttcagcatccctctccctatccggcagaagctctgtagcagcctggatgccccccagacgagaggccatgactggaggatgctggcccataagctgaacctggacaggtacttgaattactttgccaccaaatccagcccaactggcgtaatcctggatctttgggaagcacagaacttcccagatggaaacctgagcatgctggcagctgtcttggaagaaatgggaagacatgaaacggtggtgtccttagcagcagaagggcagtattaaccaccatgctggaaggggaaatgaaggacaaaaatgcacagggagtctgtggccgtccaggtgaatcacagctgaggaggaaatccagatgagaccaatgcacttcacaggcaagaatgcagcaggagccagaaggaaaacagatacaactgcccatgtacatgcccactttactcggagatcatcacgggagttaagaaaaattgtgtaaatttgtaccttgaatttagctatcaacctaattttcctcttagttgggctgtatgctgtgtggtacaggatcttacagtttcctaggaaacgctttttattgctatccagatatatggataaactttcttaacaaacccaatttctacaaatgttgtttacatcaaattggacagggatgcagacactgtccatggctcgttctatttttgttcaaatcatttgaagttgaagctgtggacggtttgttgtgtctatttcagattagtaatttacagagaaatcacagacttttgctacaaatcgtgtgcatcaagtgtctcagataatcctcccatcagtgttctgtttctagaacttgtagaaccagtgttactgtttgtatcagggaagtggagaatctaagtgtaaaaaagaaataactaagactcctattccttggagggacccttctggtgccctttgggaataaagctgtagcactgc

SEQ ID NO: 125666 - DNA, 1108 bp, Homo sapiens
atgagggaagtagaagaggacagtcctcatgaaagcccccttgtacttgtgagtgactgggacgtgggcatcgttactctttggccatgtcttctaggaagctttctgcaccatgtcaccactaggggataccggaggctttcctttgtcctggagaaagcagctgctttccaggatgtggtggtggtcggggaggaaaacttcaccaccccctgctacattcagctggatgcagaggcctgccacatcctcacagagaacctcagcacctacgccctggtaggacattccaccaccaaagcggctgcgaagcgcctcaagctggccatctttgggcccctgtgctgctcctcgctggagtacagcatccgagtctactgtctggatgacacccaggatgccctgaagaagctagttgggccacaactgtcacgacattctgcagagattcccaacctgggattccagaagatctctggacaggtcccttcagtaggcaagcgtctgagtagacagcaggctgatgaagagctgctaataattggtgggcttgctgtgcccagtacacttgcggagtacctgttggtttgtcctgctgatgccccccaaccatgctaaataggtcctgaaggccacacattaacatttggttgaaatgaagcccgttaatatccctacccacagatgaaatacaatgaggtgacaggaaaacctaggaaccatgacttatgaagactggctgttaaagtagcatttatgaaaatggggtaagcacaaggctgataaaactaaaggatctggaagctcatggctagacttagtctgcagagaaaacccacccagttctacacaaagccatctccccacttttcaaaaataggtttttcacactagaattctggaaatgacttcatttggctttcctggcctgtatggatatgggtttacataacattggttacaatatatttattcccccttatgccttattccattaaaaagaaataattagagatgcaaaggaaatcttccaaagtggatcattacagccagagattattacaaataggatatcttaggggtaggaggaaacattacttcattgccc

SEQ ID NO: 125667 - DNA, 660 bp, Homo sapiens
atgatgaagtacactgagacagagctaaagaagaggaaagggattgtggaacatgaggaacagaaagtcaagccaaggaatgcagaggattgtctttatgaacttccagaaaacatccacatttcctcagcaaagaagaccaagaagatgttttccaaccagatgctgagtggcattcctgagttggaccttggcatcaatgctagaataaaaaatatcatttcttcagaggatgccaagcagaacagattttatcatgaggagctcaacgttcccatacagagaaacacagaagaacccaaaaccagactcttgagggtaggcgacacggagaagctaggtgacacagagaaggcagaggctgagaggtcccctcctaaccacaagcatcctgataagcagaaggccactgatgactatcgttataaaaagaaaccatcttcttatggaagcaccccttttcactcctacttatgtgttcttgtggagcacttcctgtcactactacagattggacccaacatcaacatttgcatcatcctttatttcatggtaattaattcctggttcagagtcaaggtaagaacaagaccttgtcttgaagaggaagaagaagaagatgaaggaggaggaggaggaggtgaaggagaagaagaataa

SEQ ID NO: 125668 - DNA, 842 bp, Homo sapiens
aactcggccgttgtcaccatgccggtcgttcggaagattttccgtcgccgccggggcgactcggagtcagaggaagatgagcaggactcagaggaggttcgattaaaactggaagagaccagagaagtacagaacttgaggaagaggcccaacggggtgagtgctgtggccttgctggtgggagagaaggtacaagaggagaccactctagtggatgatccctttcagatgaagacaggtggtatggtggatatgaagaaactgaaggaaaggggcaaagataagatcagtgaggaggaggacctgcacctggggacatcgttttctgcagaaaccaaccgaagggatgaggatgcagacatgatgaagtacattgagacagagctaaagaagaggaaagggatcgtggaacatgaggaacagaaagttaagccaaagaatgcagaggactgtctttatgaacttccagaaaacatccgtgtttcctcagcaaagaagaccgaggagatgctttccaaccagatgctgagtggcattcctgaggtggacctgggcatcgatgctaaaataaaaaatatcatttccacggaggatgccaaggccccgtctgctggcagagcagcagaacaagaagaaagacagcgagacctccttcgtgcctaccaacatggctgtgaattatgtgcagcacaacagattttatcatgaggagctcaacgcgcccatacggagaaacaaagaagagcccaaggcccggcccttgagagtaggtgacacggagaagccagagcctgagcggtcccctcctaaccgcaagcgtcctgctaacgagaaggcaactg

SEQ ID NO: 125669 - DNA, 300 bp, Homo sapiens
atgcccatccaaaaggatgatgaagttcaggttgtacgaggacactataaaggtcaacaaattggcaaaatagtcaaggtttacaggaagaaatatgctatctacattgaacgggtgcagcgggaaaaggctaatggcacaactgtccacgtaggcattcaccccagcaaggtggttatcactaggctaaaactggacaaagaccgcaaaaatatccgtgaacggaaagccaaatcttgccaagtaggaaagcaaaagggcaaatacaaggaagaaacaattgagaagatgcaggaataa

SEQ ID NO: 125670 - DNA, 1290 bp, Homo sapiens
atgaaactgattcctcaactctcaccttatacaaaaatcaactcaagatggattaaggacttaaacataagacctgaaactataaatattctagaagacaacattggaaaaccccttctagatattggcttaggcaaggatttcatgaccaataacccaaaagcaaatgcaataaaaacaaagatcaatagctgtgacctaattaaactaaagagatttttcactgcaaaaggagcagtcagagtaaacagacaacccacagagtgggagaaaatcttcacaatccatatgtctgacaaaggactaatatccagaatctataacgaactcaaacaaatcgaaaatctacaagaaatggataaattcctcgacacatacactctcccaagactaaaccaggaagaatttcaatctctgaatagaccaataacaggctctgaaattgaggcaataattaatagcttaccaaccaaaaaaagtccaggaccagacggattcacagctgaattctaccagaggtacaaggaggagctggttttcagctgtctcacggagttagaagcaggaagccacttctttcaaaaggtctgtgaattctttcgggtttcctggtatgttcctatggtagttcatggagtaaaagttcatgacaaggctggaaacacggcttttccttatggaggatttgagagtttcttgaaaactgaagacacgctcctttataagagtgtccccaatcccgggggccgtggaccagtactgctctctggactgttaggaactgggctgcacaacaggagccgatgttcaatcggatggttaccggtcggagaacaggttttccgttatcggtcggcaaataacgttcgggcgcggcgatcaccagaattttatgtttaccgcgataaggttttggatagtccacgccatcaagatcagagacaggactgggtagtcactatatttgcgactgagctggtcgctatttttaaccaggctggaaaattgagtcaatatatcgaaagcggtagtcggcggctttcctggtaccagagctcgattcgtgcttgcgtggaatattcgcccccgcctctaatagtggtgggggcccccctcctcttgaaaaagatacccgagaacagggctctcgtgtttgcccccacctccgagaaacaaacaaaagtgtgcagacacctggacaaaccctatacccgcaccttggggccacagcccgggaacaacagggcacagattacaacacctccggcacaacgggaactggggagttga

SEQ ID NO: 125671 - DNA, 665 bp, Homo sapiens
gaagaatcaaatagacgcaataaaaaatgataaaggggatatcacccaccggatccccacagaaatagaaactatcatccagagaatactacaaacacctctgtgcaaataaactagaaaatcctagaagaaatggataaattccttgacacatacaccctccccaagactaaacccaggaagaagttgaatctctgaatagaccaataacaggctctgaaattgaggcaataattaatagcttaccaacgaaaaaaaagtccaggaccagatggattcacagccgaattctaccagaggtacaaggaggagcttgtacccattccttctgaaactattccaattaatagaaaaagagggaatcctccctaactcattttatgaggccagcatcatcctgataccaaagcctggcagagacacaacaacaacaaaaaaagaattttagaccaatatccctgatgaacatcgatgcaaaaatcctcaataaaatactagcaaaccgaatccagcagcacatccaaaagcttatccaccatgatcaagagggcttcatccctgggatgcaaggctggttcaacatacacaaatcaataaacgtaatccagcatataaacagaaccaaagacaaaaaccacatgagaatactataaacacctctatgc

SEQ ID NO: 125672 - DNA, 916 bp, Homo sapiens
ttaggtcttgctgaggggctcccttgccaattggcagggcaccctctgcagagaggttcaggcactggttcatctcctcagggcctttgggaaagtccagttcctgctccgtgaagccctgagctagttttaaactcaagtccagaggctgtgtgtgtgtgtgtgtgtgtataggaactttatccctcttaaccgtttccctcaaattattttgctgcctccattggtgcactatgttggtgcaaggccatccctgggaggcacacatcctggactttgttttctcactgccaaatttgctgtgtggccttgagccctggccctctctgggcctcagtttctccagttctttctccaaaagcacccccagaaaaaatggccacgcagaccattcttctgctcgtgagttgctttgtgattgtgtatgttttggactgtgttgtcgcctcctgctcaggactggtgtggaacagtgatccagtccgtcatcgagtccagatgctggtggacaatggctatgccaccatcagtccttcagtgctactcccgtttcggcccacagcgggttgcgtcgggtacaggtcggctccatcgggcctgcttccctccccttcttcggtcacctacgaggtcagctcgtgcacctgtctccccctcacctacccgacagctctagggcagctcggttcgaaacgacccaggaggggtcttgcaaagtcttccatcatcgtgggcaccgctcaggctgaggaacgaactgagctccggggtatcttgacttggcgacgcgtctcgggacccccacatcacacctggatgccctggggtagccctcgcacatctgagtctccccatctgcaaaatgcagctgttgctaattctgctctcccgggcccggcgggaggattaggggcca

SEQ ID NO: 125673 - DNA, 2172 bp, Homo sapiens
atggagggactaaactggttaagtcttctggccttcatctttctcctgtgctggatgctttctgccctcaaacatcagactccaaattcttcagcttttggactcttggacttacaccagtggtttgccacaggctctcggatgaataaaaacaacaaaccttccagtttcatagccataagaaatgctgctttctctgaagtcggcattgggatctctgccaatgccatgctccttctcttccacatcctcacgtgccttctcaagcacaggaccaagcccgctgacctgatcgtttgtcatgtggctctaatccatatcatattgctgctacccacagagttcatagctacagatatttttgggtctcaggattcagaggatgacatcaaacataagtcagttatctacaggcgtaacaggcagtcccagcattttcacagcaccaacctttctccaaaagcacccccagaaaaaatggccacgcagaccattcttctgctcgtgagttgctttgtgattgtgtatgttttggactgtgttgtcgcctcctgctcaggactggtgtggaacagtgatccagtccgtcatcgagtccagatgctggtggacaatggctatgccaccatcagtccttcagtgctacccaggctgactgccccaaacgagtggagagccagtgtgtacctgaatgacagcttgaacaaatgcagcaacggacggctgctctgtgtagacagggggcttgatgaggggccccggtccgtcccaaagtgctctgagtcagagaccgacgaggattacatcgtcctcagggctccgctgagggaggacgaacccaaggacgggggcagtgtggggaatgcagccctggtgtctcccgaggcctctgcagaagaggaagaggagcgtgaggagggaggcgaggcatgtggcctggagaggacaggagctggtggggagcaggttgaccttggtgaactacctgaccatgaggagaaaagcaaccagaaagtggcagctgccaccctggaggaccgcacacaggatgagcctgctgaggagagctgccagatcgtccttttccagaacaactgcatggacaactttgtgacttccctcacaggaagcccctacgagttcttcccaaccaagagcacctctttttgcagggagagctgttctcctttttctgagtcagtgaaaagcttagaatcagagcaggcaccaaagttggggctgtgtgcggaggaggaccccgtggttggggctttgtgtggccagcatggacccttgcaagatggagtggcggagggtcccacagcccctgatgtggtggtcctgccgaaggaggaggagaaggaggaggtcattgtggatgacatgctggccaacccctatgtgatgggagatgagggggaggaggaggaggaggagttcgtggatgacacactggccaacccctatgtgatgggagtgggcctgccaggaagaggaggggaggaggaggaggaggaggaggtcgtggatgacacgctggccagcctctataagatgggagaagaacatcgacacaagggcctggccccactctgggaaggtggccagaaaccgtcccagaaactgcccccaaagaaaccagatctgaggcaggttcctcagcccctggcatcggaggtgccgcagaggaggcaggaaagagctgttgtcactgaagggaggcccctggaagccagcagggccttgccagcaaagcccagggccttcactttataccctcggtcgttctccgtggaaggccaagagattcctgtttccatctctgtgtactgggagccagaagggtcggggttagatgaccacaggataaagaggaaagaggaacatctctctgtcgtgtctgggagtttctcccagagaaaccaccttccatccagcggcacctccacgccttcttccatggtcgacatcccacctcctttcgacctggcctgcatcaccaagaagcccatcacaaagagctctccctctctcctgatcgacagcgactccccggacaagtacaagaagaagaagtcatcctttaagcggttcctggcgctgatgtttaacaagatggagaggccaggcacgatggctcatgcctgtcatcccagcactttgggaagctga

SEQ ID NO: 125674 - DNA, 618 bp, Homo sapiens
atgctaatctcaggcttcacccagaccggcttgagtaagaaactgcatttgacaaaatcctcagatgattttcctttgcatactgaagaaggatgtttctggctgcaagtaattaaaggccagactcaaagtggcttccgcaatgaaggaaatttattagctcacaaagctaaaaagtgcaagaggcagtcaggtttcagttctggaggctgggaagttctagatcaaggtgcaggctgtttccacaggaggcctacgtgctgccactgtgctgctgccatgtctctagtgatccctgaaaagttccagcgtattttgagagtattcaaaaccaacattgatgagtggtgtaaaataacctttgccatcactgccattaagggtgtgggtcaaagatatgctcatgtggtgttgaggaaagcagacatcgacctcaccagcagggtgggagaactcactgaggatgaggtagaatgtgtgatcaccatgatgcagaatccacaccagtacaagatcccaggctggttcttgaacagacagaaggatgtaaaggatggaaaatatagccaggccctagccaatggtctggacaacaagctccatgaagacctggagtga

SEQ ID NO: 125675 - DNA, 802 bp, Homo sapiens
gggggaggggaattgacggcttaatagaccgcctgtagaattcggcatgggcacgccggccgcttgtgctgcctctcatgtctctagtgagtccctggaaaagttcccagcatatttttccgagtactcaaccccccaaacctcgatggccggcggaaaaatagccctttgcccatcacttgccatttaagggtgtgggcccgaagatatgctcatgtggtgtttgagaaaagcagaccattgacctcaccaaagagggcgggagaactccactgaggatgaggtggaacgtgtgatcaccattttgcaggaatccacgccagtacaagatcccagacttggttcttgaacagacagaaggatgtaaaggatggaaaatacagccaggtcctagccaatggtctggacaacaagctccgtgaagaccttggagcgactgaaagaagattcggcgcccatagagggcttgcgtcacttactggggccttcggtgtccgaggccagcacacacaagaccaactgggccgccgtggccgtcaccgtggggcctccgctggggccaggaggtgacgaacagtggccggctctccccaggcaaggaggcgatgtaggcccggagcccagagggccgcatcgggcgtgcccgaggcaggtctgggcccaacacctggccggccacgccaaggacgtcacgaccccgcccaacaaccatcgagtttttggggccagccggcgtggtggcagcctagagcggtcccgaggaatgaaaagaggccgccttcggaagcggaagtggatgtga

SEQ ID NO: 125676 - DNA, 381 bp, Homo sapiens
atgcctgatctctacttctacagagatcctgaagagattgaaaaagagcaggctgctgctgaaaacactgtgaccaaggaggaatttcagggtgaatggactgctccagctcctgagttcactgctactcagcctgaggttgcagactggcctgacggcgtgcaggtgccctctgtgcctattcagcagctccctactgaagactggagcactcagcctgccacggaagactggtctgcagctcccactgctcaggccactgaagggggttccacccacggcttcgagggccttgcgcatggcagaggacacggcagcctgctcttcacgctcaactacacctcctgcgagagctttgcccacttgggaggcaggatctag

SEQ ID NO: 125677 - DNA, 225 bp, Homo sapiens
atgccagcctggttcttgaacagacagaaggatgtaaaggatggaaaatatagccaggtcctagccaatggtctggacaacaagctctgtgaagacctggagcgactgaaaaagattcgggcccgtagagggctgcgtcacttctggggccttcgtgtccgaggccagcacaccaagaccacaggctgccgtggccgcatcgtgggtgtgtctaagaagaagtaa

SEQ ID NO: 125678 - DNA, 369 bp, Homo sapiens; identical to SEQ ID NO: 122077

SEQ ID NO: 125679 - DNA, 394 bp, Homo sapiens; identical to SEQ ID NO: 120248

SEQ ID NO: 125680 - DNA, 633 bp, Homo sapiens; identical to SEQ ID NO: 121083

SEQ ID NO: 125681 - DNA, 717 bp, Homo sapiens; identical to SEQ ID NO: 121082

SEQ ID NO: 125682 - DNA, 939 bp, Homo sapiens
atgaaggaaatgggaactccagatgtgcacattgataccaggctcaacacagctgtctgggccaaaggaataaggaaagtcccaaaccgaatccgtgtttggttgtccaggaaatgtaatgaggatgaagattcaccaaataagctctatactttggttacctatgtacctgttaaccactttcaaaaatctacagatagtcaatgtggaggagaactaatcgctgaccactgcctcctcaagtgggtccctgaccccgtgcccctgactgggagacatctcctagcaggggtcaacaggcacctcatacaggagagccccagctggaatctggcaggtgctcctctggaacaaatcttccagaggaaggagcaggcagcaatctttgctattctgcagcctctgctggtgatatccaggcaaacaggatctggagtggacccccagcaaactccagcagacctgcagaagaggggtctgactgtcagaaggaaaactaataaacagaaagcagtagcatcaacatcaacaaaaaggatgaccatgcaaaaactccatccaaaggatcacaactcctctccagcaagggaacaaaacaagacagagaatgagtttgacgagttgacagaaataggctgcagaaggtgggtaataacaaactcctctgagctaaaggagcatgttgtaacccaatgcaaggaagctaagaatcttgaaaaaatgttacaggaattgctaactagaataaccagtttagagaagaacataaatgacctaatggagctgaaaaacacagcacaagaacttcgtgaagcatatacaattatcaatagccaaactgaccaggcagaagaaaggatatcagagattgaagatcaacttaatgaaataaagggtgaagacaacattagagaaaaaacagtgaaaaggattgaataa

SEQ ID NO: 125683 - DNA, 3452 bp, Homo sapiens
atgcaggaacaacagcaagcctccagcctgatcaggagcggcaatgggcgcctccctggatcaggagcacagcggacaccctgccatatccggagggatggaagtcagcggcgggtctgcgatgactgcaaacagcagtggtggaaggcaaaatacaacataccatctggcttgcatgcttgcactgcgactctagaagaaacccatattttagactcgggggcacatgtgcaagttttttacaagggtcaactgcatgtcatgagagttccatgtacagattattttgacacccagaagaaccccaacttgtcacacttacatggatctgtcatggcggaaacagcggttatcaatcacaagaaacgtaaaaatagcccgcgaatcgtccagtcaaacgacctcactgaggcggcatatagtctctcccgggatcaaaaacgtatgctgtatctgttcgttgaccagatcagaaaatctgatggcaccctacaggaacatgacggtatctgcgagatccatgttgctaaatatgctgaaatattcggattgacctctgcggaagccagtaaggatatacggcaggcattgaagagtttcgcggggaaggaagtggttttttatcgccctgaagaggatgccggcgatgaaaaaggctatgaatcttttccttggtttatcaaacgtgcgcacagtccatccagagggctttacagtgtacatatcaacccatatctcattcccttctttatcgggttacagaaccggtttacgcagtttcggcttagtgaaacaaaagaaatcaccaatccgtatgccatgcgtttatacgaatccctgtgtcagtatcgtaagcccgatggctcaagcatcgtctctctgaaaatcgactgggacatagaaccgtaccccgctggcctaaaagagcagattaagtctgatgttttcttgttaagttcctgtgtggaagttctccccaatgctgaaattgggttcttaaaatgtctagctattattggattatgggctgtttctctcttcagctacaataattgctttatatgtacaccggcgttcggtcgaagagtatctggtgtcatagaaattgccgatgggagtcgccgtcgtaaagctgctgcacttaccgaaagtgattatcgtgttctggttggcgagctggatgatgagcagatggctgcattatccagattgggtaacgattatcgcccaacaagtgcttatgaacgtggtcagcgttatgcaagccgattgcagaatgaatttgctggaaatatttctgcgctggctgatgcggaaaatatttcacgtaagattattacccgctgtatcaacaccgccaaattgcctaaatcagttgttgctcttttttctcaccccggtgaactatctgcccggtcaggtgatgcacttcaaaaagcctttacagataaagaggaattacttaagcagcaggcatctaaccttcatgagcagaaaaaagctggggccataaacacacaactggttgaaaccctgctctctgactctagaagaatccccgacttcatgtctaaaacaccaaaagcaatggtaacaaaagctaaaattgacaaatgggatctaattaaactaaagagcttctgcacagcaaaagaaactaccatcagagtgaacaggcaacctacagaatgggagaaaattttcgcaacctactcgtctgacaaagggctaatatccagaatctacaaagaactcaaacaaagttacaggaaaaaaacaaccctgtcaacaagtggtggccatgagaagtggagacgaaatctgaaactcaatgttgctctgctgatatggttttgctgtgaccccacccaaatttcatttttaattgtagctgccaaaattcccatgtcatgtgagggatctggtgggagaagaaaccccatgataaccaggcaaacaggatctggagtggacctccagcaaactccagcagacctgcagaagagggactttactggtagaaggaaaactaacaaacagaaaggaatagcaccaacatcaacaaaaattacgtccacatggaaacctcatccaaagggatcacaactgctcgccagcaagggaaccaaaactggatggagaatgagtttgacaaattgacagaagtaggcttcagaaggtggacaataacaaactcctccaagctaaaggagcgtgttctaacccaatgcaaggaagcaacgaaccttgcaaaaaggttagagaaattgctaactagaataaccagtttagaaaagaacaaaaatgacctgatggagctgaaaaacacagcacaagaacttcgtgaagcatacaccagtatcagcggccgaatcaatcaagcagaacaaaggacatcagagattgaagatcaacttaatgaaataaagcgcagaggcgtctccgtgtgtccacaaccatcagaagacaccccgaggagtactgccagggtcccaaaggggatggtccccttccggccccgggtccccttggtcactccacccagagagaaaaaagaagctccttggcttgcatgccttcgcactagggctctaaggatcctcatagaccctccgagccaggtgtgggatatagtctcgtgtgatgcggagaatgaaaccaagttggaaaacactctgcaggatattatccaggagaacttccccaatctagcaaggcaggccaaccgttcagattcaggaaatacagagaacgccacaaagatactcctcgagaagagcaactccaagacacataattgtcagattcaccaaagttgaaatgaaggaaaaaaatgttaagggcagccagagagaaaaggtcaggtaacccacaaagcgaagcccatcagactaacagcagatctctcagcagaaaacctacaagccagaagacagagtgggggccaatattcaacattcttaaagaaaagaatttttcaacccagaatttcatatccagccaaacctaagcttcataagtgaaggagaaataaaatactttacagacaagcaaatgctgagagatttttgtcaccacaaggcctgcccttaaaagagctcctgaaggaagcactaaacattggaaagggacaacccggtaccagcccgctgcaaaatcatgccaaatttgtaaagaccattgaggctagggaagaaacttgcatcaacttaatgtgccaaataaccagctaacattcttaattgacaggatccaaattcacacataacaatattaactttaaatgtaaatggggctaaatgctcccatttaaagacacgaccagcaattgcaattgcttaagagtcaagacccatcagtgtgctgtattcaggagacccatctcacgtgcagagacacacataggctcaaaataaaaggatggaggaagatctaccaagcaaatggaaaac

SEQ ID NO: 125684 - DNA, 421 bp, Homo sapiens
tatgaggaagaaatcaagattcttactgataaactcaaggaggcagagacccgtgctgagtttgctgagagatcggtagccaagctggaaaagacaattgatgacctggaagataaactgaaatgcaccaaagaggagcacctctgtacacaaaggatgctggaccagaccctgctttctcctttcaccaccccctccttccctgtgtcttttaagtttccttccctacccagtccccattttctggtaaggtttctaggaggtctgttaggtgtacatcctgcagcttattggcttaaaatgtactctccttttatgtggtctctttggggccgattgggagaaagagaaatcaatagtgcaactgttttgatactgaatattgacaagtgtctttttgaaataaagaaccagtccctcc

SEQ ID NO: 125685 - DNA, 849 bp, Homo sapiens
  misc_feature (1)...(849): n = a,t,c or g
gcgtccggaagctaagcacattgcagaagaggcagataggaagtatgaagaggtggctcgtaagttggtgatcattgaaggagacttggaacgcacagaggaacgagctgagctggcagactcccgttgccgagagatggatgagcagattagactgatggaccagaacctgaagtgtctgagtgctgctgaagaaaagtactctcaaaaagaagataaatatgaggaagaaatcaagattcttactgataaactcaaggaggcagagacccgtgctgagtttgctgagagatcggtagccaagctggaaaagacaattgatgacctggaagataaactgaaatgcaccaaagaggagcacctctgtacacaaaggatgctggaccagaccctgcttgacctgaatgagatgtagaacgccccagtcccaccctgctgctgctcctccctctgacccagactccgcctgaggccagcctgcgggaagctggacctttaactgagggctgatctttaacatggaaggctgctttctcctttcaccaccccctccttccctgtgtctttttcggccaaactgtctctgcctcttcccggagaatccagctggggtaggaggctggagcacctttgggaaacaacattttaaggggaatgttgaggcacaatggcattaatgtttttaaaaaggcatgttgttgatgtacacattttgtaattacctttttttgttggttttgtagcaaccatttgtaaaacattcccaaataattccacagtcctgaagcagcaatcgaaatcccctttcttaactttttggaangtgaattttcaccttaatgnataatt

SEQ ID NO: 125686 - DNA, 522 bp, Homo sapiens; identical to SEQ ID NO: 90021

SEQ ID NO: 125687 - DNA, 622 bp, Homo sapiens
ccctttcctcagctgccgccaaggtgctcggtctttccggaggaagctaaaggctgcccgttggggttgagggcccctcactttcatcccggcgactagccaccgcgtaccggccagcgccagcccttacactccgcccggcgccatggcccttctgtctccgtagctcgcctgcatcctactcggccctcatttctgcacggacggatgaggtgacagtcacgggaggataagatcaatgccctcattaaaagcagcccgttgtaaatgttgagccctttttggccatggctttgtttgcaaaggcccctggccaaacgtcaacattgggagcctacatctgcaatgttaggggcccggtggaacctgctgccagccagcctggtgctgcgaccagccaggaaggtccttgccccctccacttgctgctgctccaagctgaaggagaagaaagttggaagcaaagaaaagaaagaatccgaaggaagtcttgaatgatgaacatgggcttttggtctttttgaactaaaacctcttttataaacatgtttcaataaaaaagctggaactttaaaaaaaaaaaaaaaaaaaaaaaaaaaaaaaaaaaaaaagggcggccgct

SEQ ID NO: 125688 - DNA, 678 bp, Homo sapiens
atgcccgtcaccaagctgggccgcttggtcaaggacatgaagatcaagtccctggaggagatctatctcttctccctgcccattaaggaatcagagatcattgactttttcctgggggcctctctcaaggatgaggttttgaagattatgccagtgcagaagcagacccgtgctggccagcgcaccaggttcaaggcgtttgttgctatcggggactacagtggccacgtcggtctgggtgttaagtgctccaaggaggtggccaccgccacccgtggggccatcatcctggccaagctctccattgtccccgtgacaggccgccgtggctctgtgctggtgcgcctcatccctgcacccaggggcactggcattgtctccgcacctgtgcccaagaagctgctcatgatggctggtatcgatgactgctacacctcagcccagggctgcactgccaccctgggcaacttcgccaaggccacctttgatgccatttctaagacctacagctacctgacccccgacctctggaaggagactgtatttaccaagtctccctatcaggaattcactgaccacctcgtcaagacccacaccagagtctctgtgcagcagacccaggctccagctgtggcatacaacatagggtttttatacaagaaaaataaagtgaattaa

SEQ ID NO: 125689 - DNA, 1035 bp, Homo sapiens; identical to SEQ ID NO: 123566

SEQ ID NO: 125690 - DNA, 1056 bp, Homo sapiens
ggcacgaggcaaaacaccaaatggcggatgacgccggtggcagcggggggggcccgaaggccctggtgggccctgggatgggaaaaccccgttgctttccggcgaggttttcggcattgtcatccggggccggggttcccgcccggtggacggggccggggccgagagccgcggagctcgcggaggcaaaggcccgaggataaagggattgggatgcccgtccaccaagttggggccgctttggtcaaggaccattaaagatcaaagttcccctggaaggagatctatctcttctccctgccccattaaaggaatcaaagattcatgattttctttcctggcgggccctctctcaaaggatgaaggttttgaaggattatgcccagtgcagaagcagacccgtgccgggcaagcgcaacaggtttcaaggccatttgttgctatcgggggactacaaatggcccacgtcgggtctggggtgttaagtgctcccaaggaaggtggccaccggccatcccgtgggggcaatcatcctggccaagctttccattcgtccccgtgcgcagaagggtatttggggaacaaagtattggcaaagccccaacactgtccctttgcaaggtgaacagggcgctgcggctttgtggtggtacgcctcatccctggcacccaggggctctggcatcgtctccgcacctgtggcttaaaaagctgctcatgatggctggtatcgatgactgctacaccctcagccccggggtgcactgccacccttgggcaacttcgccaagggccaccctttgattgccatttttaagaacctacaagctaccttgaccccccgacctctggaagtgagactgtattcaccaaagtttccctatcaaggagttcacttgaccacctcgtcaaagacccacacccagagtcttccgtgcagcgggacctcaggctccagcttgtggctacaacatagggtttttatacaagaaaaataaagtgaattaagcgtgtaaaaaaaaaaacacagggcggccgctctagagtatccctcaa

SEQ ID NO: 125691 - DNA, 322 bp, Homo sapiens; identical to SEQ ID NO: 122036
  misc_feature (1)...(322): n = a,t,c or g

SEQ ID NO: 125692 - DNA, 410 bp, Homo sapiens
  misc_feature (1)...(410): n = a,t,c or g
actgtattcaccaagtctccctatcaggagttcactgaccacctcgtcaagacccacaccagagtctccgtgcagcggactcaggctccagctgtggctacaacatagggtttttatacaagaaaaataaagtgaattaagcgtgnnnnnnnnnnnnnnnnnnnnggggggcccgtttaaaagaacccttggggggcccaaatttaaccggggatgggaaggaaaaatttttttccttaaggggggccgattaaaaacctccttgggaattttgggaaagaaccttttttttgggggggggacaaattggcccaacctccttccaaaatttaaaggctttagggnnnnnnnnnntttttaaggggaaaagggggaaaaacaaccgcgatagccttgtggttaaaaagttg

SEQ ID NO: 125693 - DNA, 315 bp, Homo sapiens; identical to SEQ ID NO: 115156

SEQ ID NO: 125694 - DNA, 1262 bp, Homo sapiens
  misc_feature (1)...(1262): n = a,t,c or g
ggaaatnnngggncgacccacgcgtccgaaaacaccaaatggcggatgacgccggtgcagcgggggggcccggggcccctgtcggcctattgagggggaaaccacgatgtcttgcgcggaggttttaccagggccatactgggacgaccgtcgcgccagccgaccttaaccggggccgaggcacacggagctcgcggaggcaaggccgaggataaggagtggatgcccgtcaccaagttgggccgcttggtcaaggacatgaagatcaagtccctggaggagatctatctcttctccctgcccattaaggaatcagagatcattgatttcttcctgggggcctctctcaaggatgaggttttgaagattatgccagtgcagaagcagacccgtgccggtcagcgcaccaggttcaaggcatttggttgctatcggagactacaatggccacgtcggtctgggtgttaagagctccaaggaggtggccactgccatccgtggggccatcatcctggccaagctctccatcgtccccgtgcgcagaggctactgggggaacaagatcggcaagccccacactgtcccttgcaaggtgacaggccgctgcggctctgtgctggtacgcctcatccctgcacccaggggcactggcatcgtctccgcacctgtgcctaagaagcctgctcatgatggctggtatcgatgactgctacacctcagcccggggctgcactgccaccctgggcaacttcgccaaggccacctttgatgccatttctaagacctacagctacctgacccccgacctctggaaggagactgtattcaccaagtctccctcaacaggaactcactgaccacctcgtcaagacccacaccagagtctccgtgcagcggactcaggctccagctgtggctacaacatagggtttttatacaagaaaaataaagtgaattaagcgtgaaaaaaaaagacaactaaaaaggggccgccgtttttaagggatccctgaggggccccaagtttacccgggcttgcaaggcaaaacctttttccttaaagggggccgtattaaaacctacctgggaatttttggaaaggaccctaattttgggggggggaaaaattgggccaaattactttcggagattaaaagttttagggtaatattaaaattttaaagcgaataaggggtaaaactacttcgtaaacgtttgttgtttaaaaactttgctaacggatgtggattaaagaaaaattg

SEQ ID NO: 125695 - DNA, 684 bp, Homo sapiens
atggccttcaaagtgggcacaaccctagaatgtggggaagaggccaggaaagagcagtatctagatgaaagcttgtacattgagacaatggaaaaggctggcattgaatgcctgtggcttttccatgcacacagtgaaagcttcaagctgtcggtggatctaccattctggaatctggaggatgatggccctcttctcacagctccactaggcagtgccccaggtggtgacttcaaacaccatgatggcactggtggcaagtccatctatggggagaaatttgatgatgagaaattcatcctgaagaatacaggtcctggcatcttgtccatggcaatgctagacccaacacaaatggttctcagtttttcatctgcactgccaagactgagtggttggatggcaagcatgtggtcttggcaaggtgccttggctggactcccacccatcttccaggtccctcttcctcgcctggtttccctggtgaccaggactcctacagcagggagcaaatgcttttatggatgccgatcaggccaggctgtctcactgcaggccacctcccatgccaccctcgtggctgttgagggcccagtactcacaggtccaaggccactccagggcacacccttggtaaaatctggctgctatgatgatggcacagatgctccctccctagagtga

SEQ ID NO: 125696 - DNA, 816 bp, Homo sapiens
gaattcggcacgagggataaccgtgtactattacccctggtcaaccccaccgtgttcttcgacattgccgtcgacgtgtttatcccttgggccgcgtttcctttgagctgtttgcagacaaggtcccaaagacagcagaaaattttcgggctctgagcactggagagaaaggatttgggttataagggttccctgctttcacagattatttcccagggtttatgctgtcaggggtggtgactgtgaagtcaccataatggcacctggtggcaagtcccatctatggggaagaaatttgaaggatgagaacttcatccctaaagcatacgggtcctggcatcttgtcccatggcaaatgctggtacccaacacaaatggttccccagtttttttaacatcttgcactgcccaagactgaagtggttggatggcaagcatggctgggcttggcaaagtgaaagaaggcatgaatattgtggaggccatggagcggctttgggtccaggaatggcaagaccagcaagaagatcatcagcattgcttgactgtgggacaacttcgaattaagttttgactttgtgtttttatctttaaccaccaagatcatttccttctgttaggtcagggagagcaccccctccaccccatttggctcggagtaatcctagaatcttttgtggctcttcgctgcaagttcccttttgggttccatgttttcctttgttccctcccatgcctagctggatttgcagagttaagtttatgattattgaaataaaaacctaattaccatttgtcaaaaaaaaaaaaaaaaaa

SEQ ID NO: 125697 - DNA, 878 bp, Homo sapiens
atgtccggagcccttgatgtcctgcaaatgaaggaggaggatgtccttaagttccatgcagcaggaacccacttaggcggcaccaatcttgacttccagatggaacagtacatctataaaaggaaaagtgatggcatctatatcataaatctgaagaggacctgggagaagtttctgctggcagctcgtgctgttgttgccattgaaaaccctgctgatgtcagtgttatatcctccgggaatactggccagagggctgtgctgaagtttgctgctgccactggagccactccaattgctggccacttcactcctggaaccttcactaaccagatccaggcagccttccgggagccacggcttcttgtggttactgaccccagggctgaccaccagcctctcacggagtcatcttatgttaacctacctaccattgctctgtgtaacacagattctcctctgcgctatgtggacattgcaacaacaagggagctcactcagtgggtttgatgtggtggatgctggctcgggaagttctgcgcatgcgtggcaccatttcccgtggacacccatgggaggtcatgcctgatctctacttctacagagatcctgaagagattgaaaaagaagagcaggctgctgctgaaaaggcagtgaccaaggaggaatttcagggtgaatggactgctcctgctcctgagttcactgccactcagcctgaggttgcagacttgtctgaaggtgtacaggtgccctctgtgcctattcagcagttccctactgacgactggagcactcagcctgccacggaaaactggtctgcagctcccactgctcaggccactgaatgggtaggagcaaccactgactggtcttaa

SEQ ID NO: 125698 - DNA, 1677 bp, Homo sapiens
atgtctggagcccttgatgccctgcaaatgaaggaggaggatgtccttgcagcaggaaccaacttaggtggcaccaatcttgacttccagatggaatggtacatctgtaaaaggaaaagtgatggcatccacatcataaatctgaagaggacctgggagaagcttctgctgtcagctcgtgccattgttgccattgaaaaccctgctgatgtcagtgtcatatcctccaggaatactggccagagggccatgctgaagtttgttgctgccacaggagacactccaattgctggctgcttcactcctggaactttcactaaccagatccaggcaaccttctgggagccacgggttcttgtggttactgatcccagggctgaccaccagcctctcatggaggcatcttatgttaacctacctaccattgctctgtgtaacacagattctcctttgcgctatgtggacattgccatcccatgcaacaacaagggagctcactcagtgggtttgatgtggtggatgctggcttgcaaagttctgcacatgtgtggcaccatttcctgtgaacacctgtgggaggtaatgcctgatctctacttctacagagatcctgaagagactgaaaaagaaaagcaggctgctgttgaaaaggctgtgaccaaggaggaatttcagggtgaatggactgctctagctcctgagttcactgctactcagcctaaggttgcaggctggtctgaaggagtgcaggcaccctctgtgcctattcagaggttccctacggaagactggagtgctcagcctgccacggaagactgggggcaaatcctcgaacgcgaacctgatctcatgtcacagaagcaacttgccatgaaatccgctaatgcgctgcgactcgcccaccaggggaggaatggcagagaagaagctctgaaaagcatctcctctacaaaggcgatgagaacaatggcaaaaatggtcaaagtcaactttttcagaactctggaaattatccaaaggcttgcaacaattgaaggaatgtttaagaaaaacagcctgaatctcagtcctcagatcgaccagcccaagaaacatctcaccaatttcaaatccgtccatgatttttcaacaaccgtgatgctgtcagccattgtagagatccctttgccaaatcgcaaacttgccaaatattactgtgaccaatgttattgtggaagaaacaggaagagagttataactctctgtaccaagctattgtctggaactaaagggtcttcccacattccttgtgctaactctccaggtttcctgggcaaggcaggcttccttagaattaggggtaccgagctggacctcgtagtcattaccggtttgcattttggggatcccgaaagctttggcccagatgggcaggaggccacagtgcagagcccgacttgggcccccgacaagaccgcagaatttgagcgggtgccaagagaaccagtgaagaaagtgaacccaaatcccagaccgctgggcaccactaacccggctttctgtccccgcctggacagcagggaccaactctgtccctgccccattccaccaactttccaaagcttctgcgagcagcgccctagagggctcttccggcggggacggaggaagaggggcggcaagccggaggctgcctag

SEQ ID NO: 125699 - DNA, 1189 bp, Homo sapiens
atgcttgaggcagtgctggaagagagccctcgggaggaggcggctttctcctgggtcatgaaggggaatctggctgcaggaaaaaccatccaagcgcaagacagagatgctgtgggcatcctcagttccagaactggggaatccatggaaaacctgcagaaaaacttgctgcccaagcagaggaggcgaacgagggaaactttcacaatgtctggagcgcttgatgtcctgcaaatgaaggaggaggatgtccttaagttccttgcagcgaggaacccactttaggtggcaccaatcttgacttccagatggaacagtacatctataaaaggaaaagtgatggcatctatatcataaatctcaagaggacctgggagaagcttcttgctggcagctccgtgcaattgttgccattgaaaaccctgctgatgtcagtgttatatcctccaggaatactgggccagaagggctgtgcttgaagttttgctgcctgccactggagccactccaattgctggcccgcttcactcctgggaaccttcacttaaccagatccagggcagccttccgggaagccacgggcttccttgtggttacctggaccccagggcttgacccaccagcctctcacggaggcaatcttatgtttacctacctaccattgcgcctgtgtaacacagattcttcctcttgcgctatgtggacattgccatcccatgcaacaacaagggagctcactcagtgggtttaatgtgggtggatgctgggctcgggaagttctgcgcatgcgtgggcaccatttcccgtgaacacccatgggaaggtcatgcctgatctgtacttctacagagatcctgaagagattgaaaaagaagagcaagctgctgctgaaaaagcagtgaccaaggaggaatttcagggtgaatggactgctcccgctcctgagttcactgctactcagcctgaggttgcagactggtctgaaggtgtacaggtgccctctgtgcctattcagcaattccctactgaagactggagcgctcagcctgccacggaagactggtctgcagctcccactgctcaggccactgaatgggtaggagcaaccactgactggtcttaagctgttcttgcataggctcttaagcagcatggaaaaatggttgatggaaaataaacatcagtttct

SEQ ID NO: 125700 - DNA, 1398 bp, Homo sapiens
tcgaagactgagcggttgtggccgcgttgccgacctccagcagcagtcggcattctctaacgcagaaacccgggagtaggagactcagaatcgaatctcttctccctccccttcttgtgagatttttttgatcttcagctacattttcggctttgtgagaaaccttaccatcaaacacgatggccagcaacgttaccaacaagacagatcctcgctccatgaactcccgtgtattcattgggaatctcaacactcttgtggtcaagaaatctgatgtggaggcaatcttttcgaagtatggcaaaattgtgggctgctctgttcataagggctttgccttcgttcagtatgttaatgagagaaatgcccgggctgctgtagcaggagaggatggcagaatgattgctggccaggttttagatattaacctggctgcagagccaaaagtgaaccgaggaaaagcaggtgtgaaacgatctgcagcggagatgtacgggtcagtaacagaacacccttctccgtcccctctactcagctcctcttttgacttggactatgactttcaacgggactattatgataggatgtacagttacccagcacgtgtacctcctcctcctcctattgctcgggctgtagtgccctcgaaacgtcagcgtgtatcaggaaacacttcacgaaggggcaaaagtggcttcaattctaagagtggacagcggggatcttccaagtctggaaagttgaaaggagatgaccttcaggccattaagaaggagctgacccagataaaacaaaaagtggattctctcctggaaaacctggaaaaaatggaaaaggaacagagcaaacaagcagtagagatgaagaatgataagtcagaagaggagcagagcagcagctccgtgaagaaagatgagactaatgtgaagatggagtctgaggggggtgcagatgactctgctgaggagggggacctactggatgatgatgataatgaagatcggggggatgaccagctggagttgatcaaggatgatgaaaaagaggctgaggaaggagaggatgacagagacagcgccaatggaggatgactcttaagcacatagtggggtttagaaatcttatcccattatttctttacctaggcgcttgtctaagatcaaatttttcaccagatcctctcccctagtatcttcagcacatgctcactgttctccccatccttgtccttcccatgttcattaattcatattgccccgcgcctagtcccattttcacttcctttgacgctcctagtagttttgttaagtcttaccctgtaatttttgcttttaattttgatacctctttatgacttaacaataaaaaggatgtatggtttttaaaaaaaaaaaaaaa

SEQ ID NO: 125701 - DNA, 1370 bp, Homo sapiens
ggaattccaaacccgggagtaggagactcagaatcgaatctcttctccctccccttcttgtgagatttttttgatcttcagctacattttcggctttgtgagaaaccttaccatcaaacacgatggccagcaacgttaccaacaagacagatcctcgctccatgaactcccgtgtattcattgggaatctcaacactcttgtggtcaagaaatctgatgtggaggcaatcttttcgaagtatggcaaaattgtgggctgctctgttcataagggctttgccttcgttcagtatgttaatgagagaaatgcccgggctgctgtagcaggagaggatggcagaatgattgctggccaggttttagatattaacctggctgcagagccaaaagtgaaccgaggaaaagcaggtgtgaaacgatctgcagcggagatgtacggctcctcttttgacttggactatgactttcaacgggactattatgataggatgtacagttacccagcacgtgtacctcctcctcctcctattgctcgggctgtagtgccctcgaaacgtcagcgtgtatcaggaaacacttcacgaaggggcaaaagtggcttcaattctaagagtggacagcggggatcttccaagtctggaaagttgaaaggagatgaccttcaggccattaagaaggagctgacccagataaaacaaaaagtggattctctcctggaaaacctggaaaaaatggaaaaggaacagagcaaacaagcagtagagatgaagaatgataagtcagaagaggagcagagcagcagctccgtgaagaaagatgagactaatgtgaagatggagtctgaggggggtgcagatgactctgctgaggagggggacctactggatgatgatgataatgaagatcggggggatgaccagctggagttgatcaaggatgatgaaaaagaggctgaggaaggagaggatgacagagacagcgccaatggcgaggatgactcttaagcacatagtggggtttagaaatcttatcccattatttctttacctaggcgcttgtctaagatcaaatttttcaccagatcctctcccctagtatcttcagcacatgctcactgttctccccatccttgtccttcccatgttcattaattcatattgccccgcgcctagtcccattttcacttcctttgacgctcctagtagttttgataagtcttaccctgtaatttttgcttttaattttgatacctctttatgacttaacaataaaaaggatgtatggtttttatcaactgtctccaaaataatctcttgttatgcagggagtacagtccttttcattcatacataaggtcagtaattgctttc

SEQ ID NO: 125702 - DNA, 399 bp, Homo sapiens
atgagagaggacacaaacaaatggaaaaacattccatgctcatggataggaagaatcaacatcgtgaaaatggccatactgcccaaactacccccaacaaaccaagaagcaaagaaagagctgagacgagaagtgaccggcggcggcggcggctgctatggcagatttgttggggcggtgggtttattacaggagtattcgtggtcggatcggaaggctcaagcttatgctttttcctctttccgctttcctccctcctcctcctcccccctgcagcgcagacctgtcgcagccagagagctgtcatttcagtaccgggattcagaattgatccagtccgcagcggagggggcacatcccagctaccgagctgctgagtgtctctggctggaacaatag

SEQ ID NO: 125703 - DNA, 570 bp, Homo sapiens
atgatgatgacgatgatgattatcatcgtcatcatccctattttacatctgaggaaatggaggcacaaagatgttaacttgtccagtgtaccagggaaagccaggagagccaacagcagttccacaccaacccagctcaggaaggcggaccgaacagcggcacagaaagcagcttgtacagtcagcaaccctgaaacaaacgctcctctccaatgcaatgccaatcggactccttcgccaggagtaaacctagccagcagcaggaatgaggattccagaggagaaacgtggaaaactcaaaaagcagaattgggaaaagaaggttccagggaaatctgcctcctcctcggggccctcttggtgtccgtcagcttctggacactcttctctgagcacctcaggggaaagacaaggatgacagtaggaaataaggcaggtcttacagcacatagaggtctaaagaaaaacatgcgtctgcatttcagaggaacattctatgtcaatgacctctctgaatatggagccccagaaaaaaagaaagaagagccagaccctaaaggcagagactag

SEQ ID NO: 125704 - DNA, 388 bp, Homo sapiens
tgtctgggcttcatagcattcgcctactccgtgaagtctagggacaggaagatggttggcgacgtgaccggggcccaggcctatgcctccaccgccaagtgcctgaacatctgggccctgattctgggcatcctcatgaccattggattcatcctgttactggtattcggctctgtgacagtctaccatattatgttacagataatacaggaaaaacggggttactagtagccgcccatagcctgcaacctttgcactccactgtgcaatgctggccctgcacgctggggctgttgcccctgccccccttggtcctgcccctagatacagcagtttatacccacacacctgtctacagtgtcattcaataaagtgcacgtgcttgtga

SEQ ID NO: 125705 - DNA, 627 bp, Homo sapiens
ggcacgagaacagcggccagcctcccaactacgagatgctcaaggaggagcaggaagtggctatgctgggggcgccccacaaccctgctcccccgatgtccaccgtgatccacatccgcagcgagacctccgtgcctgaccatgtcgtctggtccctgttcaacaccctcttcatgaacacctgctgcctgggcttcatagcattcgcctactccgtgaagtctagggacaggaagatggttggcgacgtgaccggggcccaggcctatgcctccaccgccaagtgcctgaacatctgggccctgattttgggcatcttcatgaccattctgctcaccgtcatcatcccagtgttggtcgtccaggcccagcgatagatcaggaggcatcattgaggccaggagctctgcccgtgacctgtatcccacgtactctatcttccattcctcgccctgcccccagaggccaggagctctgcccttgacctgtattccacttactccaccttccattcctcgccctgtccccacagccgagtcctgcatcagccctttatcctcacacgcttttctacaatggcattcaataaagtgtatatgtttctggtaaaaaaaaaaaaaaaagtcg

SEQ ID NO: 125706 - DNA, 623 bp, Homo sapiens
tgagaaccatcccagtaacccgaccgccgctggtcttcgctggacaccatgaatcacactggccaaaccttcttctctcctgtcaacagtggccagccccccaactatgagatgctcaaggaggagcacgaggtggctgtgctgggggcgccccacaaccctgctcccccgacgtccaccgtgatccacatccgcagcgagacctccgtgcccgaccatgtcgtctggtccctgttcaacaccctcttcatgaacccctgctgcctgggcttcatagcattcgcctactccgtgaagtctagggacaggaagatggttggcgacgtgaccggggcccaggcctatgcctccaccgccaagggccttgaacatctgggccctgattctgggcatcctcatgaccattctgctcatcgtcatcccagggctgatcttccaggcctatggatagatcaggaggcatcacatgaggccaggagctctgcccatgacctgtatcccacgtactccaacttccattcctcgccctgcccccggagccgagtcctgtatcagccctttatcctcacacgcttttctacaatggcattcaataaagtgcacgtgtttctggtgaaaaaaaa

SEQ ID NO: 125707 - DNA, 2207 bp, Homo sapiens
ggtctgcctgtttccatgccaccatcaggggagtgagcacggggaataatcagccaggcagcctcactcagcctcacctcggctccggagatcgttctggagctgagtggtgacgtcagcagcagggctgagcacaaacaacaaggccaggcgccaagacgaccaggcgaggggggcccgggggacagcaccactgcacggtgccctgaagggggagcaggtgccacggcacttccccgagaccgcatgcgggggctgcggctggaatgggacctgcaccccactcaggtctgcctgaagggctgtcagtcaagaaggaagacgggacccagcaaacagaagccacgacctcccagcggccctggacacacatgaccaacgcaccagcagtaaacaaaagggcctgcaagggtcacccccggggccacccctcccagcaggtggtgatggatggcccgcagctgtgcacagtggggcagtcctgcttaggttcagcagcaggttcccagcagacagaaacgctctggtggccctggaggccgtggtgggcagagaacaaatccaggcggcccctcccctctatgcctaaccccagcatctgcagggaatcacccactgtcttcaacctcagggaggaagccccgacacaatctgacttgcaaagaggctccccagcgaagctcccagcaccgcccttgcggctgcctgcacttccgccatgcaccctggattccgaggctcccggggccactgacctcgaagcttatgatggtcgtggtgtgttttttgcccgcggcccagaccgcttcctgggctctctccagccgccctcctggtctcccctgggaccgttccgaggcctggtcaaagctgaggacaaggcccgagttcaccgctccaagaagcaggaggggccaggccctgaggacgcccggaagaaggtgccagctgcccccatcactgtcagcaaggaggcaccggcccctgtggcccacccagctccaggtggccctgaagagcagtggcagagggccatccatgagcgcggggaagccgtctgccccacctgcaacgtggtcacccggaagactctcgtggggcttaagaagcacatggaggtgtgtcagaagcttcaggatgcactcaagtgccagcactgccggaagcagttcaagtccaaagccggcctcaactaccacactatggccgagcacagtgccaagccctctgacgccgaggcctccgaagggggcgagcaggaggagcgcgagaggctgcgcaaggtgctgaagcagatgggacggctgcgctgcccccaggagatcctttcagctattggcgccctggaggatggacgggaaggagaacgtggccggtgggtggaggatagcactggtgcctggccccatgaggctgcaatgcggccacattctcagtgggtcatgtctgaatgcgagagcagctgtgttctgcgagtgggagtggtgggagggcctgtgagtaagggctccggaaggcccatcattgggacctggtgccgccagtgggagcaggaggagcctgtgccttctctggcgccagtcatcccagatgccactcagggcttggctgggtttgccagctctccaggttggcactgctacaagaagactcaggaaactctttcacaggcaggacagaagacttcagctgccctgtccacagtgggctctgccatcagcaggaagcttggagacatgagaactggtcttctggcttttggatctcagggagtgcctccctgtagctctgacccaatcctggcaaagatgggtgcaggcttcctaaaggaccgccgtgaggctgagcagttgctagtcatgatcttgcgagagcctcctgttgagtcaggacttgaggagactggagacagtgctgctgtccccggtggtgtgcggactggaggagccgtcctggagggtcttcccctgctgggcctgactgagcacgagcagggggcctcccctggggctccccgaggagggctgaactctgcgaccttcaagtcgtttgaggaccgagttgggaccataaaggtaattgtacctggactgtttgatggtcttggcaagtctaaggttgtgggtgacagagagaacggcagtgacaacctcccttcctcagcggggagtggtgacaagcccctgtcggatcccgcacctttctaa

SEQ ID NO: 125708 - DNA, 759 bp, Homo sapiens
ttcaacattctgatgggctaacatgattcccaaagggagcctgggctttggctcaatattctttcaaaccctccgccctgtccacttcctgcacccctaggaaggacagcacagtgatctgtttcatctacaaacgtgagtgtaaaacatctgtgtacaagcctgtgttcttcaaattcatgcaaacgcggcagccacatctccgcgtggatgggcaggactgtcctcagggccggctctgctcatccgcgcctggctggctgctccgctgaacacgagctgcggctgtgatgctgaggctgggttgcgtgtgctctgcagcgggttgaaagcaaccaccaggcttaggaaaaggtgcggggatccgacagggggcttgtcacccactccccggcttgaggaagggaggttggtcactgccgttctctctgtcacccacaaccttagactttatggtcccaactcggtcctcaaacgacttgaaggtcgcagagttcctcatgtctccaagcttcctgctgatggcagagcccactgtggccagggcagctgaagtcttctgtcctgcaggtctgactgggtcactttctcattccactctccaagtttctcagaagttttcacataggcgctagagacctgcacgtcatgccagctcctggacaggttctgtttcagctcccccagggtggagaggcccagcctcctcttgagctctccacagtgcctctccttggctgccaggacctggcgcagagt

SEQ ID NO: 125709 - DNA, 284 bp, Homo sapiens
  misc_feature (1)...(284): n = a,t,c or g
cactgactaggccatgtgggcctggaaccaggctggccagtgcccctggctagggcagtattgtnagagggacctggagtatcattgcctgaaagtcccaaggcatcagctgggacaggtttgaggaggtcactctctgcagagaaccattcaccccntgccagcagtcatctgcccctgcagttcctggacactcatggagcgggtactctgtggggactgtaacctggccanttctttggcctaagccagttccatacggctggtcagaaggcatggacact

SEQ ID NO: 125710 - DNA, 2541 bp, Homo sapiens
atggaggccctgggacctgggggcgaccgcgcctccccggcctcgtccactagcagcctggacctgtggcatctgtccatgcgcgcggactcggcctacagctctttctccgcagcctccggcggccccgagccgcgcacgcagtcgccggggacagacctccttccttacctagactgggactacgtgcgtgtggtttggggcggcccgggccccgccccgcccgacgctgccctttgcacatccccgcggccccggcccgcggttgcagcccgcagtgggccgcagccaacagaggtcccggggaccccgggaccactgaacaggcaggccaccccgctgctgtacgcgctggcggccgaggcggaggccgcggcgcaggctgccgagccgcccagcccgccggcctcgagggccgcctaccgccagcggcttcagggcgcgcagcggcgagtgctccgggagacgtcgttccagcgcaaggagctccgcatgagcctgcccgcccgtctgcggcccactgtcccagcgcggcccccggcgactcacccgcgctccgcctcgctcagccacccgggcggggagggggagccggcgcgctcccgggctcccgcgccaggaactgccggccggggtcccctcgccaaccagcagcggaagtggtgcttctcagagccaggaaagctggatcgtgtgggtcggggcggtgggccggcgcgggaatgcctgggtgaggcctgctccagctctggcctccctgggcccgagcccttggagttccagcatccggcgctggctaagtttgaagatcacgaggtcggatggctgcccgagacgcaaccccaaggctccatgaacctggactccgggtccttgaagctcggtgatgccttcaggcccgccagtcggagtcggagcgcttcaggcgaagtcttgggttcctggggaggatcaggagggaccatacccattgtccaggtatggaagtcaggagatgcaggctgtgtccatgcctctgaccagccgtatggaactggcttaggccaaagaactggccaggttacagtccccacagagtacccgctccatgagtgtccaggaactgcaggggcagatgactgctggcagggggtgaatggttctgtaggtatttccaggcccacaagccacacccccactgggactgcaaatgataacatcccaactattgaccccactggactgaccaccaatccccccacagctgcagagagtgacctcctcaaacctgtcccagctgatgccttgggactttcaggcaatgatactccaggtccctctcacaatactgccctagccaggggcactggccagcctggttccaggcccacatggcctagtcagtgcctcgaggagctggttcaggagctggccagattagatccctctctatgtgaccctcttgcttcccagcccagcccagagccacccctgggcctgctggatggactgattcctttagcagaggtccgggctgcaatgcggcctgcctgtggggaggctggagaggaggctgccagtacttttgagccagggtcctatcagttcagcttcacccagctcctgccggctcctcgggaggagacaaggcttgaaaaccctgccacccaccctgtgcttgaccagccatgtgggcaggggctccctgcaccaaacaacagcatccagggcaagaaagtggagctggccgcccgcctccaaaagatgcttcaggaccttcacacggagcaggagcggctgcagggggaggcacaagcgtgggccaggcgccaagcggctctggaggctgcagtgcgccaggcctgtgcccctcaggagctggagcggttcagccggttcatggccgacctagagcgcgtgcttggccttctgctgctgctgggcagtcgcctggcgcgcgtgcgccgcgccctggcccgggcggcctcagacagcgaccctgatgagcaggcctccctgctgcagcgactccggctcctgcagcggcaggaggaggacgccaaggagctgaaggagcacgtagcgcggcgcgagcgggccgtgcgggaggtgctggtgcgagcactaccggtggaggagctgcgcgtctattgcgccctgctggcgggcaaggccgccgtcctggcccagcagcgcaacctggacgagcgcatccgcctccttcaggaccaactggacgccatcagggacgaccttggccatcatgccccagataccactgggtcagccaggcctgaggcgggcagtcgagggtgggagctgaagttttctcccttccatatcgttatttctccagagggcaagaatgagctcaccacatttgttccgttatcagcacctcagacttcaagactttgtggggaccagaagcccggtgaactgacccttcaggatactgccagcagagggcgctgtcctaatggtgaaagctggtacctacgcttcgccattcgcagcttctccagcttaccaggccctctgggccagccacagggactttga

SEQ ID NO: 125711 - DNA, 1629 bp, Homo sapiens
atggacaattctcttggaaattttctcattcctgttcactggcttgcaagtactctgtgctcctcagggagcccgttaaagaatactgctctctgcagagacacgaaaggatcctcaaggcacgtcttcttagcttcccatgaaagccacaagttactcaggacagaactgcctttgcagaattacagggaagggctgggtgggcagaaagccccctcctctggtagtgatgggagtgggttttgtctgcacaggagactgtgtctacctgcctggaagaaggagtctcacccagaacagggctgcacacagtcaagggcagacagagcagcccggacttcctacttgacagctcagaggaggaagcaggcgttgccagtcctgcgaaaggatagcagcaaaatcagcacaacatcacttctgttaccagaaaggggtcccaatccagaccccaagaaagggttcttagattctcatccaagaaataattcagggcaacctccgctgctgatacccaggcaaacagggtctggagtggacctccagcaaactccaacagatctgcagctgaggatcctgactgttagaaggaaaactaaccaacagaaaggacatccacaccaaaaccccatctgtacgtcaccatcaccaagaccaaaggaacgcagctcctcatcagcaacggaacaaagcaggatggagaatgactttgacgagttcagagaagaaggcttcagacgatcaaactactccgagctaaaggaggaagttcgaacccatggcaaagaagatattatacaggagaacttccccaatctagcaacgcaggcaaacattcaaattcaggaaatacagagaacgccacaaagatactcctccagaagagcaactccaagacacataattgtcagattcaccaaagttgaaatgaaggaaaaaatgttaagggcagccagagagaaagaaatacaaactaccatcagagaatactataaacacctctacacaaataaactagaaaatctagaagaagcggataaattcctcaacacatacaccctcccaagactaaaccaggaagaagttgagtctctgaatagaccaataacaggatctgaaattgaggcaataattaatagcataccaaccaaaaaaagtccaggaccagatggattcaaggccgaattctaccagaggtacaaggaggaactggcaccattccttctgaaactattccaatcaatagaaaaagagggaatcctccctaactcattttatgaggccagcatcatcctgataccaaagcctggcacagacacaacagaaaaagagaattttagggcaatatccctgatgaacattgatgcaaaaatcctcaataaaatactggcaaatcgaatccagcagcacatcaaaaagcttatccaccatgatcaagtgggcttcatccctgggatgcaaggctggttcaacatatgcaaatcaataaacataatcaaacatataaacagaaccaatgacaaaaaccatatgattatctcaatagatgcagaaaaggcctttgacaaaattcaacaacacttcgtgctaaaaactctcaaggtattgatgggacatatctcaaaataa

SEQ ID NO: 125712 - DNA, 1464 bp, Homo sapiens
atgaggggagccacagaagaccgaaggcaaaatgcagagaggatgggaaatggggaggtggaacacagttcctcaccagcaacggaacaaagctggactgagaatgactttgacgagttgagagaagaaggcttcagacgatcaaactactccaagctacaggaggaaattcaaaccgaaggggaagaagttaaaaactttgaaaaaaatttagatgaaagtataactagaataatcaatacagagaagtgcttaaaggagctgatggagctgaaaaccaaggctcgagaactacgtgaagaatgcagaagcctcaggagccgatgcgatcaactggaagaaagggaagaagttgaatctctgaatagaccaataacaggctctgaaattgtggcaataatcaatagcttaccaaccaaaaagagtccaggaccagatggattcacagccgaattctaccagaggtacaagggggaactggtaccattccttctgaaactattccaatcaatagaaaaagagggaatcctccctaactcattttatgagggcagcatcatcctgataccaaagctgggcagagacacaaccaaaaaagagaattttagaccaatatccttgatgaacattgatgcaaaaatcctcaataaaatactggcaaaccgaatccagcagcacatcaaaaagcttatccaccatgatcaagtgggcttcatccctgggattcaaggctggttcaatatacacaaatcaataaatgtaatccagcatataaagagaaccaaagacaaaaaccgcatgattatctcaatagatgcagaaaaggcctttgacaaaatccaacaacgcttcatgctaaaaactctcaataaattaggtattgatgggacatatctcaaaataataagagctgtctatgacaaacccacagccaatatcatactgaatgggcaaaaactggaagcattccctttgaaaactggcacaagacagggatgccctctctcaccactcctattcaacatagtgttggaagttctggccagggcaattaggcaggagaaggaaataaagtgtattcaattaggaaaagaggaagtcaaattgtccctgtttgcagatgacatgattgtatatctagaaaaccccactgtctcagcccaaaatctccttaagctggaaagcaacttcaggaaagtctcaggatacaaaatcaatgtacaaaaatcacaagcattcttaaacaccaataacagacaaacagagagccaaatcatgagtgaactcccattcacaattgcttcaaagagaataaaatacctaggaatccaacttacaagggacgtgaaggacctcttcaaggagaactacaaaccactgctcaaggaaataaaagaggatataaacaaatggaagaacattccatgctcatgggtaggaataatcaatatcgtgaaattatag

SEQ ID NO: 125713 - DNA, 3129 bp, Homo sapiens
ttaacgggatcctctagagtcgacctgcaggcatgcaagcttggcactggccgtcgttttacaacgtcgtgactgggaaaaccctggcgttacccaacttaatcgccttgcagcacatccccctttcgccagctggcgtaatagcgaaaaggccccgcaccgatcgcccttcccaacagtgtgcccagcccatgaaccagtcaacctgccaatctgaaccctcaggcgaccactcgcatccctaacagatattgtggtattagtttgcttcattgcaccctcaacgtcacttccgtagttttctaatgttccacccttgtcaagcctccatccggactggttaaatacatagttattcgactgaatcgcgttaccaatcattgcgttagtaataaatccatcctttatgatcgcgctacttagaataacttggccattctcaacaacgaatgggtactgagtctgaccattcatccctgtcattattgcaaatcgtgatgcctcaaacaaaatctgcgccttaactgctgcgctggggtctcctcccacagtgttgaagctttgtttttgttgctgtttgcaataaattttgtcatggctgactctttggtctatactgcgtttatacattgtaacactcaccgggaagatctgtagtctcacttctgaagccagcgaagccacgagcccaccgagaggaacgaacaactccagaagcgtcgccttagcagttgtaacacttgtctggagagtctgcagtttcatttttgattcaaaagctttcatcttagcttttgccttttttttttcacattggttttctattctccctttccctccacaacacggcgctactctctggtatttttggggagatttcgagtgttctaggggacccaggaacatccacactgacgaccgagcaaggcttgttccaatgacagagagaggaggtcctccacagggaggtgaaccggcaaggacaaggagtccgcgacaaggaggaaggggcggtatggaaggcggggaatagtatccctgtccgccacacttaggcgggcaagaaagaaaaccgggatgacaggcagggcgaggcaaaggttggagatgtgacgcggccgcaaacgctaggagctccctggagaagtcaatggaccaccccaagctgaatcctaagaaggcagagacgaggcttggtctgcgaggaatgttagtccgctgaaactgcgatctgctatcatcattatcatttttgtcatcatcatagttttcattatcattattatccattggcatgccacacgctaacaagcacagtccttgatcatggtggataagctttttgatgtgctgctggattcggtttgccagtattctattgaggatttttgcatcaatgttcatcaaggatattggtctaaaattctcttttttggttgtgtctctgccaggctttggtatcaggatgatgctggcctcataaaatgagttaggaaggattccctctttttctattgattggaatcgtttcagaaggaatggtaccagttcctccttgtacctctggtaaaattcagctgtgaatccatctggtcctggactctttttggttggtaagctattgattattgccacaatttcagctcctgttattggtctattcagagattcaacttcttcctggtttagtcttgggagggtgtatgtgtcgaggaatttatccatttcttctaggttttctagtttatttgcatagaggtgtttgtagtattctctgatggtagtttgtatttctgtgggatcggtggtgatatcccctttatcattttttattgcatctatttgattcttctctcttttcttctttattagtcttgctagcagtctatcaattttgttgatcctttcaaaaaaccagctcctggatttattaattttttgaagggttttttgtatctctatttccttcagttctgctctgattttagttatttcttgccttctgctagcttttgaatgtgtttgctcttgcttttctagttcttttaattgtgatgttagggtgtcaattttggatctttcctgctttctcttgtgggcatttagtgctataaatttccctctacacactgctttgaatgtgtcccagagattctggtatgttgtgtctttgttcttgttggttttaaagaacatctttatttctgcgttcatttcgttatgtacccagtagtcattcaggagcaggttgttcagtttccatgtagttgagcggttttgagtgagtttcttaatcctgagttctactttgattgcactgtggtctgagagacagtttgttataatttctgatattttacaattgctgacgagagctttacttccaactatgcagtcaattttggaataggtgtggtgtggtggtagttctcgagccttggctttcagctccatcagctcctttaagcacttctctgtattggttattctagttatacattcttctaaatttttttcaaagttttcaacttctttgcctttggtttgaatttcctcctgtagctcggagtagtttgatcgtctgaagccttcttctctcaactcgtcaaagtcattctccgtccagctttgttccattgctggtgaggaactgcgttcctgcaaggaaggactagttgttgcttcagctattacaagtgcattcagcagacgatccacaactgtcaggactttcagggattgtttcagctgcagagctgcctgcccaagatcacatcctttttgaggctggtcctgataacagtggataacggctttaacggccagaaggtcagcgcagtcccggatgaggacgagtagaacggtaacggccatggggcggttggccttccttctaccagaccttgatgtgggaagagagaaatggagtaacaagccacatttggcgctttggagatgcccaccacgctttgggaagatgtaccagcgtttatagaaggcccgagtgtataaggtgagaaagctactctcagcttccccgaaaacttttacaagaaaacatttgccacatctagcccctccagatgtaaagaagctgccgatgtatgatagactaagaatatcacacat

SEQ ID NO: 125714 - DNA, 583 bp, Homo sapiens; identical to SEQ ID NO: 117892

SEQ ID NO: 125715 - DNA, 906 bp, Homo sapiens
ttacaatttggcatgtttttgcagtggctggtaccggttgtacctttccatgtttggtgcttccttcaggagctgttttagggcaggcctggtggtgacaaaatctctcagcatttgcttgtctgtgaagtactttatttctccttcacttatgaagcttagtttggctggatatgaaattctgggttgaaaattcttttctttaagaatgttgaatattggcccccactctcttctggcttgtagagtttctgctgagagatcagcagttaatctgatgggcttccctttgtgggtaacccgacctttctctctggctgcccttaacattttttccttcatttcaactttgctgaatctgacaattatgtgtcttggagttgctcttcttgaggagtatctttgtggtattctctgtatttcctgaatttgaatgttggcctgccttgctagattggggaagttctcctggataatatactgcagagtcttttccaacttggttccactctccccgtcactttcaggtgcaccgattagacgtagatttggtcttttcacatagtcccatatttcttggaggctttgtttgtttctttttattcttttttctctaaacttctcttcactgttcatttcattcatttcattttccatcgcagctaccctttgtagttctcgtgccatggttttcagctccatcaggtcctttaaggacttctctgcatcagttattctagttatccattcgtttaattttttttcaaagtttttatcttctttgccattggttcgaacttcctcctttagctcggagtagtttgatcttctgaagccttcctctctcaactcgtcaaagtcattctctgtccagctttgttctgttgctggtgaggagctgcgttc

SEQ ID NO: 125716 - DNA, 1011 bp, Homo sapiens
gaacgcagctcctctccagcaacggaacaaagctggatgcagaatgacttggatgagttgagagaagaaggcttcagacgatcaaacttcttcaagctaaaggcggaagttcgaacccaatgcaaagaaactaaaaaccttgaaaaaacattagacaaatggctaactagaaaaaccagtgtagagaagtccttaaatgacctgatggagctgaaaaccatggtacaaggactacgtgacaaatgcacaaacttcagtaacggatttgatcagctggaagaaagggtatcagtgattgaagaacaaatgaatgaaatgaagcaagaaaagaagtatagagaaaaaaaggacagatcaatgacacagaaagttaacaaggatatccaggaattggactcagctctgcaccaagaggaactaatagacatctacagaactgtccaccccaaatcaacagaatatacattcttctcagcaccacatcgcacctatttcaaaattgaccacatagttggaagtaaagcactcctcagcaaatgtaaaagaacagaaattataacaaactgtctctcagaccacagtgcaatcaaactagaactcaggattaagaaactcactcaaaaccgctcaactacatggaaactgaacaatctgctcctgaatgactactgggtacataacgaaatgaaggcagaaataaagatgttctttgaaaccaatgagaacaaagacacaacttacgagaatctctgggacacattcaaagcagtgtgtagagggaaatttagagcactaaatgtccacaagagaaagcaggaaagatctaaaattgacaccctaatatcacaattaaaagaactagagaggcaagagttaacacattcaaaagctagcagaatgcaagaaataactaagatcagagcagaacagaaggagaaagagacagaaaaaaacattcaaaaaaatcagcgaatccaggagctgtttcttttaaaagatcaacaaaactga

SEQ ID NO: 125717 - DNA, 1545 bp, Homo sapiens
atgggaaaaaaacagagcagaaaagctgaaaattctaaaaatcagagcacctctcaccctccaaaggaacgcagctcctcatcagcaacggaaaaaagctggatggagaatgactttaacaagttgagagaagaaggcttcagacaatcaaacttctcagagctaaaggaggaagttcgaacccactgcaaaaaagcgaaaaaccttgaaaaaagattagacgaatggctaactagaataaccaatgtagacaagtccttaagtgacctgatggagctgaaaaccgtggcacgagaactatgtgacacatgcacaagcttcagtagccgattctatcaactggaagaaagggtatcagtgattgaagatcaaatgaatgaaatgaagcgagaagagaagtttagagaaaaaagagtaaaaagaaatgaacaaagcctcccagaaatatgggactatgtgaaaagaccaaatctgcgtctgattggtgtacctgtaagtgacagggagaatggaaccaagttggaaaacactctgcaggatattatccaggagaaattccccaacctagcaaggcaggccaacattcaaattcaagaaatacagacggccacaaagatactcctcgagaagagcaactccaagacacataattcaccacatcacacttattccaaaattgaccacatagttggaagtaaggcactccttagcaaatgtagaagaacagaaattataacaaactgtctctcagaccacagtgcaatcaaactagaactcaggattaagaaactcactcaaaaccgctcaactacacagaaactgaacaacctgctcctgaatgactactgggtaaataacgaaatgaagggagaaataaagatgttctttgaaaccaatgagagcaaagacaaaacataccagaatctctgggacacatttaaagcagtgtgtagagggaaatttatagcactgaatgcccacaagagaaaacaggaaagatctaaaattgacaccctaacatcacaattaaaagaactagagaagcaagagcaaacacattcaaaagctagcagaaggcaagaaataactaagatgagagcagaactgaaggagatggagaaacaaaaaacccttcaaaaaatcaatgaatccaggagctggttttttgaaaagatcaacaaaattgacagactgctagcaagactaataaagaagaaaagagagaataatcaaatagacacaataaaaaatgatgaacgggatatcaccactgatcccacagaaatacaaactaccatcagagaatactataaacacctctatgcaaataaactagaaaatctagaagaaatggataaattcctggacacatacagccttccaagactaaaccaggaagaagttgaatctctgaatagaccaataacaggctctgaaattgaggcaataattaatagcctacgaaccaaaaaaagtccaggaccagatggattcacagccgaattctaccagaggtacaaggagagcaggtaccattccttctga

SEQ ID NO: 125718 - DNA, 1350 bp, Homo sapiens
gttttcactgatatagaagcagcacaggccaagaagtggagaaccaagaggaaagtgaatactgtcaggttgaggactgaagttgagctattggcatatcttggtgctagtgagttaaaattagtcttcagtgtttgccaacgtaaagaagtcctgtccttggtcataattgctgaagatattgatagagaagctcgaagtacattcatttttaataggctaaaagttggtcttcagatcatagcagtcaaagctccagattttggtgacaacagaaagaaccaacgtgaagatacagctattgctactggtggtctggctcaaattgaaaaatatattcaagaaatcgttgagcagttagatgttacaactagtgaatatgaaaaggaaaaactgaatgtatgtctggcaaaactttcagatggagtagcagtgctgaaggctggtgggacaagtgatgtcaaagaatgcagctcctcaccagcaatgcaacaaagctggatggagagtgactttgacgagttgagagaagaaggcttcagacgatcaaacttctccaagctaaaggaggaagttcgaatgcatcgcaaagaagctaaaagccttgaaaaaaaattagatgaatggctaactagaataaccagtgtagagaagtccttaaatgacctcatggagctgaaaaccatggcacgagaactacataaccaatgcacaagcttcagtagccaattccatcaactggaagaaagggtatcagtgattgaagatcaaatgaatgaaatgaagcgagaagagaagtttagagaaaaaacagtaaaaagaaatgaacaaagcctccaagaaatatgggactatgtgaaaagaccaaatccatgtctgattggtatacctcaaagtgacggggagaatggaaccaagttggaaaacactctgcaggatattatgcaggagaacttccccaacctagcaaggcaggccaacattcaaattcaggaaatacagagaatgccacaaagatactcctcgagaagagcaactccaagacacataattgtcagattcaccaaagttgaaatgaaggaaaaaatgttaagggcagccagagagaaaggttgggttacctacaaagggaagcccatcagactaacagcggatctcttggcagaaactctacaagccagaagagagtgggggccaatattcaccattcttaaagaaaagaattttcaacccagaatttcgtgtccagccaaactaagcttcataagtgaaggagaaataaaatcctttacagacaagcaaatgctgagagatttgtcaccaccaggcctgctctacaagagctcctga

SEQ ID NO: 125719 - DNA, 2127 bp, Homo sapiens
atggcagaaggcaaaggagaagcaggcaccttcttcacagggcagcagcatggacctccgctgctgatatccaggcaaacagggtctggagtggacctccagcaaactccaacagacctgcagctgagggtcctgactgttagaaggaaaactaacaaacagaaaggacatccacaccaaaaccacatctgtatgtcaccatcaacaaagaccaaagaggaacacagctcctcaccagcaacggaacaaagctggatggagaatgactttgatgagttgagagaagaaggcttcagacgatcaaactactctgagctaaaggaggaagttcgaacccatggtaaagaagttaaaaaccttgaaaaaaaattagatgaatggctaactagaataaccaatgcagagaagtccttaaaggacctgatggagctgaaaaccacagcaagagaaatatgtgacgaatgcacaagtctcagtagccgatgtgatcaacttccacgaccagatggattcacagccgaattctacgagaggtacaaggaggagatggtaccattccttctgaaactattccaatcaatagaaaaagagggaatcctccctaactcactttatgaggccagcatcatcctgataccaaagcctggcagagacacaacaaaaaaagagaattttagaccaatatccctgatgaacattgatgcaaaaatcctcaataaaatactggcaaaccgaatccagcagcacatcaaaaagcttatccaccataatcaagtgggcttcatccctgggatgcaaggctggttcaacatatgcaaatcaataaacataatccagcatataaacagaaacaacggcaaaaaccacatgattacctcaatagatgcagaaaaggcctttgacaaaattcaacaacgcttcatgctaaaaactctcaataaattagtggagataggaaacaaatatattaggattgttctcataattgagataatgtacaaaagaccttggtccagctctgcctatggagatagcttgatgaatggcagctactgtgattatttctgcactgtaaatgtctgttcctgggtcccctggtggaatctggagaaaaacgaggagcctgaggagagtagaggcagccgcgagacggccttcacatacgcggtgagcgcagcaggggtggtgaacgccatgagccgggcgtgccgcgagggcgagctgtccacctgcggctgcagccgcgccgcgcgccccaaggacctgccgcgggactggctctggggcggctgcggcgacaacatcgactatggctaccgctttgccaaggagttcgtggacgcccgcgagcgggagcgcatccacgccaagggctcctacgagagtgctcgcatcctcatgaacctgcacaacaacgaggccggccgcagggaccacgcatcgcgcctggatgctctgggccggagccagatgagcaatcatgcatcccactacccaagtccctactactctggggactttgcaggagagccggggtccgtgcggcagctgcccagcgagcccttccgccgccgccgttgtgcccgggaccgcccgcctcccgccggcccgctctcccgcccctcggacccgggcgccaaacgaggaggtgggcagcttcgccggccatggaccgccggagctgagtcgccgccgcggagctccgagctctcgcccttccccagcctcgcgcccgcggtgcactcgctgctcttcgcccttcgccctggaaaaacggggaaaagagagatcaacccgaagagagaaagaacgggatacgtgatgaaaaataattacagtgaatgtctgatgtccttgatgtttttccaagataaagtagcaaagaacagtcatttattcagttgtgagaaagatttccagctgggcagcaggtcacaaggcagaatacaatgccccacaattgcagcaaactgcttttggcacccaactctgcgctttcaacgcagcagccaacaacagcgccatttcaatggtgacatccagtccatagtgcattcccgtttacagtttacaactcctgtttacaaccctgtttataatcccgttgccctgagaatgcaggactga

SEQ ID NO: 125720 - DNA, 1350 bp, Homo sapiens
atgccaaaatctcccaaggacatcactgcagctggagccaggaagtggaccagcaagagcatcagagagccgtgggagaaccttagtcagaccatacagaacccatctccaacaacggcaccatgtggtagcacaagctttatctcagatgtttccaactacacttgcaacaatgagaccaataagggctttgttgtcctagacccaagagctgttctgggagtaccggaggagggctgggctgtacctccgctgctgatatccaggcaaacagggtctggagtggacctccagcaaactccaacagacctgcagctgagggtcctgactgttagaaggaaaactaacaaacagaaaggacatccacaccaaaaccacatctgtatgtcaccatcaacaaagaccaaagaggaacacagctcctcaccagcaacggaacaaagctggatggagaatgactttgatgagttgagagaagaaggcttcagacgatcaaactactctgagctaaaggaggaagttcgaacccatggtaaagaagttaaaaaccttgaaaaaaaattagatgaatggctaactagaataaccaatgcagagaagtccttaaaggacctgatggagctgaaaaccacagcaagagaaatatgtgacgaatgcacaagtctcagtagccgatgtgatcaactggtttcagtgatggaagatcaaatgaatgaaatgaaacgagaagagaagtttagagaaaaaagaatacaaagaaacaaacaaagccaccaagaaatatgggactatgtgaaaagaccaaatctacgtctaatcggtgtacctgaaagtgacaaggagaatggaaccaagttggaaaacactctgcaggatattatccaggagaacttccccaatctagcaaggcaggccaacattcacattcaggaaatacagagaacgccacaaagatactcctcgagaagagcaactccaagacacataattgtcacattcaccaaagttgaaatgaaggaaaaaatattaagggcagccagagacaaaggtcgggttacccacaaagggaagcccatcagactaacagctgatctcttggcagaaactctacaagagagaagagagtgggggccaatattcaacattcttaaagaaaagaattttcaaccagaatttcatatccccaaactaagcttcagaagtgaaggagaaataaaatactttacagacaagcaaatgttgagagattctgtcatcaccaggcctgccctaaaagggctcgtgaaggaagcactaaacatggaaaggaacaaccggtaccagccactgcaaaaacatgccaaagtgtaa

SEQ ID NO: 125721 - DNA, 1509 bp, Homo sapiens; identical to SEQ ID NO: 118839

SEQ ID NO: 125722 - DNA, 2043 bp, Homo sapiens
atgatcataattgtgccactgtactccagcctgggtgacagagtgaaatcttgtgaaaagaagagagagagagagagagagagaagaaagaaagaaagaaagaaagaaagaaagaaagaaagaaagaaagaaagaaagaaggcaagcagtaaagaaagggaggaaggaagaaagaaagaaaggagaaagaaattaagaaagaaagaagaaaaggaaagaaagaaaagaaagaagaagagaagagaaggaaggaaagaaagaaagaaagagaaagaaagaaaagaaggaaagaaggaagaaagaaagaatataccaggaaagcgaagagaatccacagaccctttgaaggaaatggatcaccgctgcctgctccctgagatgctgaaaggaacctggtggacaacacctgctagagcttccggcccagcagtcccacttctgtgtgaattcaggcagtggacagtggacacaacctctgttgtcccagaaagcacccacatgccagggcagatgacccaacccatccctgcccctgatagccacaacatggatgaagctggaggccattatcctaagcagactaacacaagaccagaaaaccaaatactgcatgttttcactgataagtgggagctaaacactgagtacaaggacccaaagaagagaacaacagacaccagggcctacttgagggtggaggccacgctggcagctgattggatggtgcccacccagattgagggtaggtcttcctttgttctagccacgctggcagctgattggatggtgcccacccagattgagggtagatcttcctttgttctagccacgctggcagctgattggatggtgcccacccagactgagggtagatcttcctttgttctagccacgctggcagccgattggatggtgcccacccagattgagggtaggggcagaatgacacctcacatggccgggtactcctctgagacaaaacttccagaggaacgatcaggcagcagcatttgcggttcaccaatatccgctgttctgcagccaccactgctgatacccaggcaaacagggtctggagtggacctccagcaaactccaacagacctgcagcttagggtcctgatggaacgcagctcctcaccagcaacggaacaaagctggatggagaatgactttgacgagatgagagacgaaggcttcagaagatcaaactactccgagctaaaggaggaagttcaaacctattgcaaagaagtgtgtagagggaaatttaaagcactaaatgcccacaagagaaagcaggaaacatctaaaattgacaccctaacatcacaattaaaagaactagagaagcaagaggaaacacattcaaaagctagcagaaggcaagaaataactaagatcagagcagaactgaaggagatagagacacaaaaaacccttcaaaaaatcaatgaatccaggagctggttttttgaaaagatcaacaaaattcatagaccgcttgcaagactaataaagaagaaaacagagaagaatcaaataaatgcaataaaaaatgataaatgggatatcaccaacaatctcacagaaatacaagctaccatcagagaatactataagcacctctatgcaaataaactagaaaatctagaagaaatggataaattcctggacacatacaccctcccaagactaaaccaggaagaagttgaacccgtgaatagaccaataacaggctctgaaattgaggcaatcactaatagcctaccaacaaataaaagtccaggatcagatggattcacagtcgaattctaccagaggcacaaggaggagctggtaccattccttctgaaactattccaatcaatagaaaaagagggaatcctccctaactcattttatgaggccaacatcatcctgataccaaagccttgcagagacacaacaaaaaaagagaattttagaccaatatccctgatgaacatcgatgcacaaatcctcaataaaatactggcaaacggaatccagcagcacatctaa

SEQ ID NO: 125723 - DNA, 2897 bp, Homo sapiens
atggtggtgaaggtttggaaatactatgttttggataacattgactcagcaacactgaaagtgttggaagttctggccagggcaatcaggcaggagaaggaaataaagggtattcaattaggaaaagaggaagtcaaattgtccctgtttgcagatgacatgattgtatatctagaaaaccccattgtctcagcccaaaatctccttaagctgataagcaactttagcaaagtctcaggatacaaaatcaatgtacaaaaatcacaagcattcttatacaccaacaacagacaaacagagagccaaatcatgagtgaactcccattcacaattgcttcaaagagaataaaatacctaggaatccaacttacaagggatgtgaaggacctcttcaagcagaactacaaaccactgctcaatgaaataaaagaggatacaaacaaatggaagaacattccatgctcatgggtaggaagaatcaatatcgtgaaaatggccatactgcccaaggaacgcagctcctcaccagcaacggaacaaagctggatggagaatgactttgatgagttgagagaagaaggcttcagacgatcaaacttctccgagctaaaggagaaagttcgaacccatcacaaacaagataaaaaccttgaaaaaaggagctggttttttgaaaagatcaacaaaatcgatagacctctagcaagactaataaagaagaaaagagagaagagtcaaataaacgcaataaaaaacgataaaggggatatcactgccgatcccacagaaatacaaactaccatcacagaatactataaacacctctatgcaaataaactagaaaatctagaagcaatggataaattccttgacacatacaccctcccaagaataaaccaggaagaagttgaatctctgaataggccaataacaggctctgaaactgaggcaataattaatagcttaccaaccaaaaaaagtccaggaccagatggattaacagctgaattctaccagaggtacaaggaggagctggtaccattccttctgaaactattccaatcaatagaaaaagagcgaatcctcccgaactcattttatgagggcatcatcctcctgataccaaagcctggcagagacaacacaaaaaaagataattttaaaccaatatccctgatgaacatggatgcaaaaatcctcaataaaatactggcaaaccgaatccagcagcacatcaaaaagcttatccaccatgatcaagtgggcttcatccctgggatgcaaggctggttcaacatatgcaaatcaataaatgtaatccagcatataaacagaaccaaagacaaaaaccacatgattatctcaacagatgcaggaaaggcctttgacaaaattcaacagcccttcatgctaaaaactctcaataaattaggtattgatgggatgaatctcaaaataataagagctatttatgacaaacccacagccaatatcatactgaatagacaaaaactggaagcattccctttgaaaactggcacaagacagggatgccctctctcaccactcctattcaacatagtgttggaagttctggccagggcaatcaggcaggagaaggaaataaagggtattcaattaggaaaagaggaagtcaaattgtccctgtttgcagatgacatgattgtatatctagaaaaccccatcgtctcagcccaaaatctccttaagctgataagcaacttcagcaaagtctcaggatacaaaatcagtgtgcaaaaatcacaagcattcttatacaccaataacagacaaacagagagccaaatcatgagtgaaatcccattcccaattgcttcaaagagaataaaatacctaggaatccaacttacaagggatgtgaaggacctctttaaggagaactgcaaaccactgctcaaggaaataaaagagaacacaaacaaatggaagaacattccatgctcatggatagaaagaatcaatattgtgaaaatggccatactgcccaaggtaatttatagtttcaatgccatccccatcaagcacccaatgactttcttcacagaattggaaaaaacaactttaaagttcatatggaaccaaaaaagagcccgcatcaccaagtcaatcctaagacaaaagaacaaagctggagatatgtgaaacagagcaagaaaatagctgtctatgcagaaagaagcaggtgctcaccaggcactgaatttgctggcaccttgatcttggacttcccatcctccagaactgcaccctccagtaggggcagactgacgcctcacacggccaggtacccctctgagacaaagcttccagaggaacgatcaggcagcaacatttgctgttcagcaatattcgctgttctgcagcctctgctgctgatatccaggcaaacagggtctggagtggacctccagcaaactccaacagacctgcagctgagggaacgcagctcctcgccagcaacggaacaaagctggatggagaatgactttgacgagttaagagaaggcttcagacgatcaaactactccaagctaaaggaggaagttcaaacccattgcaaagaagctaaaaaccttgaaaaaagattagacgaatggataactagaataaccaatgtagagaagtccttaaatgacctgatggagctaaaaaacatggcaaaagaactacgtgatgaacgcacaagcttcagtagcgaattcaatcaactggaagaaagggtatcagtgattgaaaatcaaatgaacgaaatgaagcgagaagagaagtttagagaaaaaagagtaaaaagaaatgaacaaagcctccaagaaatatgggactatgtgaaaagaccagatgagatctacatctga

SEQ ID NO: 125724 - DNA, 2007 bp, Homo sapiens
atggtgtccaggtttgtgggaactcaggttccaactgccaggattgatgattccgctctggctagggctggtttaaatgctccctctgtgggtcttgatgactgtttgcagcagtatattaagaactttgagagggagaagatcagtggggaccagctgctgcgcattacacatcaggagctagaagatctgggggtcagccgcattggccatcaggaactgatcttggaagcagttgaccttctgtgtgcattggaatttatctatgattttccaatttattgccatggatggatatcgctgctgctagttattcagggcccaagagcttttcagttagcaggtgatgcatgctacctggactgggtccttccccttaaggcaacagtgcacagaaacactctcatcatcaggcagctgctgcccaggtttgggggaaagggggcattggcaattgaagactgtttttcctacctcttctgtgcctctttcaatgatatgaagttaaaactagaaggaaaactaacaaacagaaaggacatccacaccaaaaacccatctgtacatcaccagcatcaaagaccaaaagtagataaaaccacaaagatggagaaaaaacagagcagaaaaactggaaactctaaaaagcagagcacctctcctcctcaaaaggaacgcagttcctcaccagcaactgaacaaagctggatggagaatgactttgacgagttgagagaagaaggcttcagacgatcaaactactccgagctacaggaggaaattcaaaccaaaggcaaagaagttaaaaactttgaaaaaaatttagacaaatgtgtaactagaataaccaatgcagagaagtgcttaaaggagttgatggagctgaaagccaaggctcaagaactacgtgaagaacgcagaagcctcaggagccgatgcgatcaactggaagaaagggtatcagtgattgaagatcaaatgaatgaaatgaagcgagaagggaagtttagagaaaaaagaataaaaagaaatgaacaaagcctccaagaaatatgggactatgtgaaaagaccaaatctacgtctgattggtgtacctgaaagtgatggggagaatggaaccaagttggaaaacactcttcaggatattatccaggagaacttccccaatctaacaaggcaggccaacattcagattcaggaaatacagagaacaccacaaagatactcctcgagaagagcaactccaagacacatagttgtcagattcaccaaagttgaaatgaaggaaaaaatgttaagggcagccagagagaaaggtcgggttacccacaaagggaagcccatcagactaacagcagatctctcagcaggaactctacaagccagaagagagtgggggccaatattcaacattcttaaagaaaagaattttccacccagaatttcatatccagccaaactaagcttcataagtgaaggagaaataaaatactttacagacaagcaaatgctgactatagtacacctaaaaaccctggacattatatatatgtataacataagaagaccgaaaggtggagagaagaaagcagaccaagaagttaactcagaaccaaggaataacattgtgctggagacaaaaggagaccggggaccccaggcccctgccagtcctggaggacccccgccccgacgcgtacgacgatccgccagtggaagccgcgcgggcattacctttcatccagtccactacttgactcggagaccatttgctcaccggttccattatcagagccatgggtacggggtcggttccgtgcagagcgcagagctcagacacaaaacgaactcagcagcccgagctgctctcagagacggaggtgtggactgccgtggacgagaacggggctccgcctgccagaagcgcagcgatgatgaggcaggagggctagtgctgtcggatcttccccgggtgatgagcgggtcctgggaagtcaggcgttga

SEQ ID NO: 125725 - DNA, 3409 bp, Homo sapiens
atggtaccagcatctgcttctgatgagggcctcaggaagcttccagtcatggtggaaggtgaagggggagccagcgtatcacatggcaaacaggccctgatgatcactgatttcattgcgaaccaaagcaaagacaggagcctgattgttcgattactttgtgccacattttataaggaaaaactgatcactattcacaatagcaaaggcatggaatcaccccaaatgcacatcagtgacagactggataaagaaaatgtggtacatatataccatggaatactatgcagtcacaagaaggaacaagatcgtgtcctttgcagagacatagatggagctggaagtcattatcgtcagcaaactaacacaggaacagaaaaccaaacactgcatgttctcacttacaagtgggagctgaacgatgagaacacatggacacagggaggggaacaacacacactagagcctgttgagcccactgaagagaagctttttatccagtttgaaagatcacatattgtgtcagcctggactgccttgcagaccttttctacaattaaacttctttgcttactgaaagctttcatccctgaggcttgttttcttgctcagataatggactcaatcacacaagaaggaataatagagattacggaacgcagctcctcaccagcaacggaacaaagctggacggagaatgactttgacgagttgagagaggaaggcttcagaaaatcaaactactccgagctaaaggaggaagttcgaaccaatggcaaaaaagttaaaaactttgaaaaaaaattagacgaatggataactagaataaccaatgcagagaagtccttaaaggacttgatggagcggaaaaccaaggcacgagaactacgtgatgaatgcacaagcctcagtaaccgatgcgatcaactggaagaaaggggatcagcgatggaagacgaaatgaatgaaatgaagcaagaagagaagtttagagataaaagaataaaaagaaatgaacaaagcctccaagaaatatgggactgtgtgaaaagaccaaatctacgtctgattggtgtacatgaaagtgatggggagaatggaaccaagttggaaaacactcttaaggatattatccaggagaacttccccaatctagcaaggcaggtcaacactcaaattcaggaaatacagagaatgccacaaagatactcctcgagaagagcaactccaagacacataattgtcagattcaccaaagttgaaatgaaggagaaagtgttaagggcaaccagagagaaaggtcgggttacccacaaagggaagcccatcagactaacagctgatctctcggtagaaactctacaagccagaagagagtgggggccaatattcaacattctaaaagaaaagaattctcaacccaggatttcgtatccagccaaactaagcttcaaaactgaaggagaaataaaatcctttacagacaagcaaatgctgagagattttgtcaccaccaggcctgccctaaaagagctcctgaaggaagcactaaacatggaaaggaacaaccgagacacatataggctcaaaataaagggatggaggaaaatctaccaagcaaatggaaaacaaaaaaaggcaggggttgcaatcctagtcttggataaaacagacttcaaaccaacaaagatcaaaagagacaaagaaggccattacataatggtaaagggatcaattcaacaagaagaactaactatcctaaatatatatgcacccaatacaggagcactcagattcataaagcaagtccttagtgacctacaaagagactcagactcccacacaataataacgggagactttaacacctcactgtcaacattaggcagatcaacaagacagaaagttaacaaggatatccaggaattgaactcagctctgcgccaagtggacctaatagacatctatagaactccccaccccaaatcaacagaatatacattcttttcagcaccacaccgcacctattccaaaattgaccacatagttggaagtaaaagagtcctcagcaaatgtaaaagaacagaaatgataacaaactgtctctcagaccacagtgcaatcaaaccagaactcaggattaagaaactcactcaaaaccactcaattacatggaaactgaacaacctgctcctgaatgactactgggtacataacgaaatgaaggcagaaataaagatgctctttgaaaccaacgagaacaaagacacaacataccagaatctctgggacacattcaaagcagtgtgtagagggaaatttatagcactaaaggcccacaagagaaagcaggaaagatctaaaattgacaccctaacatcacaattaaaagaactagagaagcaagagcaaacacattcaaaagctagcagaaggcaagaaataactaagaacagagcagaactgaaggaaatagagacacaaaatacccttcaaaaaatcaatgcatccaggagctggttttttgaaaggaccaacaaaattgatagacctctagcaagactaataaagaagaaaagagagaagaatcaaatagatgcaataaaaaatgataaaggggatatcaccactgatcccacagaaatacaaactaccatcagagaatactataaacacctctacgcaaataaactagaaaatctagaagaaatggataaattcctcgacacatacaccctcccaagactaaaccaggaagaagttgaatctctgaatagaccaataacaggcgctgaaattgaggcaataattaatagcttaccaaccaaaaaaagtccaggaccagatggattcacagccgaattctaccagaggtacaaggaggagctggaatgcagctcctcaccagcaatggaacaaagctggacggagaatgactttgacgacttgagagaagaaggcttcagacgatcggtaataacaaacttctctaagctaaaggaggatgttcaaacccatcacaaggaagctaaaaaccttgaaaaaagattagacgaatggctaactagcaataaccaatgtagagaagtccttaaattacctgagagagctgaaaaccatggcacgagaactatgtgatgcatgcacaagcctaagtagccaatttgatcaaccggaagaaagggtccagacaaccagtgcgtatgttaaggctgaagaaaacctgcttagtcagtgcggtggtgagaaggagttgagcctttcgggacgtggagtgcctgccgcagagctgatgccccgaggctgccgcagacgctgcagagctgatgccagcaagttggcggctgtgcgctcatctctcccggacaactcttccccggcgctcggggttcagttcagccaccagcct

SEQ ID NO: 125726 - DNA, 1504 bp, Homo sapiens
ttacaatttggcacgtttttgcagtggctggtactggttgttcctttccatgtttagtgcttccttcaggagctcttgtagggcaggcctggaggtgacacaatctctcagcatttgcttgtctgtaaaggattttatttctccttcatttatgaagcttagtttggctggatatgaaattctgggttgaaaattcttttctttaagaatgttgaatgttggcccccactctcttctggcttgtagagtttctgccgagagatctgctgttagtctgatgggcttccctttgtgggtaacccgacctttctctctggctgcccttaacattttttccttcatttcaactttggtgaatctgacaattatgtgtcttcgagttgctcttctcaaggaatatctttgtggcgttctctgtatttcatgaatttgaatgttggcctgccttgctaggttggggaagttctcctggataatatccaatcctgcagagtgttttccaacttggttccattctccccatcactttcaggtacaccagtcagatgtatatctggtcttttcacatagtcccatatttcttggaggctttgttcatttctttttattctttttttctctaaacttctcttctcgcttcatttcattcatttgatcttccatcactgataccctttcttccagttgagcaaattggctactgaggcttttgcattcgtcatgtatttctcgtgccatggttttcagctccatcaggtcctttaaggacttccctgcattggttattctagttatccattcgtctaatttttttttcaaggtttttagcttctttgcaatgggtttgaacttcctcctttagctcagagaagtttgattgtctgaagccttcttctctcaactcgtcaaagtcattctctgtccagctttgttctgttgctggcgaggagctgcgttcctttggagggggagaggcgctctgatttttagaattttcagcttttctgctctgttctttccccatctttgtggttttatctacctttggtccttgatgatgtagatgacgtagagatggggttttggcgtggatgtcctttctgggcccagactgcaaacttggtctcccctgatgtatgcagccacggccatctctgttttcttctagctttccattgctgcttttttggcttggcttgttgggggtctcccagtgtctgagtaagttggttgttacccagagatttgtggagattgtagtccaattttgccctgtggttttcttgcttctcggaattttactaatttccagctgttctacagagcttctaaccttcactagtacttcaaccttgtagagctgcagcttcctgctgcctacactgcatagttggggaatgcactcttgctgttgttgtggtagtgagtgagtcttcacgagatctggttgtttaaaagtgtgtagcacttcccccccttcactcttattctcctgctccaccat

SEQ ID NO: 125727 - DNA, 970 bp, Homo sapiens
gcggccgccatggcggacagcggcaccgcggggggcgcggcgttggcggccccggcccccgggccgggcagtggcggcccaggaccacgcgtctactttcagagcccccccggggccgcaggagagggcccgggcggggcggacgatgagggcccagtgaggcgccaagggaaagtcacccgtcagttatgaccgcaaggagctacggaagcgccttcaaccttagaggattggatcctgtagcagcttaacggcgccttctacgactgccagggaagaggagatcccagaactggagattgacgtggatgagctcctggacaatggagagtgacggatgcccgggctgcccagggtcaaggagctgctggttgactgttacaaacccacagaggccttcatttctggcctgctggacaagatccggggcatgcagaagctgagcacacccccagaagaagtgagggtccccgacccagggagaacggtggctcccacaggacaatcgctaccccccgacctcgtagcaacagcaataaccgggggaacctgacggccaggccttggtgccatgagcagggctcctcgtgcccctggcccaggggtctcttcccctgccccctcagttttccacttttggggtttttttattgttattaaactgatgggactttttgtgtttttatattgactctgcggcgcgggccctttaataaagcgaggtagggtacgcctttggtgcagctcaaaaaaaaaaaaaaaatgatttccagcggtccacattagagttgaaattttctggtgggagaatctataccttgttcctttataggccaaggaccgcagtccttcagtaacaccagtgtaaaagcttgaggagaaattgtgaagctacacagtatttgttttctaatacctcttgtcattctaaatatctttaatttattaaaaaatatatatatacagtaaa

SEQ ID NO: 125728 - DNA, 1696 bp, Homo sapiens
tcaggggacaatgtttacatctcctggttttctcctggggctgtcatttgccatgggcatgatgaccgctgtgtgtagactcagcgtttcttgttccaggtcccccaggtggaagctggcatatgtgagcagactcatcctcatcggaagagagtatctagaagtggccctggtgacattagccactggtaagccctctccaacctccttcctgcagctcaggaagtccttgctgtactggcctccccgttgttcctgcaagcattttcctccatcaggacatttgttcctgctgttacctccagctgaaacatggattttgacagagtcacaggctccctctccctccccaggcctgtgatcggatgtcaccttctcagggaagccttcgttggtcaccttatttccactgtatcctccgggtaagttttccttctcttctgtagacgtctccatgttacagtcaactataaaacatggctcatgttcactctgggcttcgccttcagaggagtttgatattttggaagtggtacctttgttctgtgtgcttttcagaccaaccgcttctttcatttcttcaaggcttccttccaaaggagttaaatcatcatcatgtccttttggaagagcagggtcctcaatggtgtaagaaaagccatttccctctgggcatgcgtcttctttcccagcctgtctacaacaccttagggcttcttcaggggcagaagtcacgcaactcgaagttgcacggccttcaccatttccagttttccgaggactggagatggtttttgctgtgaaattggtaatgtcaactgttctggtttttttgccaacgcaggaaaaatcagacatttcaaatatgcttgttctctccttcttagaaagacttctgcagctcaactgagcagggcttgatggcagctgagattcaggaggaagattctctgaatacctttccttaagattatcaggtgaaaaatagtcatcatatgaagactccccacagctaagagcctccagggcaggtcccgccacgtgctgcagcctgtcttccgacctgcacagctgcagcctcggcatgatagatctcctggtgctcctctttctcttgcatttttccttcggaggtgaatgggagccatgtgatactctttttctctttactgaggaactcctgggtcttgaatgtatcaaaaggtggccttttgttgaagataaggtaggagacaaacgatacttctcttcaaacgtctcctgagacatacctgcagcctgcttttggtcaggggtgactactttacctgcaatatttctttgcaagtttatttcttcctttgaaagattactcagaaatttctgaggacttgatttatcgaggtgagtgaaagatggtgatgaatgaatattatttgctttcaatacaagtgaagaaatacacacatcacttttaatgtcattaatggatccttccaacttcctttcctgatttccacatcctgagtttccacaaagatcatcaaaagatgagtgtaagccaccagcaaagtattcatacagacaatgagaaattggaatttctttgtcaccagaactgaaatctgctgagggcgatgagagagctgctgtagagaagttctcataggcatactcttctctgggtagcattggaaactttcgaattcttactttt

SEQ ID NO: 125729 - DNA, 654 bp, Homo sapiens
atgcagtccctgactaactccgagcttgagaattatatccaggacaacatgaagaaagaaatggtagagatacagcagaatgcagtacagaaccagacggctgtgatgatagaaatagggacaaacctgttgaaccaaacagcggagcaaacgcggaagttaactgatgtggaagcccaagtgaacagcatttataaccacggtgtacctcggaagaagcgttctcagagcaacatgcacgtgttcccagctaacgaccccactgttgctaaagaagaacaaatcagcttcagagactgtgctgaagtattcaaatcaggacacaccacgaatggcatctacacgttaacattccctaattctacagaagagatcaagcccacagctgtcacaccagaagcacacccctcaccccgagtgggaacaaatgtggaaaatctgggaaatggtgagcaggccagttttggcacatacccttgtttccgcttcaccccggaggggagggcttgtggtgccctctccctgcctccactcaccttccaacaagtgctggagtttgattcacaccaaacagaaatagccaaaatttgtaagaactctattgggcagctcttctgtatcaatgactgtacaggctccaagggccagaaataa

SEQ ID NO: 125730 - DNA, 3533 bp, Homo sapiens
atggtggattcgttaattgcgcgcgtaggagtaatggctcgcggtaatgccattactttgcctgtatgtggtcgggatgtgaagtttactcttgaagtgctccggggtgatagtgttgagaagacctctcgggtatggtcaggtaatgaacgtgaccaggagctgcttactgaggacgcactggatgatctcatcccttcttttctactgactggtcaacagacaccggcgttcggtcgaagagtatctggtgtcatagaaattgccgatgggagtcgccgtcgtaaagctgctgcacttaccgaaagtgattatcgtgttctggttggcgagctggatgatgagcagatggctgcattatccagattgggtaacgattatcgcccaacaagtgcttatgaacgtggtcagcgttatgcaagccgattgcagaatgaatttgctggaaatatttctgcgctggctgatgcggaaaatatttcacgtaagattattacccgctgtatcaacaccgccaaattgcctaaatcagttgttgctcttttttctcaccccggtgaactatctgcccggtcaggtgatgcacttcaaaaagcctttacagataaagaggaattacttaagcagcaggcatctaaccttcatgagcagaaaaaagctggggtatcttataggcctgtacacatggcagccaaggggacctggccgccagagctcgtagagatgacccagcacaatgggctgggcagtaaggaagccagactctggagccagcgtggaggtgcaggagctcgtaggggaggtaatgaggagcatcgattaggctcccagatccgttctgagattcagataaggtgtcctaacaaaaggtttatggaaaagatttggtcctataaaggaaattccagtatgtcgactctagaggatccccggaacaaactcaaagacatgcacagtcaaggccatgatcacgtcaaaatctggtggacatacaattggcatgactggattgttctgaaaatccagtttgccagagttgattttttcctagaaaagaaggtgctagctatggaagacaagcacatcatccaactacagtcaataaaagaagagaaagatcagctacaggtgttagtatccaagcagaattccatcattgaagaactcgaaaaaaaaatagtgactgccacggtgaataattcagttcttcagaagcagcaacatgatctcatggagacagttaataacttactgactatgatgtccacatcaaactacctacagatagtgatggaaatgtcacaagctttcttccaaaagcactgcagaactcctaataaagaatggaaattctcaggcggtgggggagtcaatagagggcagcggggatgccgagtcaaggtctggggtacgggccgccgcaggggccccgggggttatggagaatgcagcagacaaggaatggccactgagtttggggaagaaatctacagaacggtgctgaaaataaatccttgtggctacatttcctcatgtctgtatagtaggcgccccccgtatatgtgtgcgaggcccgtgtgcgtttatttcgccctcttcttgatggttgacaccctcggcaaagtgtggggccttgggtcctccttcctttctcagacctcaacctataacaactttcggaagagcatggacagcataggaaagaagcaatatcaggtccagcatgggtcctgcagctacactttcctcctgccagagatggacaactgccgctcttcctccagcccctacgtgtccaatgctgtgcagagggacgcgccgctcgaatacgatgactcggtgcagaggctgcaagtgctggagaacatcatggaaaacaacactcagtggctaatgaagcttgagaattatatccaggacaacatgaagaaagaaatggtagagatacagcagaatgcagtacagaaccagacggctgtgatgatagaaatagggacaaacctgttgaaccaaacagctgagcaaacgcggaagttaactgatgtggaagcccaagtattaaatcagaccacgagacttgaacttcagctcttggaacactccctctcgacaaacaaattggaaaaacagattttggaccagaccagtgaaataaacaaattgcaagataagaacagtttcctagaaaagaaggtgctagctatggaagacaagcacatcatccaactacagtcaataaaagaagagaaagatcagctacaggtgttagtatccaagcaaaattccatcattgaagaactagaaaaaaaaatagtgactgccacggtgaataattcagttcttcaaaagcagcaacatgatctcatggagacagttaataacttactgactatgatgtccacatcaaactcagctaaggaccccactgttgctaaagaagaacaaatcagcttcagagactgtgctgaagtattcaaatcaggacacaccacaaatggcatctacacgttaacattccctaattctacagaagagatcaaggcctactgtgacatggaagctggaggaggcgggtggacaattattcagcgacgtgaggatggcagcgttgattttcagaggacttggaaagaatataaagtgggatttggtaacccttcaggagaatattggctgggaaatgagtttgtttcgcaactgactaatcagcaacgctatgtgcttaaaatacaccttaaagactgggaagggaatgaggcttactcattgtatgaacatttctatctctcaagtgaagaactcaattataggattcaccttaaaggacttacagggacagccggcaaaataagcagcatcagccaaccaggaaatgattttagcacaaaggatggagacaacgacaaatgtatttgcaaatgttcacaaatgctaacaggaggctggtggtttgatgcatgtggtccttccaacttgaacggaatgtactatccacagaggcagaacacaaataagttcaacggcattaaatggtactactggaaaggctcaggctattcgctcaaggccacaaccatgatgatccgaccagcagatttctaaacatcccagtccacctgaggaactgtctcgaactattttcaaagacttaagcccagtgcactgaaagtcacggctgcgcactgtgtcctcttccaccacaagagggcgtgtgctcggtgctgacgggacccacattgctccagattagagcctgtaaactttatcacttaaacttgcatcacttaacggaccaaagcaagaccctaaacatccataattgtgattagacagaacacctatgcaaagatgaacccgaggctgagaatcagactgacagtttacagacgctgctgtcacaaccaagaatgttatgtgcaagtttatcagtaaataactggaaaacagaacacttatgttatacaatacagatcatcttggaactgcattcttctgagcactgtttatacactgtgtaaatacccatatgtcct

SEQ ID NO: 125731 - DNA, 2838 bp, Homo sapiens
atgccgaacaggcgcgggaggcaggggcgccgcagggtggttcgcacacgtggactcatgcggccaccgccgcgctggctgcccacagctgtcacaccagaagcacacccctcaccccgagtgggaacaaatgtggaaaatctgggaaatggtgagcaggccagttttggcacatacccttgtttccgcttcaccccggaggggagtttcctagaaaagaaggtgctagctatggaagacaagcacatcatccaactacagtcaataaaagaagagaaagatcagctacaggtgttagtatccaagcaaaattccatcattgaagaactagaaaaaaaaatagtgactgccacggtgaataattcagttcttcagaagcagcaacatgatctcatggagacagttaataacttactgactatgatgtccacatcaaactcagctaaggaccccactgttgctaaagaagaacaaatcagcttcagagactgtgctgaagtattcaaatcaggacacaccacgaatggcatctacacgttaacattccctaattctacagaagagatcaaggcctactgtgacatggaagctggaggaggcgggtggacaattattcagcgacgtgaggatggcagcgttgattttcagaggacttggaaagaatataaagtgatgaccgatgtaagccgtatttttgcaattcagcttacaatggttcaacttaagatttttcgactttacgatgtgatatgtggcacgatgctccctcatgatgccaggcagcggcagcgagccacaggtcccagtcagtcctgtgatccccagggtgaacaacagacactgcgtgcaccgtgttgccaaatggctctgtctgactgtgggctaatgattcaccttaaaggacttacagggacagccggcaaaataagcagcatcagccaaccaggaaatgattttagcacaaaggatggagacaacgacaaatgtatttgcaaatgttcacaaatgctaacaggagatgaatactttgctggtggcttacactcatcttttgatgatctttgtggaaactcaggatgtggaaatcaggaaaggaagttggaaggatccattaatgacattaaaagtgatgtgtgtatttcttcacttgtattgaaagcaaataatattcattcatcaccatctttcactcacctcgataaatcaagtcctcaggaaatttctgaggtaatctttcaaagggaggaaataaacttggcaaaggaaatattgcagggtaaagtagttcacccctcacccaaaaggcagggctgcagggtatgtcttcagggaggacgtttggaggagaggtatccgtttgtcttcctacccttattcttccaacaaaagggccaccttttggatacctttcaggacccgggagttcctcagtaaagagaaaaagagtatcacatggctcccattcacctccgaaggaaaaatgcaagagaaagaggagcaccaggagatctatcatgccgaggctgcagctgtgcaggtcggaaggcaaggctgcagcacgtggccgggacctgccctggaggctcttatctgtggggagtcttcatatgatgactatttttcacctgataatcttaaggaaaggtattcagagaatcttcctcctgaatctcagctgccatcaagccctgctcagttgagctgcagaagtctttctaagacggagagaacaagcatatttgaaatgtctgatttttcctgcgttggcaaaaaaaaccagaacagttgacattaccaattttacagcaaaaaccatctccagtcctcggaaaactggaaatggtgaaggccgtgcaacttcgagttgcgtgacttctgcccctgaagaagccctaaggtgttgtagacaggctgggaaagaaaacgcatgcccccagagggaaaatggccttttccttacacccattgaggacccctgcctccttcccaaaaggacatgatgatgatttaactcctttggaaggaagccttgaagaaatgaaagaagcggttggtctgaaaagcacacagaacaaaggtaccacttccaaaatatcaaactcctctgaaggcgaagcccagagtgaacatgagccatgttttatagttgactgtaacatggagacgtctacagaagagaaggaaaacttacccggaggatacagtggaaataaggtgaccaacgaaggcttccctgagaaggtgacatccgatcacaggcctggggagggagagggagcctgtgactctgtcaaaatccatgtttcagctggaggtaacagcaggaacaaatgtcctgatggaggaaaatgcttgcaggaacaacggggaggccagtacagcaaggacttcctgagctgcaggaaggaggttggagagggcagccggaatgatgctctgaagaccttgttggacagtgcactcttcactcaaacctgcagcagatggaatgatgctctgaagaccttgttggacagtgcactcttcactcaaacctgcagcagctggaacgatgctctgaagaccgtgttggaccatgcactcttcactcaaacctgcagggctcccgcatctcttctggagcagaagcccacctgccagttcatcccgactgtgctgctgcctcctcttccccactggctcagccgtccatcaggccttgtgcatgcagctggccagctccctctccagggaacacttttcccctgcatctacttggccaacttcctgatctcttttaactcattcaccttctcaatgggacagtttagcgctgtggactcgagtccacactcctga

SEQ ID NO: 125732 - DNA, 1980 bp, Homo sapiens
gttcccctcagcctctgagctgaggccccacaccagagtagggggcggcgcggcacccgtgccccggcatggcgacaccggacgcggggctccctggggctgagggcgtggagccggcgccctgggcgcagctggaggcccccgcccgcctcctgctgcaggcgctgcaggcggggcctgagggggcgcggcgcggcctgggggtgctccgggcgctgggcagccgcggctgggagcccttcgactggtctgcccagtctgccttgtgctcccttcagccaaacacttaactgcttgctctccctctgctacccaggaaaccactgttgctgcgattgccccggatatgccagaggaacctgatgtccctgctgatggccgttcggccatcgctgccggaaagtgggctcctctctgtgctgcagattgcccagcgccagagacagctccaaagtctatgtagggggctgggcctggggggcaggaggttgaaatccccccaggctccagaccctgaagaagaggagaacagggactcccagcagcctgggaaacgcagaaaggactcagaggaagaggctgccagtcctgaggggaagagggtccccaaaagattacggtgttgggaagaggaagaagatcatgagaaggagagacccgaacataagtcactggaatccctggcagatggaggaagtgcatctcctattaaggaccagcctgtcatggcagttaagactggcggaaggggtggcttcagtgacttgtcactgagggctctgccagccctaacatgagatttgtctccccaggttgagacagcctagcagaggcagagtgcatgtcccggtgtcctctctccccccgcactctgtaagcagatggacttgctgtgtgcccagctgcagctccctcagctctcagacctcggtctcctgcggctctgcacctggctgccctgtaacaggctgggcattctgttaccgcctccctgctttctgctgtcttctgccatttccccccagacttccccttctgctgtcctctacccaggtcctgctcaaagcagcagatagatactcaggcttgggtgggaggccaggcatttttcactagggcctctgctttgcaccaggactggctgaatgaagagcccaagcctttcttgtgattactgctccatctcccaatgtgtgcaggtggagatgacccctgagaagttcagtgtcttaatggagaagctctgtaaaaaggggccgctctacttggtgtccggaatctacgggggagtccgccgtgggccgcccgcccgtctcgaagcctagacctcggaggcttccaggcagtccgagcgtgtggactccgcggccctgagcgccctgtcgcttctctcccgcagcagcaaatgccgaccctggggcacggcgcgggtggcgagggccggcgggtgcttaacccccctcctctctcgaaggttcctggagacgagacccttcaccggcccttgggacccagggctaggcgtaacctgttggtgctgtcccccaaaacgcaggcttaagtccactccccgccctaagttctctgtgtgtgtcctgggggaccagcagcactgtgacgaggctaaggccgtggatgccacatttgaggtgtgccttggtgaccaggttctaagcaatgccaatggcttcctctctctatcagccaagaagtatgatgcgtttttggcctcagagtctctgatcaagcagattccacgaatcctcggcccaggtttaaataaggcaggaaagttcccttccctgctcagggaggaaggacaggccatctgctattcgtccaccaacctgacttgatcctctcttccctcctcccaggtgttatgtctggctgtagctgttggtcacgtgaagatgacagacgatgagcttgtgtataacattcacctggctgtcaacttcttggtgtcattgctcaaga

SEQ ID NO: 125733 - DNA, 2891 bp, Homo sapiens
cgcggcgtgagaagccatgagcagcaaagtctctcgcgacaccctgtacgaggcggtgcgggaagtcctgcacgggacccagcgcaagcgccgcaagttccttggagacggtggagttgcagatcagcttgaagaactatgatccccaggaaggacaagcgctttctcgggcacccgtcaggcttaagtcccactcccccgccctaagtttctctgtgtgtgtcctgggggacccgccagcacttgtgacggaggctaaggcccgtggatatccccccacatggaccatcggaggccgctgaaaaaacctcaaccaagaataaaaaactggtccaaaaaagctggcccaagaaagtatgaatgccgtttttggccctcagagtcctctgatcaagcgagattcccacgaatccctcgggccccaggtttaaataaggcagggaaagtttcctttccctgctcacacacaacggaaaacatggtgggccaaaggtggatgaggtgaaggtcccacaatccaggttccaaatgaagaaggtgttatgtctggctgtagctgttggtcacgtgaagatgacagacggatgagcttgtgtttaacattcacctggcctgtcaacttcttgggtgtcattgctcaaagaaaaactggcagaaatgttccggggccttatattatcaagaggcacccatggggcaaagccccaagcgcctatattaaggcacatttgaataaattctattaccagttaaaaaaaaaaaaaaaaaagttggcggccgccaacttttttttttttttttttttttttttttttttttttttttttttttttttttttgctgaaacatacactcatttatttccccagaaggagggggaatggggtccttggggagtctctgtcccagcccggacaggcagatctcacttccagaagagcacattccagaaaagcagccagcaggggtagaggcccagggacagcagtgggaagagcagggcgccgtaggtgtggtgctccagcacaccctgggctagcgctgccaggaagagcttgccagccctcggccagtgacagtggcgcctcctgcagctcccgccacaggaacaggctgccaaggagcgtggctgccgggctggtcagcaccagcagggcagcatatagggtccggtgcccatgaggcttggcaagcgcagcagtgggcaccatggtggtggccagcaggaagcccagttgagaagttggtgagggcgatgcagcccacctgcagtgctaggtagatcagggctaccaggctcagtgccatccagcccctgtctgggggcctgtgtgcttacccaccccgtgggtattgtggggcagggccaggccagctgcataaatcgccagcagtgtcagcaccacagcctcagcctctgccactgggaagtgctgggtggcaacgtgttggcccagcactggcaggacatagagggccagtcccatggcctgtgagatcagcagaggtgccacgagcgaggccagccccacaccctgtgatggggggaaggggtacactggggccaggggcacccccgggctcctcaaggcccattccagcctcatgcagctgcatccacagttccagagccttgagaccaaggaccaggagcaagaagccgacagcgggcatgtagaggccgatggagacgaagcgggagaggccggggagcaagtagaggaagaaggactggtgcaggcgctccaggaggtggttgagcttgcggaacatgccctccaaagccttgcccactgccaccaggtcatacttgtactggcggaagctattgatgccacgcagggttagggcctccacacggtagcgcaggaagaggccatgggagccgtgggggcggccggaggcctgccgcagaaccatgagcagcagtgtctgcaggccctgcagcggtccatccaatgatgtccagtcctcgggctgcagcttgccctgaagcgtgcacaacaggccccctttctggcagaaggtctggaagagattgagcaggtcaaggttgggcagctgcccgttaagcccctccacggccacatcgaggctggtgaccacatcactgctcagctccagggccacggctgcctgaatggccccagctcggccctgcaggggagacgactgcatgccagtgacattgacatcgtggtaggcttcaagccaagcctcagtgcccagaaggtcatgttctgttaccaggaagacgatatctttggcccaataaatctgcccccggaagtgggcagccagtgccagcagcagccccacagcctggctgttggtagagtcagagccacagggcacggtgagcacaagcgactcggtgctggcagcacgcggggcccgcaggatgccgtacacgttggtgcccgacaccatatagcgctcgtgggtctcatctgggaagggcagtttccgggagaaactctgcgtgtagacctccagccctactgaccgcatcgtccgttcaagccaggccactggcagagcccccgacttcttgcggtgggcggcgaagtcccgggcaaaagcccgggcacggtctccgcccgcaaactgctcctccaccatggtggagcccatggcgttctccgacatgtaagtgcgctgggtcagcggcgggaaaaccagcgccaagaaccaggcgatgcccgccacgtagctcagcacgcacaacggcgcgttgaggcgcagcactaggcgggcgagcgcgcgccggcgaaccgggtccgacaggaggcccatggcggggcagggcggcgcggctacggaccctctcccgcctccaactaccgccgcggtgcccacaggctgctcctgtcagacccggggacccgcgc

SEQ ID NO: 125734 - DNA, 510 bp, Homo sapiens
  misc_feature (1)...(510): n = a,t,c or g
atggnccgggcgcnggtggctcacgccntgtnaatcccagcactttgggaggccaaggcgggtggatcacgagattctcctctgcgctatgtgcacattgccatcccatgcaacaacaagggagctcactcagtgggtttgatgtggtggatgctggcttgggaagttctgtgcatgcgtggcaccatttcccgtgaacacccgtgggaggtcatgcctgatttctgcttctacagagatcctgaagagattgaaaaagaagagcagcctgctgctgaaaaggctgtgaccaaggaggaatttcagggtgaaaggactgctccagctcctgagttcactgctactcagcctgaggttgcagactggtctgaaggtgtgcaggtgccctctgtgcctattcagcagttccctactgaagactgcagcgctcagcctgccacggaagactggtctgcagctcccactgcccaggccactgaatgggtaggagcaaccactgaatggtcttaa

SEQ ID NO: 125735 - DNA, 872 bp, Homo sapiens
cgggcggcgctccccagatacggcgctgctcggcgtcgggagtccccgtcaccactggggggacgggagcgcagggtcccgccccgaaggacagggtcatgccggcccgtggaggcgagggcactaacccgcgtggctgcacacgcggcgtaagcacctggagttccatcacaacaagatcttggcagaatgacgtccgggggtacctgggtactccacaggctaaacacttccgatggcccgacgggcataagcgacacgcgtgaacaaatgatcggcgaacgctcccgaacgatgaccgtggcgcgtcgagtttgaccgacaacaggaagaccagggtcctccaggcagccaggggccagctccaggacagggcaggagaatgcggtccaggtctggcacgtaactgagggtgggtatgctccagagaagtaaggcaaatggcccagatgacgaccacctgcttggagcctcctgcacatgcggaccctcaacaggctccccgagtcctcgcctgccctccctgcctcaaaggccccagaagggcctacttcatcaggtgccacgaggatgaagccaggtaatattgcaaagggtctgtggaaacgcttgagcaagggcactgtgatgaaattgtggctactgacagcagtgcccaggctctcggggctcctggtttgtcctctggtgcaccagctcctgctggccttcaagtttctgaaaagattccccattttctgcctttggttcagggctgcaaatcgacatgcccgctttagcattttattcaaactctctcgaccctgaaagtactcctggttaaaagcgcccaccatcgtgtctacctttcgagggcccttattctcgttcat

SEQ ID NO: 125736 - DNA, 1554 bp, Homo sapiens
atgcacactcacccccacgcttatgtgcacactcaggtgcacactcccactcatgtgcacactcccactcatgtgcaccgctgcatgctcacgctcactcacatccgcaccccggctgtgctgtgcttgcacctggcggactcgccgcacagctgtgcccgcgagtgcgagtcccgcgtccgaggcctcggcgtgaccttacagcatctgtcgggtccgagcagtcagtccagagggtcgactctgaatgaaaacaaaacgccgtggtttgaaatggaaggaaacctggcccctgaagtgcagcctggtggtgctgtggattggaggccatcctgtgtgggcagcacggcagccagagtctgcaaggtcacgggtgacaccagaccgagctggacctggcccaagcgctgctcggagatccctggggccccatgcagcgtgacgcaccagcctccctcgacaaagctgcaaggccccacctccagcctcaggcatgtggccttcgagggcaggccactctatggcccagatgacgccccaggctgggagcagccccagacacccaggagacggggtgatgacagcggggccccaggatggagcctgcagtccacgacattcagagcagagcatggggcatgcaggaaagggggccagaggacctgctgggtctttccgggtgtatggtgccagcaggtgtccagcgcctccagccccttgtctgagagcaatggagacagtagagatggggtgttgggaaaaaggcttatcgagtgcctgtataagctggccataaaaatatggcacaggaactcaggagcaacaagcccccagtgcgggacgagccaccccaaagcccctcgagaagttttctctaaccacagccccgaaaagccccgccactacgaccactggcacccctgcttatttcctccagaccctcctcggccgtcccaccccatcaagccctcctttcgctcgcatctccaccctccctgcacactgcctaacccagaaaatggccaagcagctgtcagtagccacaatttcatcacagtgcccttgctcaagcgtttccacagaccctttgcaatattacctggcttcatcctcgtggcacctgatgaagtaggcccttctggggcctttgaggcagggagggcaggcgaggactcggggagcctgttgagggtcgcatgtgcaggaggctccaagcaggtgagtatgggaggcaggggccgagacaagcggcgcgtgcggctgacggcccggcccagcccagccctggcggtgactcagagctgggcagcctggcttgctggggcctgcgtgggtactcggaaaatggcagaggcgccttcggcagagaggacattcccagcacagtctcagatccacaccgcctgttccccacagcactccgggcaggcagctgccgcctttcccgacagggagttgcagctgacggccccgcggatccagccaactagaactccaacgggtgcactacacctgagaacaggttcccacagcttcctgttggggacaacgtga

SEQ ID NO: 125737 - DNA, 855 bp, Homo sapiens
atggccgggtactcctctgagacaaaacttccagaggaacgatcagacagcagcattcgcggttcacgaaaatccactgttctgcagacactgctgctgatacccaggcaaacagggattaagaaactcactcaaaaccggtcaactacatggaaactgaacaacctgctcctgaatgactactgggtacataatgaaatgaaggcagaaataaagatgttctttgaaaccaatgagaacaaagacacaacataccagaatctctgggacacattcaaagcagtgtgtagagggaaatttatagcactaaatgcccacaagagaaagcaggaaagatccaaaattgacaccctaacatcacaattaaaagaactagagaagcaagagcaaacacattcaaaagctagcagaaggcaagaaataactaaaatcagagcagaaccgaaggaaatacagacacaaaaaacccttcaaaaaattaatgaatccaggagcttgttttttaaaaggatcaacaaaattgatagaccgctagcaagactaataaagaagaaaagagagaagaatcaaatcgatgcaataaaaaatgataaaggggatatcaccgccaatcccacagaattacaaactaccatcagagaatactacaaacacctctatgcaaataaactagaaaatctagaagaaatggataaattcctggacacatacaccctcccaagagtaaaccaggaagaagttgaatctctgaatacaccaataacaggccctgaaattgtggcaataatcaatagcttactaaccaaaaagggtccaggaccagatggattcacagccaaattctaccagaggtag

SEQ ID NO: 125738 - DNA, 551 bp, Homo sapiens
tattgggctatgcggtttgacttgtaagccagtagatggcgcttataggtaagagccacttacttccaccatgcccccgccaactgcactgagtttgttcccaggcagctggtgagcagggctgagaacttgccccaggctacaagcctccccactgagaaagcaagtagggctttcagggtgctgctgatacccaggcaaacaaggtctggagtggacctccagcaaactccaacagacctgcagctgagggtcctgattgttagaaggaaaactaacaaacagaaaggacatccacaccaaaatcccatctgtacgtcacccctcagacgatcaaacttctttgagctaaaggaggaagttcgaacccatggcaaagacgctaaaaaccttgaaaaaagattagacaaatggctaactagaatatccagtgtagaaaagtccttaaatgacctgatggagctgagaaccatggcatgagaactatgtgatgaatgcacaagcttcagtagctgattcaatcaactggaagaaagggtatcagtgattga

SEQ ID NO: 125739 - DNA, 1569 bp, Homo sapiens; identical to SEQ ID NO: 115452

SEQ ID NO: 125740 - DNA, 4965 bp, Homo sapiens; identical to SEQ ID NO: 118835

SEQ ID NO: 125741 - DNA, 3924 bp, Homo sapiens; identical to SEQ ID NO: 125297

SEQ ID NO: 125742 - DNA, 1047 bp, Homo sapiens; identical to SEQ ID NO: 121599

SEQ ID NO: 125743 - DNA, 287 bp, Homo sapiens
atggcagggtactcctctgagacaaaacttccagaggaatgatcaggcagcagcatttgcggttcactaatatctgctgttctgaagccactgctgctgatacccaggcaaatagggtctggagtggacctccagcaaactccaacagacctgcagctgagggtccagcaatggaacaaagctggatggagaatgactttgacaagttgagacaagaaggcttcagaagatcaaagtactccaagctaaaggcggaagttcgaatgaatggcaaagaagttaaaaac

SEQ ID NO: 125744 - DNA, 723 bp, Homo sapiens
atgatcaggcagcagcatttgcggttcaccaatatccgctgttctgcagccactgctgctgatacccaggcaaacagggtctggagtggaccaccagcaaactccacagacctgcagctgagggtcctgactgttagaaggaaaactaacaaacagaaaggacatccacaccaaaaacccatctgtacgtcaccatcatcaaagaccaaagaaagagtatcagcaatggaagatgaaattaatgaaatgaagcgagaagagaagttcagagaaaaaagagtaaaaagaaatgaacaaagcctccaagaaatatgggactatctgaaaagaccaaatctacgtctgattggtgtacctgaaagtgacggggagaatggaaccaagttggaaaacactctgcaggatattatccaggagaacttccccaatctagcaaggcaggccaacattcaaattcaggaaatacagagaatgccacaaagatactccttgagaagagcaactccaagacacataattgtcagattcaccaaagttgaaatgaaggaaaaaatgttaagggcagccagagagaaaggtcgggttacccacaaagggaagcccatcagactaacagcgatctctcggcagaaactctacaagccagaagagagtgggggccaatattcaacattcttaaagaaaagaattttcaacccagaatttcatatccagccaaactaa

SEQ ID NO: 125745 - DNA, 1260 bp, Homo sapiens; identical to SEQ ID NO: 116570

SEQ ID NO: 125746 - DNA, 762 bp, Homo sapiens; identical to SEQ ID NO: 115053

SEQ ID NO: 125747 - DNA, 511 bp, Homo sapiens
ggtcagaccgacacctcacacggccaggtactcctctgagacaaaacttccagaggaacgatcaggcagcaacatttgctgttcacccatatctgctgttctgcagcctctgctgctgatacccaggcaaacagtgtctggagtggacctccagcaaactccaacagacctgcagctgagggcacaagaacatgacgaatgcacaagcctcagtagccgattcgatcaactggaagaaagggtatcagtgatggaagatgaaatgaatgaaaagaagcgagaagagaagtttagagaaaaaagaataaaaagaaatgaacaaagcctccaagaaatatgggactatgtgaaaagaccaaatctacgtgtgattggtgtacctgaaagtgatggggagaatggaaccaagttggaaaacactctgcaggatataatccaggagaacttccccaatctagcaaggcaggccaacattctaattcaggaaatacagagaacaacacaaaaataa

SEQ ID NO: 125748 - DNA, 729 bp, Homo sapiens; identical to SEQ ID NO: 116572

SEQ ID NO: 125749 - DNA, 1299 bp, Homo sapiens; identical to SEQ ID NO: 116573

SEQ ID NO: 125750 - DNA, 1040 bp, Homo sapiens
ggtactcctctgagacaaaacttccagaggaacgatcaggcagcagcatttgcggttcaccaatatctgttgttctgcagccaccgctgctgatacccaggaaaacagggtctggagtggacctccagcaatctccaacagacctgcagctgacggtcctgactgttagaaggaaaactaacaaacagaaagggcatccacaccaaaaacccatctgtatgtcaccttcatcaaagaccaaagacgaatggctaactagaataaccaatgcacaaaagtacttaaaggacctgatggagctgaaaaccatggcacgagagctgcatgacgaaggcacaagcctcagtagccgatgcgatcaattggaagaaagtgtatcagcgatggaagatcaaatgaatgaaatgaagcaagaagaaaagtttagagaaaaaagaataaaaagaaatgaacaaagcctccaacaaatatgggactatgtgaaaagaccaaatctacgtctgattggtatacctgaaagtgacggggagaatggaaccaagttggaaaacactctgcaggatattatccaggagaacttccccaatctagcaaggcaggccaacattcaaattcaggaaatacagagaacgccacaaagatgctcctcgagaacagcaactccaagatacacaattgtcagattcaccaaagttgaaatgaaggaaaaaatgttaagggcagccagagagaaaggtcgggttactcacaaagggaagcccatcagactaacagcagatctttcagcagaaactgtacaagccagaagagagtgggggccaatattcaacattcttaaagaaaagaattttcaacccagaatttcatatccagccaaactgagcttcataagtgaaggagaaataaaatcctttacagacaagcaaatgctgagagattttgtcaccaccagacctgccctaccagagctcctgaaggaagcactaaacatggaaaggaaaaaccagtacaagccactgcaaaaacatgccaaattgtaa

SEQ ID NO: 125751 - DNA, 1251 bp, Homo sapiens; identical to SEQ ID NO: 115058

SEQ ID NO: 125752 - DNA, 810 bp, Homo sapiens; identical to SEQ ID NO: 116580

SEQ ID NO: 125753 - DNA, 720 bp, Homo sapiens
atgaacagtttgctaactgggcagatcccagaatcacagcagattcacagagactccagtgcagccacgtggtggaagaagatttatagacaaaaaatgggaaatgacatagagaaatcggaagtgaggggtggactgacacctcacacagctggatactcctctgagacaaaacttccagagaaacgatcaggcagcagcatttgcggttcaccaatatccgctgttctgcagccaccgctgctgataccgaggcaaacagggtctggagtggacctccagcaaactccaacagacctgaagctgagggtcctgactgttagaaggaaaagtaacaaacagaaaggacatccacaccaaaaacccatctgtacatcaccattgtcaaagaccaaagacagatcaaccagacagaaagttaacaaggatatccaggacttgaactcagctctgcaccaagcggacctaatagacatctacagaactctccaccccaaatcaacagaatatacatttttttcagcaccacaccacacctgttccaaaattgaccacatagttggaagtaaagcactgctcagcaaatgtaaaagaacagaaattatcagaaactatctctcagaccacagtgcaatcaaactagaactcaggattaagaaactcactcaaaaccactcaactacatggaaactgaacaacctgctcctgaatgactactgg

SEQ ID NO: 125754 - DNA, 3252 bp, Homo sapiens; identical to SEQ ID NO: 120702

SEQ ID NO: 125755 - DNA, 666 bp, Homo sapiens
tcaatccgaatatttagcatatttagcaacatggatctcgcagataccgtcatgttcctgtagggtgccatcagattttctgatctggtcaacgaactgatacagcatacgtttttgatcccgggagagactatatgccgcctcagtgaggtcgtttgactggacgattcgcgggctatttttacgtttcttgtgattgataaccgctgtttccgccatgacagatccatgtgaagtgtgacaagtttttagattgtcacacactgggtactcctctgagacaaaacttccagaggaatgatcaggcagcagcatttgcagttcaccaatatccactgttctgcagccaccactgctgatacccaggcaaacagggtctggagtggacctccggcaaactccaacagacctgcagctgagggtcctgacgtctttcattgccatacggaactccggatgagcattcatcaggcgggcaagaatgtgaataaaggccggataaaacttgtgcttatttttctttacggtctttaaaaaggccgtaatatccagctgaacggtctggttataggtacattgagcaactgactgaaatgcctcaaaatgttctttacgatgccattgggatatatcaacggtggtatatccagtgatttttttctccat

SEQ ID NO: 125756 - DNA, 450 bp, Homo sapiens
atgaatggaagcagcctgaggccctcaacagcagcagatgctggagctgtgcttcttgcacagcctgcagaactctctggcatctgggacccagccgtggcatgctccagctttgctattgctgctagaggcctgtctcagtctcctgcagtggatacaggaccctcagctgcaggtctgttggagtttgctagaggtccactccagaccctgtttgcctgggtatcagcagcagtggctgcagaacagcggattttcgtgaaccgcgaatgctgctgtctgatcgttcctctggaagttttgtctcagaggagtacctggacatttcatataaacttcagcttctccaaagcctggcctcatcctaataccagtagtgacattaacgccgggccaccaggagataaaacagccaagctgtatctcaagaaactggacaacgtagaatga

SEQ ID NO: 125757 - DNA, 1254 bp, Homo sapiens
atggcaggattgagactgaccttgccggttatgagggagctggactctgaaaaagcgtttcacaaaatccagcatccctttgtgattaaaaccctctgcaaaatcagcatacaagggacatacctaactgtaataaaagccatctgtgacaaacccacagccaacattatactgaatggggaaaagttgaaagctttccccctgagaactggaacaagacaaggatgcccactttcaccacttctattcaacgtagtactggaagtcctagccagagcaatcaaacaagagaaagaacctaactgggaggcacccccaagtacgggcggactgacacctcacacggccaggtactcctctgagacaaaactttcagaggaacaatcaggcagcagcattggcggttcaccaatatccgttgttctgcagccactgctgctgatacccaggcaaacagggtctggagtggacctccagcaaaatccaacagacctgcagctgagggtcgtgactgttagaaggaaaactaacaaacagaaaggacatccacaccaaacacccatctgtacatcaccatcatcaaagaccaaagcaccacaccacacttatttgaaaattggccacatagttggaagtaaagcactcctcagcaaatgtaaaagaacagaaattagaacaaactgtctctcagaccacagtgcaatcaaactagaactcaggattaagaaactcactcaaaacagctcaactacatggaaactgaacaacctgctcctgaatgactactgggtacataacgaaatgaagtcagaaataaagatggtctttgaaaccaataagaaaaaagactcaacataccagaatctctgggacacgttcaaagcagtatttattcgcgataagctcatggagcggcgtaaccgtcgcacaggaaggacagagaaagcgcggatctgggaagtgacggacagaacggtcaggacctggattggggaggcggttgccgccgctgctgctgacggtgtgacgttctctgttccggtcacaccacatacgttccgccattcctatgcgatgcacatgctgtatgccggtataccgctgaaagttctgcaaagcctgatgggacataagtccatcagttcaacggaagtctacacgaaggtttttgcgctggatgtggctgcccggcaccgggtgcagtttgcgatgccggagtctgatgcggttgcgatgctgaaacaattatcctga

SEQ ID NO: 125758 - DNA, 1035 bp, Homo sapiens
atgtggtgccaatcttctgagaccatctttcaggcccatggagagaaactagcagcaacttccaagccaccagaagcctctaaaacaatacattttcactttcactccattctgtctataaattttaaattcatatccaattatggtaaaaatattttatgccccagactgacacctcacacggccgggtactcctctgagacaaaacttccagaggaacgatcaggcagcagcatttgttgttcaccaatatctgttgttctgcagcctctgctgctgatacccaggcaaacaggatctggagtggacctccagcaaactccaacagacctgcagctgagggtcctgactgttagaaggaaaactaacaaacagaaaggacatccacaccaaaaccccatctatatgtcaccatcatcaaagaccaaagtattggaagttctggccagggcaatcaggcaggagaaggaaataaagggtattcaattaggaaaagaggaagtcaaattgtccctgtttgcagatgacatgattgtatatctagaaaaccccatcatcccagcccaaaatctccttaagctgataagcaacttcagcaaagtctcaggatacaaaatcaatgtgcaaaaatcacaagcattcttatacaccaataacagacaaacagacagccaaatcatgagtgaactcccattcacaattgcttcaaagagaagaaaatacctaggaatccaacttacaagggatgtgaaggacctcttcaaggagaactacaaaccactgctcaatgaaataaaagaggatacaaacaaatggaagaacattccatgctcatgggtaggaagaatcagtatcatgaaaatggccatactgcccaaggtaatttatagattcaatgccatccccatcaagctaccaatgactttcttcacagaattggaaaaaactaaagttcatatggaaccaaaaaagagcctgcattgccaagtcaatcctaagccaatagaacaaagctggaggcatcaggctacctga

SEQ ID NO: 125759 - DNA, 1494 bp, Homo sapiens
ttatgcagtttttgcccaaatatcttcaaaaatcagcttaaattttctaaatgcaacttcactattctgcaaatcagcaggactcacttcaaacatgtgacccttgaggccatcagatgcagttttggttccttgggtcctggtgactagggtctttccaatatttcttatattgaacacagcaggggctttcacatcatgccaatctttcttagaaaatggatcaactggggtggagccaagatggccaaataggaaaagctccagtctacagctcccagtgtgagcgacacagaagacgggtgatttctgcatttccaactgaggtaccaggttcatctcagtggggagtgccagacagtgggtgtaggacagtgggtgcagcacaccgtgcatgagccgaagcagggcgaggcattgccacacccgggaagcgcaagggtcagggaattccctttccccccagtaggggcggactgacacctcacacggccgggtactcctctgagacaaaacttcccaaggaacaatcaggcagcagcatttgcgggttcaccaatacccgctgttctgcagcatctgctgctgacacccaggcaaacagggtctggagtggtcttccagcaaactccaacagacctgcagctgagggtcctgactgttggaaggaaaactaacaaacagaaaggacatccacaccaaaaccccaactgtacgtcaccatcatcaaagaccaaagacaaaacttccagaggaatgatcaggcagcagcatttgcaggtcaccaatatccgctgttctacagccactgctgctgatacccaggcaaacagggtctggagtggacctctagcaaactccaacagacctgcagctgagggtcctgaggaaattcaaatcaatggcaaagaagttaaaaagtttgaaaaaaaattagacgaatggataactagaataaccaatgcagagaagtccttaaaggagctgatggagctgaaagccaaggctcgagaactatgtgaagaatgcagaagcctcaggagccgatgtgatcaactggaagaaagggtatcagtgatggaagatgaaatgaatgaaatgaagcgagaagggaagtttagagaaaaaagaataaaaagaaatgaacaaagcctccaagaaatatgggactatgtaaaaagaccaaatctacgtctgattggtgtacctgaaagtgacagagagaatggaaccaagttggaaaacactctgcaggatattatccaggagaacttccccaatctagcaaggcaggccaacattcagattcaggaaatacagagaacgccacaaagatactcctcgagaagagcaactccaagacacataattgttagattcaccaaagttgaaatgaaggaaaaaatgttaagggcagccagaaagaaaggtcaggtaacccacaaagggaagcccatcagactaacagcggatctctcagtagaaactctataa

SEQ ID NO: 125760 - DNA, 1325 bp, Homo sapiens
attaaagaatttaccctttagctttacaaagctacagcaattgacagctatgtggctctcagataatcagaagtctgggataatattaagaataatcggtgttactgaggaagaagacaattctaaaagcttggaaaacatctttggtggaataatcgaggaaaacttccctggccttgttagagacctagacatacaaatacaagaagcacaaagaatacctgggaaattcatcgcaaaaagatcttcacctaaacacattgtcatcaggttatccaaagttaagacaaaggaaaaaagtcttaagagctgtgaaacagaagcaccagtcacaaccctcagctgcaggtctgttggagttgactggaggtccactccagaccctgtttgcctgggtatcagcagcactggctgcagaacagcggatattggtgaaccgcaaatgctgctgcctgatcattcctctggaagttttgtctcagaggagtaccctgccatggcttcagtgggcgccatgcgattcagcgctggactccgctgggggccgggccttggagaaggcgaactgtgcagggaagcagcagctctggggtccttaccgcccgctccgcccagctgcaccgggtctcctggtgctcctcaggctcctgccgagtctgcgtctctggagggcagcgaaccatcctgcccagaaccttatcctgacagcccagtttgacgcagctgggaagggcgtgtccagggcgctgtccacactggtctcccggaaggcccgctgcacgggcgggtgcttgaagattcctccagggccacctgcaggccccggcgctggcccggatgagaaaatcacagagactgatagtgaaccagaagaaggtgaaattacagactctcagaccgagggtagttatgatgaaggcattaccagtaaaggcaatgcaactgcaaaagatactgaggaggcagatgaggaaaaagtgtggccctcatatatgagagtaattgtcattagatcacctgtgttacagacaggatcattcttcatcattactgctgtaaaatctgctacaattggaagagaaaatgacatggagcatactcttcgaatccctgaaagactcaccttctccaaaacaagaacaacaacaacaagaacaacaactgggacaaagcacaggagaggtttgctgaaaactttcaacaacaacaacaacaacaacaactgggacaaagcacaggagaggtttgctgaaaactttccagaaactaaacttcaaaaagatgacctaggaaccattccttgggtaaaagggactgaggagtga

SEQ ID NO: 125761 - DNA, 2606 bp, Homo sapiens
ttaggtcaatccgaatatttcagcatatttagcaacatggatctcgcagataccgtcatgttcctgtagggtgccatcagattttctgatctggtcaacgaacagatacagcatacgtttttgatcccgggagagactatatgccgcctcagtgaggtcgtttgactggacgattcgcgggctatttttacgtttcttgtgattgataaccgctgtttccgccatgacagatccatgcgaagtgtgacaagtttttagattgtcacagtggataaccccagggaaagtctttaggcaccgcgcgtaagcccatatataagtgctgtgtcctgccgcttcctcgctaatcgagggttcgccctgtcgttcacctgcggcgagcaccaatggtctgccaaggacacaccacccccccggtctgcggttctctggctggtcctggcgactgcgtgcattattccgttccggccgggtactcctctgagacaaaacttccagaggaacgatcaggcagcaacatttgctgttcaccaatatctgctgttctgcagcctcagctgctgatacccaggcgaacagggtctggagtggacctccagcaaactccaacagacctgcagctgagggtcctgactgttagaaggaaaactaacaaacagaaaggacatccacaccaaaaacccatctgtatgtcaccatcatcaaagaccaaaggatcaaattcacacataacaatattaaccttaaatgtaaatgggctaaatgctccaattaaaagacacagactggcaaattggataaagagtcaagacccatcagtgtgctgtattcaggagacccatctcacgtgcagagacacacacaggatcaaaataaagggatggagggagatctaccaagcaaatggaaaacaaaaaaaggcaggggttgcaatcctagtctctgataaaacggactttaaaccaacaaagatcaaaagagacaaagaaggccattacatgatggtaaagggatcaattcaacaagaagagctaactaccctaaatatatatgcacccaatacaggagcacccagattcataaagcaagtccttagagacctacaaagagacttagactcccacacattaataatgggagactttaacaccccactgtcaacattagacagatcaacgagacagaaagttaacaaggatatccaggatttgaactcagctctgcaccaagtggacctaatagacatctacagaactctccaccccaaatcaacagaatatacattcttctcagcactacaccacatttattccaaaattgaccacatagttggaagtaaagcactcctcagcaaatataaaacaacagaaattataacaaactgtctctcagaccacagtgcaatcaaactcgaactcaggattaagaaactcactcaaaaccgctcaactacatggaaactgaacaacctgctcctgaatgactactgggtacataacaaaatgaaggcagaaataaatacattatttgaaaccaacgagaacaaagacacaacataccagaatctctgggacacattcaaagcagtgtgtagagggaaattcatagcactaaatgcccacaagagaaagcaggaaagatctaaaattgacaccctaacatcacaattaaaagaactagagaagcaagaacaaacacattcaaaagctagcagaaggcaagaaataactaagatcagagcaaaactgaaggaaatagagacacaaaaaatccttcaaaaaatcaatgaatccaggagctggttttttgaaaagatcaacaaaattgatagaccactagcaagaccaataaagaagaaaagagagaagaatcaaatagatgcaataaaaaatgataaaggggatatcaccactgatcccacagaaatacaaactaccatcagagaatactataaacacctctatgcaaataaactagaaaatctagaagaaatggataaattcctcaacacatacaccctcccaagactaaaccaggaagaagttgaatctctgaataaaccaataacaggctctgaaattgaggcaataattaatagcttaccaatcaaaaaaagtccaggaccagatggattcatagccaaattccaccagaggtacaaggaggagctggtaccattccttctgaaactattccaatcaatagaaaaagagggaatcctccctaactcattttatgaggccagcatcatcctgacaccaaagcctggcagagacacaacaaaaaaagagagttttagaccaatatccctgatgatcatcaatgcaaaaatcctcaataaaatactggcaaaccgaatccagcagcacatcaagaagcttatccaccatgatcaagtgggcttcatccctgggatgcaagactggttcaaaatatgcaaatcaataaacgtaatccagcatataaacagaaccaaagacaaaaaccacatgattatctcaatagatgcagaaaaggcctttgacaaaattcaacaactcttcatgctaaaaactctcagtaaattaggtattgatgggacgtatctcaataagagctatctatga

SEQ ID NO: 125762 - DNA, 1717 bp, Homo sapiens
atgatcataattgtgccactgtactccagcctgggtgacagagtgaaatcttgtgaaaagaagagagagagagagagagagagaagaaagaaagaaagaaagaaagaaagaaagaaagaaagaaagaaagaaagaaagaaggcaagcagtaaagaaagggaggaaggaagaaagaaagaaaggagaaagaaattaagaaagaaagaagaaaaggaaagaaagaaaagaaagaagaagagaagagaaggaaggaaagaaagaaagaaagagaaagaaagaaaagaaggaaagaaggaagaaagaaagaatataccaggaaagcgaagagaatccacagaccctttgaaggaaatggatcaccgctgcctgctccctgagatgctgaaaggaacctggtggacaacacctgctagagcttccggcccagcagtcccacttctgtgtgaattcaggcagtggacagtggacacaacctctgttgtcccagaaagcacccacatgccagggcagatgacccaacccatccctgcccctgatagccacaacatggatgaagctggaggccattatcctaagcagactaacacaagaccagaaaaccaaatactgcatgttttcactgataagtgggagctaaacactgagtacaaggacccaaagaagagaacaacagacaccagggcctacttgagggtggaggccacgctggcagctgattggatggtgcccacccagattgagggtaggtcttcctttgttctagccacgctggcagctgattggatggtgcccacccagattgagggtagatcttcctttgttctagccacgctggcagctgattggatggtgcccacccagactgagggtagatcttcctttgttctagccacgctggcagccgattggatggtgcccacccagattgagggtaggggcagaatgacacctcacatggccgggtactcctctgagacaaaacttccagaggaacgatcaggcagcagcatttgcggttcaccaatatccgctgttctgcagccaccactgctgatacccaggcaaacagggtctggagtggacctccagcaaactccaacagacctgcagcttagggtcctgactgttagaaggaaaactaacaaacagaaaggacatccacaccaaaaacccatctgtacgtcaccatcatcaaagaccaaaggtagataaaaccacaaagatggggagaaaacagagcagaaaaaccggaaactctaaaaatcagagtgcctctcctcctccaaaggaacgcagctcctcaccagcaacggaacaaaactggacagagaatgactttgatgagttgagagaggaaggcttcagaagatcaaactactccgagctaaaggaggaagttcgaaccaatgccaaagaagttaaaaactttgaaaaaaaattagacgaatggataactagaataaccaatgcagagaagtccttaaaggacctgatggagctgaaaaccacagcacgagaactacgtgacgaatgcacaagccccagtagccaatgcaaccaattagaagaaaggatatcagcgatggaagacaaaatgaatgaaatgaagcgagaagagaagtttagagaaaaaagaataaaaagaaaagaaacaaagcctccaagaaatatgggactatgtgaaaagaccaaatctatgtctgattggtgtacctga

SEQ ID NO: 125763 - DNA, 3549 bp, Homo sapiens
atgtggccaaaaggaaactatgtggtcacacgcagtgttactttgggaagccattttattccactggagaccttgaaaaacaatagaagagaggcaatcctaagagggaaatcaataggaagccttgaaggagaaaaactggaggacggacttgtttttccagaggaactggaagaggaaactggtatcattgtgatcaggaccctcagctgcaggtctgtcggagtttgctggaggtccactccagaccctgtttgcctgggtatcagcagcagaggctgcagaacagcggatattggtgaacagcaaatgttgctgcctgatcgttcctctggaagttttgtctcagaggagtacccggccgttggttttgccaagagcaaattgcccaagacgtttaggtcagtggtcaccaaagctgatccacaggttggatgcagcccatggtgtgatccaatttttccagtacaccgaggcaagaactctgggataaagagagccctctgtccttgcgacaagagaccacagtccagtcatcatggcacacatcgtcttcaacgtattgctcaaaggcctttctcagagagtgagatctgcaggtcactgtgcgactctaacagcagcccagcagagagctgtgctggagaaaccgagcacaatggctggccagaggcagttgggcagtcagtcctgcgcatcagaggctgctgctccccaggaaacagccagcagcccaggggagaatacttggtgcacagcaaagtaaatcattgcttgaccctcagcccacatgggaaaaccacccctaacattacaacagcagtaacaacaacaaacatctacgtgagctttctacagcctctgatgacttatacttctagcaggactaataagaagaaaagagagaagaatcaaatagacacaataaaaaatgacaaaggggatatcaccaccgatcccacagaaacacaaactaccatcagagaatactataaacacctctacgcaaataaaatagaaaatccagaagaaatggataaattcctcaacacatacactctcccaagactaaaccaggaagaagttgaatctctgaacagaccaataacaggctctgaaattgaggcaataattaatagcttaccaaccaaaaagagtccaggaccagatggattcacagccgaattctaccagaggtacaaggaggagctggtaccattccttctgaaactattccaatcaatagaaaaagagggaatcctccttaactcattttgtgaggccagcatcatcctaataccaaagcctggcagacacacaacaaaaaaagagaattttagaccaatatccttgatgaacattgatgtaaaaatcctcaataaaatactggcaaaccgaatccagcaacacatcaaaaagcttatccaccatgatcaagtgggcttcatccctgggatgcaaggctggttcaacatacgcaaatcaataaacgtaatccagcatataaacagaaccaaagacaaaaaccacatgattatctcaatagatgcagaaaaggcctttgacaaaattcaacaacccttcatgctaaaaactctcaataaattagctattgatgggacatatatcaaaataataagagctatctatgacaaacccacagccaatatcatgctgaatgaacaaaaactggaagcattccctttgaaaactggcacaagacagggatgccctctctcaccactcctattcaacatagtgttggaagttctggccagggcaatcaggcaggataaagaaataaaaggtattcaattaggaaaagaggaagtcaaattgtccctgtttgcagatgacatgattgtatatttagaaaaccccattgtctcagcccaaaatctccttaagctgataagcaacttcagcaaagtctcaggatacaaaatcaatgtgcaaaaatcacaagcattcttatataccaataacagacaaacagagagccaaaccatgagtgaactcccattcacaattgcttcaaagagaataaaatacctaggaatccaacttacaagggatgtgaaggaccgcttcaaggagaactacaaatcactgctcagtgaaataaaagaggatacaaacaaatggaagaacattccatgctcatgggtaggaagaatcaatatcgtgaaaatggccatactgcccaaggtaatttatagattcaatgccattcccatcaagctaccaatgactttcttcacagaattggaaaaaactactttaaagttcatacggaaccaaaaaagagcccgcatcgccaagtcaatcctaagccaaaagaacaaagctggaggcatcacactacttgacttcaaactatactacaaggctacagtaaccaaaacagcatggtactggtaccaaaacagacatgtagaccaatggaacagaacagagccctcagaaataatgctgcatatctacaactatctgatctttgagaaacctgacataaacaagcaatggggaaaggattccctatttaataaatggtgctgggaaaactggctagccatatgtagaaagttgaaactggatcccttccttacatcttatacaaaaattaattcaagatggattaaagacttaaatgttagacctaaaaccataaaaaccctagaagaaaacctaggcaataccattcaggacataggcatgggcaaggacttcatgtctaaaacaccaaaagcaatggcaacaaaagccaaacttgacaaatgggatctaattaaactaaagagcttctgcacagcaaaagaaactaccatcagagtgaagaggtattcttctgagacaaaacttccagaggaacgatcaggcagcagcatttgcggttcaccaatatctgctgttctggagccactgctgctgatacccaggcaaacagggtctggagtggacctccagcaaactccaacagacctgcaactgagggtcctgactgttagaaggaaaactaacaaacagaaaggacatccacaccaaaaacgcatctgtacgtcaccatcatcaaagaccaaagagaagtccttaaaggacctgatggagctgaaaaccatggcacgagaactacgtgatgaatgcacaagcctcagtagccaatgcgatcaactggaagaaagtatatcagcgatggaagaagaaatgaatgaaatgaagcaagaagagaagtttagagaaaaaagaataaaaagaaatgaacaaagcctccaagaaatatgggactatgtgaaaagaccaaatctacatctgattggtgtacctgaaagtgatggggagaatggaatcaagttggaaaacactctgcaggatattatccaggagcacttccccaatcgagcaaagcaggccaacactcaagttcaggaaatacagaaaatgccacaaagatactcttcgagaagagcaattccaatacacataattgtcagattcaccaaagttgaaatgaaggaaaaaatgttaagggcagccagagagaaaggtcag

SEQ ID NO: 125764 - DNA, 650 bp, Homo sapiens
atgaggaacgcctttgctctaaggcgaccaccctggcagctcttcactgaggggcctcggtttccacatctgtcgctctccggtcccaagaccaccaggaccgacggggctctccgggaggagcagggcgcgggaggaggcggctcgggctggctcggagagctgaggggcgcacacccgcttcgcagggccagggtgacacggaagcatgcgacggctgctgatccctctggccctgtggctgggtgcggtgggcgtgggcgtcgccgagctcacggaagcccagcgccggggcctgcaggtggccctggaggaatttcacaagcacccgcccgtgcagtgggccttccaggagaccagtgtggagagcgccgtggacacgcccttcccagctggaatatttgtgaggcttggaatttaagctgcagcagacaagctgccggaagagggactggaagaaacccgagtgcaaagtcaggcccaatgggaggaaacggaaatgcctggcctgcatcaaactgggctctgaggacaaagttctgggccggttggtccactgccccatagaggacccaagttctgcgggaggctgaggagcaccaggagacccagtgcctcagggtgcagcgggctggtgaggacccccacag

SEQ ID NO: 125765 - DNA, 414 bp, Homo sapiens
acaacgtgtcctggagagacagcacaatgggctctatcttcatcacacaactcatcacatgcttccagaaatattcttggtgctgccacctagaggaagtatttcggaaggtaagtgtctcttttctagttactcatttatttcttcaggaagaatttgtcatgattcactttttacttcacaatgacaatttttgtcagggaagtgaaagtagagaggtacccagtttctgtcattcagttgtttaaaatatggctaaggaaaagacaattccaatatatcccagcagaagatcaaagtaaaataaaataatatcaaccataagctttatgttatggagcgtaagttcttaagttttagagaaggaaaattatttcttaatttattaaatgaataaaatctgggtggtctgct

SEQ ID NO: 125766 - DNA, 594 bp, Homo sapiens
  misc_feature (1)...(594): n = a,t,c or g
atgcccgcacactgctctccactgctttatgccactctgttcctctngctcctctcgnatattcaaccacttgtgtctgtgcttgatgagaaaccatccaacggtgttctggtccacatggtgaagttgctgatcaagacctttctagatggcatttttgatgatttgatggaaaataatgtattaaatacagatgagatacaccttataggaaaatgtctaaagtttgtggtgagcaatgctgaaaacctggttgatgatatcactgagacagctcaaactgcaggcaaaatatttagggaacacctgtggaattccaaaaaacagctgagttcagttcatggaagtgagcatgaggacaaagctttaacttgccactgggttgggcaccctggatttccagaaaagctgaaagagagaaaaaaattctgtggcataatggtggtgggattgtttggtttcaccactgacagtggaaaagccggtgcagatattcatggtcggttcttgcaaggtaacttctgtaatgatgctgttacaaaggctcatgtggaaaaggactttcattgctttcaaatcttccacaccacataa

SEQ ID NO: 125767 - DNA, 604 bp, Homo sapiens
ttcagtgctgtaagagaggacggaggctgttatctatggcagatctatccaataaaggagagaatggaccgcatacgcctggttctcatcatatgcaataaagagtttgaccatctgcctccaagaaatggggctgactttgccatcatggagatgaagaagctgcttgaggatctgggttacagtgtggatgtagaagagaatctgacagccaggataacgtgtcccagggagagacgggcaccaaggggcttcccatcttcatcacacaactcatcgcatgcttccagagatattcctggcgctgccaccttagaggaagtattttggaaggttcagcaagcatttgaaagtccggaggcaacagtccaaatgcccaccatagaacgagtgtccatgacaagatatttctacctctttcctggcaactgaaaatggttaagcattgagagttgttggtggtgtatgaaataaatgaaagtgtgatattggagcaggataccacaagcagcccagccctcctttatcaacttcaagaaacacctttactagtacagattgaatgcttaacattttgtatttcaataaaggtgaagacaaatga

SEQ ID NO: 125768 - DNA, 1196 bp, Homo sapiens
ctcttctggaaatccagggtgcccaacccagtggcaagttaaagctttgtcctcatgctcacttccatgaactaaagacaaaaagggcagatgaggaaatggaaacagcactaaggcagtttgctgctcacccagagcaccagtcctcagacagcacattcctggtgtttatgtcacatagcatcctgaatggaatctgtgggaccaagcactgggatcaagagccagatgttcttcacgatgacaccatctttgaaattttcaacaaccgtaactgccagagtctgaaagacaaacccaaggtcatcatcatgcaagcctgccgaggcaataatgtttcttggagacatgaaacaaatggctctgtcttcatttcccaaattatctactacttcagagagtattcttggagtcatcatctagaggaaatttttcaaaagatctatccaataaaggagagaaaggaccgcatacgcctggttctcatcatatgcaataaagagtttgaccatctgcctccaagaaatggggctgactttgccatcatggagatgaagaagctgcttgaggatctgggttacaataacgtgtccaggagagacagcacaaggggctccatcttcatcacacaactcatcgcatgcttccagagatattcctggcgctgccacctagaggaagtattttggaagctttttcctgtccggggagcaggagaagccatggctgatggcatttttgatgatttgatggaaaataatgtgttaaatacagatgagatacaccttataggaaaatgtctaaagtttgtggtgagcaatgctgaaaacctggttgatgatatcactgagacagctcaaattgcaggcaaaatatttagggaacacctgtggaattccaaaaaacagctgagttcagatactttcaagatctgggagcttcaggttccttgctcccttggctttgccgttgataacttcctgtccaatcctaccaaagtctggaactggaacatccaagggttgcccttagacgccttctctactgagaatggcatcatcatcaagcgaggccataggtgggcacgggtaatacaaacaaaaagagctggagaatggtccaggtccaaacatagctactttcaaaccgttgataactgggatgaaaaacaagaatttcgtgatggtattgtttaa

SEQ ID NO: 125769 - DNA, 1800 bp, Homo sapiens
attccagaatgactatcttgacttacccctttaaaaatcttcccactgcatcaaaatgggccctcagattttccataagacctctgagctgttcctcccagctacgagctgccccagctgtccagaccaaaacgaagaagacgttagccaaacccaatataaggaatgttgtggtggtggatggtgttcgcactccatttttgctgtctggcacttcgctgcccttggagctggcttctctgacaagactcctgctcacactgtcaccatggcttgtatctctgccaaccaagccatgaccacaggtgttggcttgattgcttctggccagtgtgatgtgatcgtggcaggtggtgttgagttgatgtccgatgtccctattcgtcactcaaggaaaatgagaaaactgatgcttgatctcaataaggccaaatctatgggccagcgactgtctttaatctctaaattccgatttaatttcctagcacctgagctccctgcggtttctgagttctccaccagtgagaccatgggccactctgcagaccgactggccgctgcctttgctgtttctcggctggaacaggatgaatatgcactgcgctctcacagtctagccaagaaggcacaggatgaaggactcctttcagatgtggtacccttcaaagtaccaggaaaagatacagttaccaaagataatggcatccgtccttcctcactggagcagatggccaaactaaaacctgcattcatcaagccctacggcacagtgacagctgcaaattcttctttcttgactgatggtgcatctgcaatgttaatcatggcggaggaaaaggctctggccatgggttataagccgaaggcatatttgagggattttatgtatgtgtctcaggatccaaaagatcaactattacttggaccaacatatgctactccaaaagttctagaaaaggcaggattgaccatgaatgatattgatgcttttgaatttcatgaagctttctcgggtcagattttggcaaattttaaagccatggattctgattggtttgcagaaaactacatgggtagaaaaaccaaggttggattgcctcctttggagaagtttaataactggggtggatctctgtccctgggacacccatttggagccactggctgcaggttggtcatggctgctgccaacagattacggaaagaaggaggccagtatggcttagtggctgcgtgtgcagctggagggcagggccatgctatgatagtggaagcttatccaaaataatagatccagaagaagtgacctgaagtttctgtgcaacactcacactaggcaatgccatttcaatgcattactaaatgacatttgtagttcctagctcctcttaggaaaacagttcttgtggccttctattaaatagtttgcacttaagccttgccagtgttctgagcttttcaataatcagtttactgctctttcagggatttctaagccaccagaatctcacatgagatgtgtgggtggttgtttttggtctctgttgtcactaaagactaaatgagggtttgcagttgggaaagaggtcaactgagatttggaaatcatctttgtaatatttgcaaattatacttgttcttatctgtgtcctaaagatgtgttctctataaaatacaaaccaacgtgcctaattaattatggaaaaataattcagaatctaaacaccactgaaaacttataaaaaatgtttagatacataaatatggtggtcagcgttaataaagtggagaaatattgga

SEQ ID NO: 125770 - DNA, 1641 bp, Homo sapiens
atgctcccacgctccccgacccccaatccccaggacccgcaggacctccggaggaacgcccgccagcccgcccggagccacgcggcacaaggtgacacggaccgcgccgcgcggcccctcagccgcctgggcgaggccgggagcagggagaggggcatccgccggcccgcggtaccttgtacttatcaaagccagccagctgctccgggctcacccagccatgacgacccgaaaactgagcgcccactcggcagcgactcccggctacaaggctgtgacacacaagcaccacaccggctgggcaaggatggcaaagactgggctgcccgagaagctctcttcgtcgcttcatttgctagcgtcaaaattggtgagctgaggggtttgttgcatcggaccagtgtccctaaggaagtagttgattatatcatctttggtacagttattcaggaagtgaaaacaagcaatgtggctagagaggctgcccttggagctggcttctctgacaagactcctgctcacactgtcaccatggcttgtatctctgccaaccaagccatgaccacaggtgttggcttgattgcttctggccagtgtgatgtgatcgtggcaggtggtgttgagttgatgtccgatgtccctattcgtcactcaaggaaaatgagaaaactgatgcttgatctcaataaggccaaatctatgggccagcgactgtctttaatctctaaattccgatttaatttcctagcacctgagctccctgcggtttctgagttctccaccagtgagaccatgggccactctgcagaccgactggccgctgcctttgctgtttctcggctggaacaggatgaatatgcactgcgctctcacagtctagccaagaaggcacaggatgaaggactcctttctgatgtggtacccttcaaagtaccaggaaaagatacagttaccaaagataatggcatccgtccttcctcactggagcagatggccaaactaaaacctgcattcatcaagccctacggcacagtgacagctgcaaattcttctttcttggctaggggagtggaatctggagtagttccaacaggatggaacaccaccctgttaagcccaggtggtgaagagctggttaggttggtcatttgcaaaaccgaattggatgatagagccatgtggcatggactacacttgccagatctgaatccttttgattatttccagggtatgctaaaggtccaggtttatttaactgatggtgcatctgcaatgttaatcatggcggaggaaaaggctctggccatgggttataagccgaaggcatatttgagaccaacatatgctactccaaaagttctagaaaaggcaggattgaccatgaatgatattgatgcttttgaatttcatgaagctttctcgggtcagattttggcaaattttaaagccatggattctgattggtttgcagaaaactacatgggtagaaaaaccaagaagtttaataactggggtggatctctgtccctgggacacccatttggagccactggctgcaggttggtcatggctgctgccaacagattacggaaagaaggaggccagtatggcttagtggctgcgtgtgcagctggagggcag

SEQ ID NO: 125771 - DNA, 3213 bp, Homo sapiens
atggtctgttcggctgccccactgctgctcctggccacaactcttcccctgctggggtcaccagttgcccaagcatcccaacctctttggccgatggccaagggccagacaatgtgggcccagacctccaccctcaccctgacagaggaggagttgggacagagtcaggctggaggggaatctggatctgggcagctcctggaccaagagaatggagcaggggaatcagcgctggtctccgtctatgtacatctggactttccagataagacctggccccctgaactctccaggacactgactctccctgctgcctcagcttcctcttccccaaggcctcttctcactggcctcagactcacaacagagtgtaatgtcaaccacaaggggaatttctattgtgcttgcctctctggctaccagtggaacaccagcatctgcctccattaccctccttgtcaaagcctccacaaccaccagccttgtggctgccttgtcttcagccatcccgaacccgggtactgccagttgctgccacctgtccccgggatcctcaacctgaactcccagctgcagatgcctggtgacacgctgagcctgactctccatctgagccaggaggccaccaacctgagctggttcctgaggcacccagggagccccagtcccatcctcctgcagccagggacacaggtgtctgtgacttccagccacggccaggctgccctcagcgtctccaacatgtcccatcactgggcaggtgagtacatgagctgcttcgaggcccagggcttcaagtggaacctgtatgaggtggtgagggtgcccttgaaggcgacagatgtggctcgacttccataccagctgtccatctcctgtgccacctcccctggcttccagctgagctgctgcatccccagcacaaacctggcctacaccgcggcctggagccctggagagggcagcaaagcttcctccttcaacgagtcaggctctcagtgctttgtgctggctgttcagcgctgcccgatggctgacaccacgtacgcttgtgacctgcagagcctgggcctggctccactcagggtccccatctccatcaccatcatccaggatggagacatcacctgccctgaggacgcctcggtgctcacctggaatgtcaccaaggctggccacgtggcacaggccccatgtcctgagagcaagaggggcatagtgaggaggctctgtggggctgacggagtctgggggccggtccacagcagctgcacagatgcgaggctcctggccttgttcactagaaccaagctgctgcaggcaggccagggcagtcctgctgaggaggtgccacagatcctggcacagctgccagggcaggcggcagaggcaagttcaccctccgacttactgaccctgctgagcaccatgaaatacgtggccaaggtggtggcagaggccagaatacagcttgaccgcagagccctgaagaatctcctgattgccacagacaaggtcctagatatggacaccaggtctctgtggaccctggcccaagcccggaagccctgggcaggctcgactctcctgctggctgtggagaccctggcatgcagcctgtgcccacaggaccaccccttcgccttcagcttacccaatgtgctgctgcagagccagctgtttggacccacgtttcctgctgactacagcatctccttccctactcggcccccactgcaggctcagattcccaggcactcactggccccattggtccgtaatggaactgaaataagtattactagcctggtgctgcgaaaactggaccaccttctgccctcaaactatggacaagggctgggggattccctctatgccactcctggcctggtccttgtcatttccatcatggcaggtgaccgggccttcagccagggagaggtcatcatggactttgggaacacagatggttcccctcactgtgtcttctgggatcacagtctcttccagggcagggggggttggtccaaagaagggtgccaggcacaggtggccagtgccagccccactgctcagtgcctctgccagcacctcactgccttctccgtcctcatgtccccacacactgttccggaagaacccgctctggcgctgctgactcaagtgggcttgggagcttccatactggcgctgcttgtgtgcctgggtgtgtactggctggtgtggagagtcgtggtgcggaacaagatctcctatttccgccacgccgccctgctcaacatggtgttctgcttgctggccgcagacacttgcttcctgggcgccccattcctctctccagggccccgaagcccgctctgccttgtgccgccttcctctgtcatttcctctacctggccacctttttctggatgtggcgcaggccctggtgttggcccaccagctgctctttgtctttcaccagctggcaaagcaccgagttctccccctcatggtgctcctgggctacctgtgcccactggggttggcaggtgtcaccctggggctctacctacctcaagggcaatacctgagggagggggaatgctggttggatgggaagggaggggcgttatacaccttcgtgggccagtgctggccatcataggcgtgaatgggctggtactagccatggccatgctgaagttgctgagaccttcgctgtcagagggacccccagcagagaagcgccaagctctgctgggggtgatcaaagccctgctcattcttacacccatctttggcctcacctggggctggcctggccactctgttagaggaagtctccacggtccctcattacatcttcaccattctcaacaccctccagggcgtcttcatcctattgtttggttgcctcatggacaggaaggccggggccgtggctggcataagcagagcatttacctctcccgcagatacaagaagctttgcgcaaacgcttctgccgcgcccaagcccccagctccaccatctccctggccacaaatgaaggctgcatcttggaacacagcaaaggaggaagcgacactgccaggaagacagatgcttcagagtgaaccacacacggacccatgttcctgcaagggagttgaggctgtgtgcttgaacccaccagatgagccctggcccaatgctctgaactcttcccgcctcccggagctcagcccttga

SEQ ID NO: 125772 - DNA, 360 bp, Homo sapiens
ggtcagattttggcaaattttaaagccatggattctgattggtttgcagaaaactacatgggtagaaaaaccaaggttggtcatggctgctgcaacagattacggaaagaaggaggccagtatgcgttagtggctgcgtgtgcactggcagggcagggcgtcttcatcctattgtttggttgcctcatggacaggaagatacaagaagctttgcgcaaacgcttctgccgcgcccaagcccccagctccaccatctccctggtgagttgctgccttcagatcctcagctgtgcatccaagagcatgtcagaaggcattccatggccctcctcagaggacatgggcacagccagaagctga

SEQ ID NO: 125773 - DNA, 2017 bp, Homo sapiens
cttgctccgagagggagtcctcgcggacgtcagccaagattccagaatgactatcttgacttacccctttaaaaatcttcccactgcatcaaaatgggccctcagattttccataagacctctgagctgttcctcccagctacgagctgccccagctgtccagaccaaaacgaagaagacgttagccaaacccaatataaggaatgttgtggtggtggatggtgttcgcactccatttttgctgtctggcacttcatataaagacctgatgccacatgatttggctagagcagcgcttacgggtttgttgcatcggaccagtgtccctaaggaagtagttgattatatcatctttggtacagttattcaggaagtgaaaacaagcaatgtggctagagaggctgcccttggagctggcttctctgacaagactcctgctcacactgtcaccatggcttgtatctctgccaaccaagccatgaccacaggtgttggcttgattgcttctggccagtgtgatgtgatcgtggcaggtggtgttgagttgatgtccgatgtccctattcgtcactcaaggaaaatgagaaaactgatgcttgatctcaataaggccaaatctatgggccagcgactgtctttaatctctaaattccgatttaatttcctagcacctgagctccctgcggtttctgagttctccaccagtgagaccatgggccactctgcagaccgactggccgctgcctttgctgtttctcggctggaacaggatgaatatgcactgcgctctcacagtctagccaagaaggcacaggatgaaggactcctttctgatgtggtacccttcaaagtaccaggaaaagatacagttaccaaagataatggcatccgtccttcctcactggagcagatggccaaactaaaacctgcattcatcaagccctacggcacagtgacagctgcaaattcttcttttctttgactgatggtgcatctgcaatgttaatcatggcggaggaaaaggctctggccatgggttataagccgaaggcatatcttgacgggattttatgtatgtgtctcaggatccaaaagattcacttattacttggaccaacatatgctactccaaaagttctagaaaaggcaggattgtaccatgaatgatattgatgcttttgaatttcatgaagctttctcggggtcagattttggcaaattttaaagccatggattctgattggtttgcagaaaaactacatggggtagaaaaaaccaaggtttggattgcctcccctttggagaaggtttaataactgggggtggatctctgtccctgggacacccatttggagccactggctgcaggttggtcatgacctgctgccaacagattacgggaagaagggagggccagtatggcttaggtggcctgcgtgtgcagctggagggcagggccatgctattgatagtgggaagcttatccaaaataatagatccagaagaagtgacctgaagtttctgtgcaacactcacactaggcaatgccatttcaatgcattactaaatgacatttggtagttcctagctcctcttaaggaaaacagttcttggtgggccttctattaaatactttgcacttaagccttgccagtgttctgagcttttcaataatcagtttactgctctttcagggatttctaagccaccagaatctcacatgagatgtgtgggtggttgtttttggtctctgttgtcactaaagactaaatgagggtttgcagttgggaaagaggtcaactgagatttggaaatcatctttgtaatatttgcaaattatacttgttcttatctgtgtcctaaagatgtgttctctataaaatacaaaccaacgtgcctaattaattatggaaaaataattcagaatctaaacaccactgaaaacttataaaaaatgtttagatacataaatatggtggtcagcgttaataaagtggagaaatattggaaaaaaaaa

SEQ ID NO: 125774 - DNA, 645 bp, Homo sapiens
atggatgtcatcagcattgacaagactggagagaatgtccgtctgatctatgacaccaagggtcactctgctgttcatcatattacatctgaggaggctaagtacaagttgtgcaaagtgagaaaaatctttgtgggtacaaaaggaattcctcatctggtgattcatgatgttcacactatccactaccctgatcccctcatcaaggcagtgctcccaggagaaatctctaaggaagaagagcaggagcagggaaaaggaggaagccaagcaatggtgcatctagccaaggatggctccagcctgatgaaatcagggaaacttctgttcttaggcaaggagcctggggcttttatttcatactcccaaacctcccaatcatgggatgggggtggagaatgtaattcccagccattgcctgctctctatgctgccagcaaagcaggctgtagcagtacaggcacagtcctccaaaaagaaccccagatgctagctgttagaagcaaaggaaagtccaagggaatgggagcatgggtgctaaaaggaatctgggcagaaacaccaacattattcaccacttccactgttggagtgcagagaacaataccccaaagtatgatgctttgtcatgccgaacacttctga

SEQ ID NO: 125775 - DNA, 1028 bp, Homo sapiens
ctgggcggacagctgaaaatccggcgcgcgcagtctccagccccaatttctacgcgcaccggaagacggaggtcctctttccttgcctaacgcagccatggctcgtggtcccaagaagcatctgattctgtgtggcagctcactaagcattggatgctggataaattgaccggagggtgtgctctctcgtcattcaccggtgccccacaagttagagagagtgtctccccctcatcattttccctgaggaacagacttaagtatgccctgacaggagatgaagtaaagaagatttgcatgcagcggttcattaaaatccgatggcaaggtcccgaacttgatataaccctacccctgctggatttcatgggatgtcatcagcatttgacaagaccggggaagagaatttcccgtcctgatctattgacaccaaagggtccgcttttgctggtacatccgtatttaaccaccctggaggaaggccaaagtacaagtttggtgccaaaagtgaagaaaagatcttttgtggggcacaaaaagggaatcccctcatcctgggtgacttcatgatggcccgcaaccatccggtaaccccgatccccctcatccaaggtgaattgataccatttcagattggatttagagacctggcaaagattactggatttccatcaagttccgacactggtaaccttgtgtatgggtgactggggaggtgcttaacctaggaagaaattgggtgttgatcaccaaccagagagaggcaccctggatcttttgacccgtggtttcacgtggaaagatgccaatggcaaccagctttgccactcgactttccaacatttttgttattggcaagggcaacaaaccatggatttctcttccccgaggaaagggtatccgcctcaccattgctgaagagagagacaaaagactggcggccaaacagagcagtgggtgaaatgggtccctgggtgacatgtcagatctttgtacgtaattaaaaatattgtggcaggattaatagc

SEQ ID NO: 125776 - DNA, 460 bp, Homo sapiens
gaatacaatgtgttgcttcaagccactaattttgtggtcattggtcacaacagcaagaagcactgctctacagggggtgaagagtggaaggggtcacaggctttagtttgtaaatctctgttacctttattgcagataaccgtctcctcaggaggaatgttggttcagaaactgaacaccaatgatctccagtccgaaagaacaccatttgatggaactatggtctatgcacaaaacaagaggcagcaagtggttctgacggagcggtgggcccaagggcacccggccatccatttttcttccatgcatcctggctgggccgacaccccaggtgtgaggcaggcgatgccggggttccacgccaggttcggggaccgcctgcgctccgaggcccagggcacggacaccatgctgtggctggccctctcctctgccgcagccgcacagcccagcggccgct

SEQ ID NO: 125777 - DNA, 558 bp, Homo sapiens
attcctcaagcaagggtggttctcatcaagaacagaggaaagagaagccaagcaaagagcctggcttccacccgaggtcaagtgctgtcttcggatggcgtccactcacacgcctgcccccttaggagcccactggggagagacgtgaacagatcactgcttccaaaaatagagaagcagagtcccttacaccctttgcactgcagagaagcagagtccgttactccctttgcagtgcagctttgaatagcgcccctcctgggcctcagcaaactgcagagaaaatcttccattcccaaggtaggaactgcctctcccgttctcacaggaccttgatgacagggttatcacaagtctccaaagaagctaccaacctggagtgaagcgcttcccaaaactaacctcagcaggcaaagcaatcatctcgccaaagaagcccaggcatcccccaggggacagtcccaccccaggtttcacggaggggaaggtgcgcctcgaaggcccagctgctgcccctagccctgtgtcagctgccttcacagccagggaggaagtcac

SEQ ID NO: 125778 - DNA, 515 bp, Homo sapiens
tcccagttcccaaactgcactttacatatcaatccatgctgcctgatccctgtgggacctttgacagcagggatgggggtctaacagctgtagggtgctgccactccagcaggcgtcggttcaaggcctgagcagcacagggacatggacccagccacgctgcagcagctcacacctctctgcggttccctctcacttttagatcggaagccagtttctacacacttgcctctcgctacagcgtcctcctcaccggccgaagaggagaaactcattgaaatcctggaacagctggctcagacatttaaataggccaacccagacacagtgcggtaccagaattgccttagaagataccagaaggtgcggtctagggaccagtgaataagaagaccccacttcaacttcccctcgaagacgttgtgcctcacagcgaggcctacaagggatgggaacttttatttcaaaataaatactaccgaggctgtgatcaggctcacccctcgtgccgaatt

SEQ ID NO: 125779 - DNA, 1887 bp, Homo sapiens
ctacggtttggcagttttctttttcccttcctgtattcctgtagtgtggacatcttttcctgtcggtacatgaggctctaaggcatctttcttccagtccaagagggctcccctttggggagcacagctctgctcagacccatgtgggctttcagcagcatcctgggaggagccacaaagccactgcgtctcctctcggtgtttctcagacccacacagaacaggatccgtatgccggtctgtgctgggggcctgaagtacagcagtgaacaggacagttaccacccctgccctcagtgagcagcaaagaatagagtcacccaggcgacttgtggacgaggaacacgtttcatctaaaaatacctgagcagccgcaggattgactctccccaggaatgaccactccccaggtttttggaaataatgatgcatgaaggtaaatgccagccacaaggacacagctcgaatgatctggaagcgtgttggagcagcggtggaggggagcagaattctcttccggattggcctcaccaactccatgacctcaggcagctcacctgggctctctgcagctctttcctccttgtggagacactgtgttccctgaggtccttccttctcccaggtgtgaggcaggcgatgccggggttccacgccaggttcggggaccgcctgcgctccgaggcccagggcgcggacaccatgctgtggctggccctctcctctgccgcagccgcacagcccagcggccgcttctttcaaggtgacttcctccctggctgtgaaggcagctgacacagggctaggggcagcagctgggccttcgaggcgcaccttcccctccgtgaaacctggggtgggactgtcccctggggggtgcctgggcttctttggcgagatgattgctttgcctgctgaggttagttttgggaagcgcttcactccaggttggtagcttctttggagacttgtgataaccctgtcatcaaggtccttgggaatggaagattttctctgcagtttgcggccgaagaggagaaactcattgaaatcctggaacagctggctcagacatttaaataggccaacccagacacagtgcggtaccagaattgccttagaagataccagaaggtgcggtctagggaccagtgaataagaagaccccacttcaacttcccctcgaagacgttgtgcctcacagcgaggcctcttagtgactccaggaaaagttgtaataaaaccaatgagcagatttagaatacatctacatacattcttggtgtccatggtggaataaacgtaactcatcccccatagcagaggaaaacccagacggctgcagcttctcagtggtcctggagacactctgatccagggctcatcatcagccaaggaccacaaggaagggatttttctgggtgtgccagcctgaaacatcagcgtctttctgacaaaaggaggcgctatcaagcaagcaccagctccatttaactgcatgcctccttttatgatgaaggaaaagggctccatggcttgagcccgtgtgctgtgcttagactgtggtgaacagggctcatcttcacctccaaacagcagctctccctggcatctagacagcaggtggagtggtctggaacctccccctcccaccaactggacagaacccacagggctaaacagcacagcaaggttgtcggtgtgtgcgtggccacatgtaaccgtgatgggaccatagcaatgaaaacgaggcacagagagtttcagtggcacatccaagatcacacgcatctggaaaggggcagagccaggatcccagcctgacggtctgggtccagatgccacatgcttaaccccttctctgtaaggacgagggacatgtcccat

SEQ ID NO: 125780 - DNA, 823 bp, Homo sapiens
  misc_feature (1)...(823): n = a,t,c or g
gcggccgctgggctgtgcggctgcgtgctgaggagagggccagccacagcatggtgtccgcgccctgggcctcggagcgcaggcgataccccgaagcctggacgtggaaccccggcatcgcctgcctcacacctggggtgtcaggcccagccaggatgcatggaagaaaaatggatggccgggtgcccttgggcccaccgctcccgtcagaaccacttgctgcctctcactgaccttgttttgtgcatagaccatagttccatcaaatggtgttctttcggactggagatcattggtgttcaagtttctgaacccaaccattcctcctgaggagacgggttatcactcgggggtccgtgttctttctcccagcacaggggatcaggccgggtcgtgagaaatgtacacaccccagagtattggcaaccaaagtttttttcaaagtccatcttcttgtgagcttctcttttattgaccatgcaacctgcattattgatcaagaacatggagtttatgttcctgcttgaaattttcaacaaatttccagattttcttgggatcagacaagtccacaatgtgcagaaaaatgttctggttaccgcatctcccggatgatctcacccctggcatcttctgctggggcttgatctcgacaaaccaggtgaactgtgccacctcgcttggcgatttcaagggcagttgctttgccaatgccgctgtttcctccagtgaccaaaaagactcttccaggaatctggacctccaagtcatgagggacaaagtctttacatgcagagtcatagccactcntggtgtagccccc

SEQ ID NO: 125781 - DNA, 3108 bp, Homo sapiens
atgaatgccaccagatctgaagagcagttccatgttataaaccacgcagagcaaactcttcgtaaaatggagaactacttgaaagagaaacaactatgtgatgtgctactgattgcaggacacctccgcatcccagcccataggttggttctcagcgcagtgtctgattattttgctgcaatgtttactaatgatgtgcttgaagccaaacaagaagaggtcaggatggaaggagtagatccaaatgcactaaattccttggtgcagtatgcttacacaggagtcctgcaattgaaagaagataccattgaaagtttgctggctgcagcttgtcttctgcagctgactcaggtcattgatgtttgctccaattttctcataaagcagctccatccttcaaactgcttagggattcgatcatttggagatgcccaaggctgtacagaacttctgaacgtggcacacaaatacactatggaacacttcattgaggtaataaaaaaccaagaattcctcctgcttccagctaatgaaatttcaaaacttctgtgcagtgatgacattaatgtgcctgatgaagagaccatttttcatgctctaatgcagtgggtggggcatgatgtgcagaataggcaaggagaactggggatgctgctttcttacatcagactgccattactcccaccacagttactggcagatcttgaaaccagttccatgtttactggtgatcttgagtgtcagaagctcctgatggaagctatgaagtatcatcttttgcctgagagaagatccatgatgcaaagccctcggacaaagcctagaaaatcaactgtgggggcactttatgctgtaggaggcatggatgctatgaaaggtactactactattgaaaaatatgacctcaggaccaacagttggctacatattggcaccatgaatggccgtaggcttcaatttggagtcgcagttattgataataagctctatgtcgtgggaggaagagacggtttaaaaactttgaatacagtggaatgttttaatccagttggcaaaatctggactgtgatgcctcccatgtcaacacatcggcacggcttaggtgtagccactcttgaaggaccaatgtatgctgtaggtggtcatgatggatggagctatctaaatactgtagaaagatgggaccctgagggacgacagtggaattacgtagccagtatgtcaactcctagaagcacagttggtgttgttgcattaaacaacaaattatatgctattggtggacgtgatggaagttcctgcctcaaatcaatggaatactttgacccacacactaacaagtggagtttgtgtgctccaatgtccaaaagacgtggaggtgtgggagttgccacatacaatggattcttatatgttgtaggggggcatgatgcccctgcttccaaccattgctccaggctttctgactgtgtggaacggtatgatccaaaaggtgattcatggtcaactgtggcacctctgagtgttcctcgagatgctgttgctgtgtgccctcttggagacaaactctacgtggttggaggatatgacggacatacttatttgaacacagttgagtcatatgatgcacagagaaatgaatggaaagaggaagttcctgttaacattggaagagctggtgcatgtgttgtagtggtgaagctaccctaaagctatctatctttatcaaatggaatgaaactagataatttcaagaaactgagtaggacaaagggagaaagaaatacatgttctttttcctgcaattaataatcagactggaaaattgttgtatcattttaatttgtagttacaattgctttcattcgtgaagccgaaacgtttttaaacatgaattacatatgaattattaagcatatgtgctttcgcagctgataatataaaaggaaatcccacagtctagatatagccccattactacaaaatgctaaaatatttaatgaaaattgatggtggccacagtgtgcaggttataaaagcattaatacatttcaaggtaagagccttaaaagttaaaaacattttcagtttttttttaaaaaacgtactcttattatctggaacatagaaatataaaaggtaacatctaaagcttagaatagtgtgatttttagtaagccattattctcctattcaaataatatcccaaagagctaaacaattccttacatttaccaagaggaaagcttttactgtgttgaagctaaaaaaataatggctctttgacaaaacttgttatgttgatcgcggtatgtcaaaatttttacaggtttgctcatctgccagagcacacatataaatttggtatttcttaacatattatcttgttagatttgttaccagtaaaatattactgtaatttcatatacacagtctatacaatgaaataatgaatatttatcatattgatacaaactgtgacctcagcttcagagtgtcagggcctcacttgtatagaatgtaatgttctcctcaaacatttatgttaactctataaacaaatatcgttaagttaaacaagttttcaaaaacaaaacaatttttaaagtaccttaaaattgaggatgttactcagtgttaacacatgggaacaccaaaatattcaataagcctggtcaattctatagttatcttttttgtaccaacacatgcttttctgttactgttatattatccagtagaaaatgttaggatatgtgtgctatataaaaaaaaaaaaagacttgttaagttttaaaataacaaaaatggctagttgaatagtattttatgtgtaattcttccatttattctgtttaattatacaactaagatgaaatattgaaaaaccctttgtgaaagtaacttttcaagtaaatgcacaactttagaatttctacaaataagttcttttaaacagtctttttattgtggattgtgaaatcaaaatctggagaaatgcttataaaatatactactagcttttaagttttaagaaagaagaacgtaagttgtacaaagatatttgtactttgacaaactgaatttaaataaactttatttcctctc

SEQ ID NO: 125782 - DNA, 485 bp, Homo sapiens
cttcaggcagtgggctggcctgtggaacacccagtggcctgggctttatcattttcagttgtaactctattggacttttcctcccaattatctttctaaatcctttaaggtatgatccaaaaggtgattcatggtcaactgtggcacctctgagtgttcctcgagatgctgttgctgtgtgccctcttggagacaaactctacgtggttggaggatatgacggacatacttatttgaacacagttgagtcatatgatgcacagagaaatgaatggaaagagaatggtagatccaccgacagtttgcactgtgtgcctggaaaagccacagacactcaacacaagcccatgaaagcagccaggatgggggctgtaccctgcaaagccagaggggtggagctgcccaaggctgtgggagctcacgtcttgcatcagtgtgacctcaatgtgagacatgaagtcaatggagatcatgttagagtttaa

SEQ ID NO: 125783 - DNA, 297 bp, Homo sapiens
atgctggaggaggaagaaaaccgggtacacaagacgccttggctgtcttgtcctttgatggctggggaagctcttagtgctcggagtcctcactcacctctctgcattctgagggaggtagaaggggggacaggagagccaattcaacctgagaaggatgatcggtggagcagaacaaggggaggtggacatggagagccaccggaatgccaacgcagagccagctgttcagcgtactcttttagagaaatagaagattgtcggcagaaacagcccaggcgttggcagcagggttag

SEQ ID NO: 125784 - DNA, 1282 bp, Homo sapiens
cgtggaggccggggcggggcgggcgcagccggcgctgagcttgcagggccgctcccctcacccgcccccttcgagtccccgggcttcaccccacccggcccgtgggggagtatctgtcctgccgccttcgcccacgccctgcactccgggaccgtccctgcgcgctctgggcgcaccatggcccgcggggctgcgctggcgctgctgctcttcggcctgctgggtgttctggtcgccgccccggatggtggtttcgatttatccgatgcccttcctgacaatgaaaacaagaaacccactgcaatccccaagaaacccagtgctggggatgactttgacttaggagatgctgttgttgatggagaaaatgacgacccacgaccaccgaacccacccaaaccgatgccaaatccaaaccccaaccaccctagttcctccggtagcttttcagaatgctgaccttgcggatggcgtttcaggtggagaaggaaaaggaggcagtgatggtggaggcagccacaggaaagaaggggaagaaggccgacgccccaggcgtgatccccgggattgtgggggctgtcgtggtcgccgtggctggagccatctctagcttcattgcttaccagaaaaaagaagctatgcttcaaaagaaaattgcagaacaaggggaggtggacatggagagcccaccggaatgcccaacgccagaagccagctgttcaagcgtactcttttagagaaaatagaagattgtccggagaaacagccccaggcgtttggcagcagggttagaacagctgcctgaggctccctccctgaaggacaccacgcctgagagcagagattggaggccttctgttcacggcggattcttttgttttaatccttgcgatgtgctttgcttgttgcctgggcggatgatgtttactaaccgatgaattttacaatccaaaaagggggataaggcacttgggacccccattcttccaaggcccggggggggcgggtttcccatggggatgttgaaaggctgggccatttatttaagtccctgttaactcaaatgttcaaccccaccgagggcacccgggacgttcccccagaatcttggctgtttacaaatcaacgtgtccatcgagcacgtctaaaacccctggtagccccgacttctttttaattaaaataaggtaagcccttcaatttgtttcctcaatatttcctttcatttgtagggataattggtttttcatatcagactaattaaaagaaattagaaaccaac

SEQ ID NO: 125785 - DNA, 476 bp, Homo sapiens
  misc_feature (1)...(476): n = a,t,c or g
tttttttttagctgctgaaacagacactcatttatttccccagaaggaggcagaatggggtccttggggagtctctgtcccagcccggacaggcagatctcacttccagaagagcacattccaaaaaagcagccagcaggggtagaggcccagggacagcagtgggaagagcagggcgccgtaggtgtggtgctccagcacaccctgggctagcgctgccaggaagagctgccagccctcggccagtgacagtggcgcctcctgcagctcccgccacaggaacaggctgccaaggagcgtggctgccgggcttggttcagccccccaagaccnaaaaggggggcagcataaagggtccggggcccatgaggcttggcaagcgcaacagtgggcaccatggtggtggccaggccactggcagagcccccgacttcttgcggtgggcggcgaagtcccgggcaaaagcccgggcacgg

SEQ ID NO: 125786 - DNA, 2352 bp, Homo sapiens
gttatgtctggctgtagctgttggtcacgtgaagatgccagacgatgagcttgtgtataacattcacctggctgtcaacttcttggtgtcattgctcaagaaaaactggcagaatgtccgggccttatatatcaagagcaccatgggcaagccccagcgcctatattaaggcacatttgaataaattctattaccagttaaaaaaaaaaaaaaaaaagttggcggccgccaacttttttttttttttttttttttttttttttttttttttttttttttttttttttgctgaaacagacactcatttatttccccagaaggaggcagaatggggtccttggggagtctctgtcccagcccggacaggcagatctcacttccagaagagcacattccagaaaagcagccagcaggggtagaggcccagggacagcagtgggaagagcagggcgcccgtagtgtgtggtgctccagcacaccctgggctagcgctgccaggaagagcttgccagccctcggccagtgacagtggcgcctcctgcagctcccgccacaggaacaggcttgccaaggagccttggctgccgggctggttcagcaccagcaagggcagccattagagggtccggggcccattgaggctttggcaaagcgcacaagttgggcaccatggtggtggccagcaggaagcccagttgagaagttggtgagggcgatgcagcccagctgcagtgctaggtagatcagggctaccagcttcagtgccatccagcccctgtctgggggcctgtgtgcttacccaccccgtgggtattgtagagcagggacagagccagctgcataaatcgccagcagtggcagcaccacagcttcagcctctgccactgggaagtgctgggtggcaacgtgttggcccagcactggcaggacatagagggccagtcccatggcctgtgagatcagcagaggtgccacgagcgaggccagccccacaccctgtgatggggggaaggggtactctggggccaggggcacccccgggctcctcaaggcccattccagcctcatgcagctgcatccacagttccagagccttgagaccaaggaccaggagcaagaagccgacagcgggcatgtagaggccgatggagacgaagcgggagaggccggggagcaagtagaggaagaaaaactggtgcaggcgctccaggaggtggttgagcttgcggaacatgccctccaaagccttgcccactgccaccaggtcatacttgtactggcggaagctattgatgccacgcagggttagggcctccacacggtagcgcaggaagaggccatgggagccgtgggggcggccggaggcctgccgcagaaccatgagcagcagtgtctgcaggccctgcagcggtccatccaatgatgtccagtcctcgggctgcagcttgccctgaagcgtgcacaacaggccccctttctggcagaaggtctggaagagattgagcaggtcaaggttgggcagctgcccgttaagcccctccacggccacatcgaggctggtgaccacatcactgctcagctccagggccacggctgcctgaatggccccagctcggccctgcaggggagacgactgcatgccagtgacattgacatcgtggtaggcttcaagccaagcctcagtgcccagaaggtcatgttctgttaccaggaagacgatatctttggcccaataaatctgcccccggaagtgggcagccagtgccagcagcagccccacagcctggctgttggtagagtcagagccacagggcacggtgagcacaagcgactcggtgctggcagcacgcggggcccgcaggatgccgtacacgttggtgcccgacaccatatagcgctcgtgggtctcatctgggaagggcagtttccgggagaaactctgcgtgtagacctccagccctactgaccgcatcgtccgttcaagccaggccactggcagagcccccgacttcttgcggtgggcggcgaagtcccgggcaaaagcccgggcacggtctccgcccgcaaactgctcctccaccatggtggagcccatggcgttctccgacatgtaagtgcgctgggtcagcggcgggaaaaccagcgccaagaaccaggcgatgcccgccacgtagctcagcacgcacaacggcgcgttgaggcgcagcactaggcgggcgagcgcgcgccggcgaaccgggtccgacaggaggcccatggcggggcagggcggcgcggctacggaccctctcccgcctccaactaccgccgcggtgcccacaggctgctcctgtcagacccggggacccgcgc

SEQ ID NO: 125787 - DNA, 452 bp, Homo sapiens
  misc_feature (1)...(452): n = a,t,c or g
aatgagaactgaggacactgcgnggaactcgcggatctgcggtgatgagtgcctgttgtccaagttccagcagctccaggccccctaccaggaccagctaccggctcctgcagcgcgtctgctgcccctcggcctcctgaccctcctccaggccatcccgagggtcatcatggccattcgccagtgttttggggtttgaagttggaatcttcagctactgtcaagaacagccacaaaaatgtgtcacgatcaagatctttgagagtccaccaatcaggaggcgtctgtgacagtcgctgtcttctcagaacagaatccacacccaggattcaacccaaatgatttctcatcaggtgattcttggttgtagcaaagttcatgtgaatgtgggggggacttgtccccatgtccgtgtccctgggggagggcagctatttccgagtgtctcttca

SEQ ID NO: 125788 - DNA, 412 bp, Homo sapiens
tttcgttggggctggggttgagctcgggttgggtttctcctggggcaggagggaaaggcgggagccagggcgtcagggcctgcggacgatgtgtgtgtgaaagggcgcgtcagccataagaagccatatgcgtgcgagccggtccccaccgtccccgcggcgttgtcaccatcatcatgaggccactggaacagcctcaggctctgctgccggggggccgggcgcggggtgcgtctggctctgcaggttggcactcacacccagcgcgcaggatggcaggaatagcacatttcaaacctacaagaaagaagtgtgcctcccccgtcattcgcacccctgctggatgcatgctgctggcacaactgctggcggatctgcggtgatgagtgcctgttgtccaagttccagcagg

SEQ ID NO: 125789 - DNA, 681 bp, Homo sapiens
ctagaagcccttttgtccattgaaacacgcgcgttccatcgtctccgccttatggtaaccaaaaggcccgagctgcgagctctgcagggaccttcggggatcccgagctcccttgaagtcaacccactttgcgtccctgggttcccccattctcgtggcttgtttaggcttcgaatggtttgcaatgggtgataccttcacgtggcaaatgcgtccatgaagtgtcaaatgtgattgctccttagttgaaagggaccacgcgttacccagggcgcaacggtcccaaaaaggcaagccccctcggctggcctcgatgatctccaatttcccaatttccgtggtcttacgtgtatgagctattgctatcctttgtggccagggggtcacgtgaccactcccggtgagtcctccgggtggcccggcacccccggaaagtgttgcgttggcagaatgggtctgctcggggagcagaaggcctttgtcgaattccggaattgctcgcagacctattggtgtcatccagccactagactttttgcagaattggccgaagcccgtgctgagatgctgaccaggtgctgaaaccattttcgggccctcatccagtgggtctgctgtcccgaagagacactcggaaatagctgccctcccccagggacacggacatgggacaagtccccc

SEQ ID NO: 125790 - DNA, 1593 bp, Homo sapiens
atgcccaatggcaccaatgaatctcacagatacaacgctagtgaaagaagccagacacagaaagatgaacaaacaggaaaaaccgtgggaccaccagagtggacacctctagtgagaagaaatgggggtgactcaggcctggatttccacttctttgcagagaaattaaaaatcattgtggattctgctggcagggctgggacgggtcacatgcgcccacctgctgtccactttgggcacagagggcaagccatgatcacgctttctcccctaagggctaaacagaaagcagtcctacaaaagcctccaccgctgacatcaacctacagcctgatgctgcccctctttttgcctgataagagaccaccgaccacggagtggttcttgccagtgatggaggatgcgcatgaattaaccctggcatggctgatgctggctctctacagaaagccaaatgccagcgtgcagggatcagcccaggaggagactctgtgtgtgttcagagtcaaagagccccttgaatggcaggcactgttcgctgatgtgcattctggggtaaatgacaagggaccaaacatcaactgcagtctctatgagcacataaagaatgtatctgagattgttctcaatctggcccagactcagaaaaatcctgctcattctgatccaagcagcacccctgctggatgcatgctctggcacaactgctggcggatctgcggtgatgagtgcctgttgtccaagtccagcagctccaggccccctaccaggaccagctaccggctcctgcagccgtctgctgcccctcggcctcctgaccctcctccaggccatcccgagggcatcatggccattcgtgcagctccttcctgcctgggggcctgcatcacactgcaggatgaggagacctgtgaacaaacgcacacacacagtcgaatttacatgatttacttgtttgctcgttgtctcctccatgcaattgcaagaggaagatctagaaaatgtgcagcgtctgcaggggggacttgtccccatgtccgtgtccctgggggaggcagctatttccgagtgtctcttcagggacagcagacccactggatgaggcccgaaaatggtttcagcacctgtgtcagaacaaagagtagaagatgtccgattattcgagagcagcatccaaccaaaatcccgaaggcgcttacagccaatgctaatcaggccttcttcctgttggtgaacggacacagcatggtcgcgtctccacaccaatctcagagacgcgccgaccttggtggcttttggagagatgcatccagctcgctgctggcaaactctcaagtccaagtgtgcggctccctccggaagaggcctcacggatgggtggttccattttctctgcgctgtgtagctccacttacagctgacgattctcgacttcggacggcctccctggagatgtcaacgccgcccatgcacgttcaagacgactggcagctccgcagaggccttcctgctgggaacacagccgtgacagtgtcggaactcatctacctcaacgcgaatggcaggctccaagttgaaaagtttctgttttaa

SEQ ID NO: 125791 - DNA, 1177 bp, Homo sapiens; identical to SEQ ID NO: 117969

SEQ ID NO: 125792 - DNA, 543 bp, Homo sapiens; identical to SEQ ID NO: 117968

SEQ ID NO: 125793 - DNA, 1461 bp, Homo sapiens
ggcgcccagcaagggcccaaatgggacacctggtgaggatggtggcgagcctggggatgccgtagctgcggccgagcagcctgcccagtgtgggcaggggcagccgttcgtgctgcccgtgggcgtgagctccaggaatgaggactacccccgaacctgcaggatgtggaatagcacatttcaaacctacaagaaagaagtgtgcctcccccgtcattcgatgcaccctggcccctgggccatctgctgtgaatgccagaccagattcgggggccgcctgcctgtgtccagggtggaagcagcactgccttactgggtccctctgtccctgagaccccgaaagcagcacccctgctggatgcatgctgctggcacaactgctggcggatctgcggtgatgagtgcctgttgtccaagttccagcagctcccaggcccccctaccaggaccagctaccggctcctgcagcgcgtctgctggccctcggcctcctgaccctcctccaggccatcccgagggtcatcatggccattcgccagtgttttggggtttgaagttgggaatcttcagctactggtccaaaacagccccacaaaaatgtgtcacgattccaagatctttgagagtccacccaatcaggaggcgtctgtgacagtcagctgtcttctcagaacagaatccacacccaggattcaacccaaatgatttctcatcaggtgattcttggttgtagcaaagttcatgtgaatgtgggtgagtttctgttatgaatgtggtcaataaatgttatttgtgaaactctaaactggccacctcttaaatgatgacctctgatttcccttcattaaggggggacttgtccccatgtccgtgtccctgggggagggcagctatttccgagtgtctcttcagggacagcagacccactggatgagggcccgaaaatggtttcagcacctgtgtcagggcttcctgcatcacctcccccagaaaacacttgcgctcaatccttgcctcaggctctgcttttggggtgaactcaagataagacaaggtgagcagatcccatctcaccagtcagggaggaagcgccatcggagcagagacctgaagacaattccaggaaacctggcaatgaaagtggcaagggaggacaggtcaaggcagcggccacagcagcccgtgaccacaggctgcattttggagaaaccactccagctgaagagtgttggatggaatagagtggcaagagtggacacgggaaaccagcttggaggctgcagcaggaaacctggtgggggacgatggtgtctggacctcggtggtggtggcagtggctgtgttccagtcagagctgtagccatcgaatcaaatgacggaggccggaagtcgccgaccagaactgccaggttactcctggtgtctgacgatcctgttacgggctacaatagatcaagttaa

SEQ ID NO: 125794 - DNA, 666 bp, Homo sapiens; identical to SEQ ID NO: 117606

SEQ ID NO: 125795 - DNA, 477 bp, Homo sapiens
gcccacggccgccagcccgactcccccactcaggtcggggcgagcacacagcacgacgcacccagcccgcacaccacggacgttaaagccaggaacgcacacacgacagaacccgtaccaaaagccagccagcacggagggacaattgtgctccttggcatttacctaaaggaattgaaaatatttccacacaaaaacctgcatgtggatgtttatagcatccaaactcacaattgccaaaacttggaagcaagcatgatgtccttcagcagcttcatgggccagctgctgcagtttgagtcccaggtgctggctccgcactgttcggcagaggctgggagccccgccatggctgtgctcgaccgaggcacctccaccaccaccgtgttcaacttccccgtctccatccctgtccactccacgaacagtgcgctgagctaccttcagagccccattacgacctctcccagctgctga

SEQ ID NO: 125796 - DNA, 2056 bp, Homo sapiens
tttgggctgtgtgtgcgacgcgggtcggaggggcagtcgggggaaccgcgaagaagccgaggagcccggagccccgcgtgacgctcctctctcagtccaaaagcggcttttggttcggcgcagagagacccgggggtctagcttttcctcgaaaagcgccgccctgcccttggccccgagaacagacaaagagcaccgcagggccgatcacgctgggggcgctgaggccggccatggtcatggaagtgggcaccctggacgctggaggcctgcgggcgctgctgggggagcgagcggcgcaatgcctgctgctggactgccgctccttcttcgctttcaacgccggccacatcgccggctctgtcaacgtgcgcttcagcaccatcgtgcggcgccgggccaagggcgccatgggcctggagcacatcgtgcccaacgccgagctccgcggccgcctgctggccggcgcctaccacgccgtggtgttgctggacgagcgcagcgccgccctggacggcgccaagcgcgacggcaccctggccctggcggccggcgcgctctgccgcgaggcgcgcgccgcgcaagtcttcttcctcaaaggaggatacgaagcgttttcggcttcctgcccggagctgtgcagcaaacagtcgacccccatggggctcagccttcccctgagtactagcgtccctgacagcgcggaatctgggtgcagttcctgcagtaccccactctacgatcagggtggcccggtggaaatcctgccctttctgtacctgggcagtgcgtatcacgcttcccgcaaggacatgctggatgccttgggcataactgccttgatcaacgtctcagccaattgtcccaaccattttgagggtcactaccagtacaagagcatccctgtggaggacaaccacaaggcagacatcagctcctggttcaacgaggccattgacttcatagactccatcaagaatgctggaggaagggtgtttgtccactgccagcgcaggcatttcccggtcagccaccatctgccttgcttaccttatgaggactaatcgagtcaagctggacgaggcctttgagtttgtgaagcagaggcgaagcatcatctctcccaacttcagcttcatgggccagctgctgcagttttgagttccccaggatgcttggtcccgcactgttcggcagaaggctgggaagcccccgacatggctgtgcttcgaccgaggcaccatccaccaccaccgtgttcaacttccccgtcttcatccctgttccactccacggaacagtgcgctgagcttacctttcagaggccccattaacggacctttcccagctggttgaaagggccacggggaggtgagggttttttcacatcccattgggacttccatgctccttgagaggagaaatgcaataactcttgggaaggggctccaaaaggcttggtcctaatttatttaacttcacccgagttcctctgggtttctaaggcagttatgggtgatgacttaggcgtcaagacatttgctggaacttcagcacatttcggggacccaatatatagtggggtaccatccaagtccattctggacaaaatggggggcaggaagaggaaagggacttcagtgtgttgatccccggtttctttttttgcttcgcccctgtttttttgtaggattctctttcatgcttggacatacctaccagtattattcccgacgacacatatacatatgagaatataccttatttatttttgtgtaggtgtctgccttcacaaatgtcattgtctactcctagaagaaccaaatacctcaatttttgtttttgagtactgtactatcctgtaaatatatcttaagcaggtttgttttcagcactgatggaaaataccagtgttgggtttttttttagttgccaacagttgtatgtttgctgattatttatgacctgaaataatatatttcttcttctaagaagacattttgttacataaggatgacttttttatacaatggaataaattatggcatttctattg

SEQ ID NO: 125797 - DNA, 1263 bp, Homo sapiens
cttgcgctctacgcccaagggagccgggctgcagagctggagaaacttccgcggctacgggtgcagttgccttcggttcccggttccgggccgacacccgcgcagggctgagacaggtgtctgcgctccccgcaatgggctgctccagcagcgccctcaacaaggccggcgacagcagcaggttccccagcgtaacttcaaatgagcatttttcaactgcagaagaaagtgagtcctgctttgcccaaccaaagccacatgcactgggaagaggaatctactgttgatggcaatgtacaaagggaaagccgtcctcccttacaaaagctcaaggtttcagcagagcctacagctaatggtgttaaacccctccaagaacagcccctggccaaggacgtagcccctgggaaggggatgccacagaccaattcagggtccacagaaaagactcagcctggagagggactggaggaatctgggccgcctcaaccaggtggcaaagaggatgccccagcagcagaaggaaagaagaaagatgcaggagcagggacagaggccgagtctctaaaaggaaatgctgaagctcagcctttaggaccagaagccaagggtcagcctttgcaggcagcagtagagaaggactctctcagagcagtggaggtcactgagaatccacaaactgctgcagagatgaagcctctaggaacaactgagaacgttctgactctgcaaatagctggagagctacaacctcagggcacagtgggaaaggatgagcaggccccgcttctagaaacaatttccaaagagaatgaatctccagaaatattggaaggaagtcagtttgtggaaacagctgaagagcagcaacttcaggcaacattgggaaaagaggagcagccccagcttctagaaagaattcccaaagagaatgtaacaccagaagtattggacagaagtcagcttgtggaaaagcctgttatgaatgatccattccataaaactcctgaaggtccaggaaacatggagcagattcaacctgaaggaatagttggaagcatggagcatccagcacgaaatgtagaggcaggagcatatgtggaaatgatcaggaacatccatactaatgaagaggaccaacgcattgaaggtgagacaggggaaaaggtggaaacagacatggagaatgagaaagtgagtgaaggggctgaaaccaaagaagaagaaacaggagaagtggtggacctttcagcagccacatag

SEQ ID NO: 125798 - DNA, 743 bp, Homo sapiens
ctaaagttctgcatttaggtctgttcttttggaaatgcgtgtgtcttcacgtacctgcattatcgacaccttgcagggagcagtgcccacatatcctggttcagggactccggcgcttggcgagaagtccggctctttggggctagtggcttggtcttttccacgacctggtgaaagttcctctactgcgccccgcaggagcccctgctgctgcccttggtcgccttcccactcctctccggccagcttcccgcctctgcggccctctgccccagccacgcgtgcccccagagagggcttgccaactcctgcgtctagagcccactttcccggggcgacggctatacccaagacatctggactcctaatcgccaccgctagcctctgctgggggcaaacccaccaaccgtgcccgttacccctagcccgcttccttgggaagcgatagagtggaacaactcgacgtccgagctgttgacccttcccctgggggtccgggcgtcgaagcccatcagcatatctgcggtcacaaaacacttcttctttctgtcgcttctcattcagactattgataagatcatttggtggaatctgtttgagacccatgtaatattgacttaaaacggattttggtactgtttcatctaagattgtctgaaacaatctgttattagcatcacggcttgaatctctcccatatgttctttttttttctttacttgctttaaagcccatttgtatgc

SEQ ID NO: 125799 - DNA, 415 bp, Homo sapiens
gggagcgcagcagccatggcaagccgtctcctgctcaacaacggcgccaagatgcccatcctggggttgggtacctggaagtcccctccagggcaggtgactgaggccgtgaaggtggccattgacgtcgggtaccgccacatcgactgtgcccatgtgtaccagaatgagaatgaggtgggggtggccattcaggagaagctcagggagcaggtggtgaagcgtgaggagctcttcatcgtcagcaagctgtggtgcacgtaccaagcccgaggacccttctctcctggaggatcccaggatcaaggcgatcgcagccaagcacaataaaactacagcccaggtcctgatccggttccccatgcagaggaacttggtggtgatccccaagtctgtgacaccagaacgcattgtg

SEQ ID NO: 125800 - DNA, 440 bp, Homo sapiens
tcgtccagcgtggtggaattcatgaagggctggtgaaagctattggcatctccaacttcaaccattttcaggtggagatgatcttaaacaaacctggcttgaagtataagcctgcagttaaccagattgagtgccacccatatctcactcaggagaagttaatccagtactgccagtccaaaggcatcgtggtgaccgcctacagccccctcggctctcctgacaggccctgggccaagcccgaggacccttctctcctggaggatcccaggatcaaggcgatcgcagccaagcacaataaaactacagcccaggtacagccacttcaggtgttgctgaccgtccacaactgcctgcattcctgacagtcctgttagccaagaggaggaagtgactgagcctgttacaccctcacaggaagtatggttaggggtcctcag

SEQ ID NO: 125801 - DNA, 819 bp, Homo sapiens
atggccagccaccttgtgctcaacaatggcaccaagatgcccatcctggggctgggcacctggaagtcccctccaggccgggtgactgaggccgtgaatgtggccatcaatgtcgggtactgccacattgactgtgcccaccatgagaatgaggtgggggtggccattcaggagaagctcagggagcaggtggtaaagcgtgaggagctcttcatcgttacctgggagggaatttttccattgaatgagttgggtaatgtggttcccagtgacaccaacattctggacacatgggcagccatggaagagctggtggatgaatggctgatgaaagctattggcatctccaacttcaaccacctccaagtggagaggctcttaaacaaacctggcttaaagtataagcctgtggttaaccagattgagtgccacccttacctcactcaggagaagttaatccagtactgccagtccaaaggcatcgtggtgaccgcctatagccccgttggcactcccagcaggccctgggtcaaccccgaggacccttccctcctgagggatcccaggatcaaggcgattgcagccaagcacaataaaactacagcccaggtcctgatccggttccccatgcagaggaatttgggtgtgatccccaagtctgtgacaccagaactcattgctgacaactttaaggtttttgactttgaactgaacagccaggatatgaccgccttactcagctacaacaggaattggagagtctgtgccttggtgagctgtgcctcccacaaggattaccccttccatgaagagttttga

SEQ ID NO: 125802 - DNA, 1380 bp, Homo sapiens
atggcaagccgtctcctgctcaacaacggcgccaagatgcccatcctggggttgggtacctggaagggcagcatcctgcgagtggggtttgggagcagctcacgggagcccccgccctaccgcgggcaacccttgatgggcggcccaccagtccgcattttgggtcctagcgggcgccccaagcggcacaacgcgagagggaggcggggaaagtgggcttcacagaccggtggacctcgggcgcagacagggacgtggagccgtcggcaagggcaggtgactgaggccgtgaaggtggccattgacgtcgggtaccgccacatcgactgtgcccatgtgtaccagaatgagaatgaggtgggggtggccattcaggagaagctcagggagcaggtggtgaagcgtgaggagctcttcatcgtcagcaagctgtggtgcacgtaccatgagaagggcctggtgaaaggagcctgccagaagacactcagcgacctgaagctggactacctggacctctaccttattcactggccgactggctttaagcctgggaaggaatttttcccattggatgagtcgggcaatgtggttcccagtgacaccaacattctggacacgtgggcggccatggaagagctggtggatgaagggctggtgaaagctattggcatctccaacttcaaccatctccaggtggagatgatcttaaacaaacctggcttgaagtataagcctgcagttaaccagattgagtgccacccatatctcactcaggagaagttaatccagtactgccagtccaaaggcatcgtggtgaccgcctacagccccctcggctctcctgacaggccctgggccaagcccgaggacccttctctcctggaggatcccaggatcaaggcgatcgcagccaagcacaataaaactacagcccaggtcctgatccggttccccatgcagaggaacttggtggtgatccccaagtctgtgacaccagaacgcattgctgagaactttaaggtctttgactttgaactgagcagccaggatatgaccaccttactcagctacaacaggaactggagggtctgtgccttgttgagagtcaaactgtggacttgccattcctccaccatgccagggcctctacatcccctgtgccttggctcaggctgtgtcccccacttgggcaacccaagcctggcactccacaagtacttcctcaatggggctctgaatagttttgactatgtcttagaaaccttggcaccagagaacagccatgcttcaaaggaattgactacacaaatttgttttattcttactattttcctcttccaaaataagaaagctgttgaagtctgtgagtttgcctattag

SEQ ID NO: 125803 - DNA, 1403 bp, Homo sapiens
gaaggccgcaccgtactgggcgggggtctggggagcgcagcagccatggcaagccgtctcctgctcaacaacggcgccaagatgcccatcctggggttgggtacctggaagtcccctccagggcaggtgactgaggccgtgaaggtggccattgacgtcgggtaccgccacatcgactgtgcccatgtgtaccagaatgagaatgaggtgggggtggccattcaggagaagctcagggagcaggtggtgaagcgtgaggagctcttcatcgtcagcaagctgtggtgcacgtaccatgagaagggcctggtgaaaggagcctgccagaagacactcagcgacctgaagctggactacctggacctctaccttattcactggccgactggctttaagcctgggaaggaatttttcccattggatgagtcgggcaatgtggttcccagtgacaccaacattctggacacgtgggcggccatggaagagctggtggatgaagggctggtgaaagctattggcatctccaacttcaaccatctccaggtggagatgatcttaaacaaacctggcttgaagtataagcctgcagttaaccagattgagtgccacccatatctcactcaggagaagttaatccagtactgccagtccaaaggcatcgtggtgaccgcctacagccccctcggctctcctgacaggccctgggccaagcccgaggacccttctctcctggaggatcccaggatcaaggcgatcgcagccaagcacaataaaaactacagcccaggtcctgatccgtttccccatgcagaggaacttggtggtgatccccaagtctgtgacaccagaacgcattgctgagaactttaaggtctttgactttgaactgagcagccaggatattgaccaccttactcagctaccaacaggaactggagggtctgtgccttgttgagctgtacctcccacaaggattaccccttcccatgaaaaagttttgaggctgtggtttgcctgctcgtcccccaagtgacctatacctgtgtttcttgccctcatttttttccttgcaaaatggtagtatggcctgttgtcactccagcaagtgggtgacagcaaccctgtaggagttgggccagcgagggcgttgttttagctttgatgtttgggatctcaaggagccctgttcagtaggagtaggaagtttttttccagttttgctttgcccttcttttctaccctgctggggggaaagtacaacctgaataaccttttttggaccaaagagaagcaaaatctaccaggtcaaaatagtgccacctaccgttggggtttgaacggctgggaactggaatccttccagcaagacttctctttgcctcccaaccaaaagtgcttttgtg

SEQ ID NO: 125804 - DNA, 858 bp, Homo sapiens
atgactgagcccgtctgggtccccgcccgctcgcgctcccctggccacaccctccgcctggacgcagcagccaccgccgcgtccctctctccacgaggctgccggcttaggacccccagctccgacatgtcgccctctggtcgcctgtgtcttctcaccatcgttggcctgattctccccaccagaggacagacgttgaaagataccacgtccagttcttcagcagagctcaactatcatggacattcaggtcccgacacgagccccagagtaccatccctacaccagcaccaaatagacaccaccacggataagaaaacacaacattaccctcaaactagaggacccatcaaaaatcacaagcagcagctgcatgctgaggtcgatctaaggatccccaaattcctgaggtgcaacagatgcaccatcggtttggattcagctcagaacagagctaatattctgtccttcctgcatgccttagtcgactctagaggatcccacgtgttcctgtgcctcacacgctacattggggactccatggtcatgcgctgggacggctccatgtttcgtctgctgcagcaacttccctcgcgcggtgcccacgtcttccagccactgctcatcgccagggaccagctggccatcctaggcagcgacttcgccttcagccaggtcctccgccttgagcctgacaaggggctcctggagccactgcaggagctggggcctccggccctggtggccccccgtgcctttgcccacatcactatggccggcagacgcttcctctttgctgcttgctttaagggccccacacagatctaccagcatcacgagatcgacctcagtgcctga

SEQ ID NO: 125805 - DNA, 369 bp, Homo sapiens; identical to SEQ ID NO: 122077

SEQ ID NO: 125806 - DNA, 394 bp, Homo sapiens; identical to SEQ ID NO: 120248

SEQ ID NO: 125807 - DNA, 1539 bp, Homo sapiens; identical to SEQ ID NO: 117840

SEQ ID NO: 125808 - DNA, 2544 bp, Homo sapiens; identical to SEQ ID NO: 122696

SEQ ID NO: 125809 - DNA, 1791 bp, Homo sapiens; identical to SEQ ID NO: 117843

SEQ ID NO: 125810 - DNA, 1014 bp, Homo sapiens
atgcaacctccaatcaaccccccagtagaccatgtcataggtcctcagttgactgcagttactgcagcttctcatgcagcaccagcttttaactctggcaaagtaaatattgtcgccatcaatgactccttcattgatctcaactacatagtctacatgttccagtataattccacccatggcaagttccatggcactgtcaaggctgtgaacagaaagtgtgtcaccaatggcaatactatcaccatcttccaggagcaagatcccaccaaaatcaaatgggttgatgctggcattgattatgctgtggaatcctccatgacacctgctcttcctctcttcaatgctggtgaaatgccctcaattaccacttactttgtcaacctcatttcctggtatgacaatgaatttggctacatcaacagggtgttagaccttatagtccacatggccttcaaggaaccaaatctacgtctcattggtgtacctgaaagtgatggggagaatggaaccaagttggaaaacactctgcaggatattatccaggagaacttccccaatctagaaaggcgggccaacgttcagattcaggaaatacagagaacgccacgaagatactcctcgagaagagcaactccaagacacataattgtcagattcaccaaagttgaaatgaaggaaaaaatgttaagggcagccagagagaaaggtcgggttacccacaaagggaagcccatcagactaacagcagatctctcagcagaaaccctacaagccagaagagagtggaggccaatattcaacatttttaaagaaaagaattttcaacccagaatttcatatccagccaaactaagcttcataagcgaaggagaaataaaatactttacagacaagcaaatgctgagagattttgtcaccaccaggcctgccctaaaagagctcctgaaggacgcgctaaacatggaaaggaacaaccggtaccagccactgcaaaatcatgccaaaatgtaa

SEQ ID NO: 125811 - DNA, 780 bp, Homo sapiens
atggctgaacaggaacagctccagtctgcagttcccagtcctctgctggtgatacccaggcaaaaagggtctggagtggacttccagcaatctccaacagacctgcagctgagggacctgactgataggaggaaaactaacaaacaaaaaggaatagcatcaacattaacaaaaaggacatccacaccaaaaccccatctgtacgtcaccaacatcaaagaccaaagaccaaatccacgtctgattggtgtacctgaaagtgatggggagaaaggaaccaagttggaaaacactctgcaggatattatccaggagaacttccccaatctagcaaggcaggccaacattcaaattcgggaaatacaaagaacgccacaaagatactcctcgagaagagcaactccaagacacataattgtcagattcaccaaagttgaaatgaaggaaaaaatgttaagggcagcaagagagaaaggtcgggttacccacaaagggaagcccatcagactaacagcggatctctgggcagaaaccctacaagccagaagagagtgggggccaatattcaacattcttaaagaaaagaattttcaacccagaatttcatatccagccaaactaagcttcataagtgaaggagaaataaaatcctttacagacaagcaaatgctgagagattttgtcaccaccaggcctgccctaaaagagctcctgaaggaagcgctaaacatggaaaggaacaactggtaccagctgctgcaaaatcatgccaaattgtaa

SEQ ID NO: 125812 - DNA, 1032 bp, Homo sapiens
atgaagactcacttgcaagaaatgataactttccaggagcaaagaggacctaactgggaggcaacccccagtaggggcagactgacacctcatacggccaggtacccctctgagacgaagcttccagaggaacaatcaggcagcaacatttgttgttcagcaatattcgctgttctgcagtctccgctgctgatacccagtaaaatagggtctgggatggacctccagcaaactccaacagacctgcagctgaaggtcctgactgttagaaggaaaactaacaaacagaaaggacatccacacaaaaacccaatctgtatgtcaccatcatcaaacaccaaagagaagtccttaaatgaccggatggagccaaaaaccatggcacaagaactacatgacgaatgcacaagcttcagtagccaattcgatcaactggaagaaagggtatcagtgattgaagatgaaatgaatgaaatgaaacaaaatctacatctaattgatgtacctgaaagtgatggggagaatggaaccaaggtggaaaacactctgcaggatattatccaggagaacttccccaatctagcaaggcaggccaacattcaaattcaggaaatacagagaatgccacaaaaatactcctcaagaagagcaactccaagacacaaaattgtcagattcaccaaagttgtaatgcaggaaaaaatgttaagggcagccagagagaaaggtcgggttactcacaaagggaagcccatcagactaacagcagatctctcagcagaaacgctacaagccagaagagagtgggagccaatattcaacattcttaaagaaaagaattttcaacccagaatttcatatccagccaaactaagcttcttaagtgaaggagaagtaaaatcctttaaagacaagcaaatgctgagagattttgtcaccaccaggcctgccctaaaagagctcctgaaggaagcactgaacatggaaaggaacaactggtaccagccactgcaaaaacatgccaaattgtaa

SEQ ID NO: 125813 - DNA, 2055 bp, Homo sapiens
atgaagcctttccgttcctgttttgatcacatccccgtgggaaaggagatgaagctccattcatcagtgctaagaaaggctccccaaccatgccatggccatgctattggaatggaaatacctgctttccagacaccagatctggcttttagggttgaactacatcccgtctcccctttcccaactgaccatgccttcagtgcacaatcacagatacacacacacttgtgtggggccccagaaaccagaaaccggaggtcttgtaaatttttttatctaagagcatcacggaaactgagaacaattttgtttgaagagcacctgtcaaagcctaaagtcaccatgggtctgcagagcaataagaatggcacctgtgtgaccaatctgacatgctgcatggaacatggggaagaggatgtgatttatacctggaaggccctggggcaagcagccaatgagtcccataatgggtccatcctccccatctcctggagatggggagaaagtgatatgaccttcatctgcgttgccaggaaccctgtcagcagaaacttctcaagccccatccttgccaggaagctctgtgaaggtgactgcctctcccctctccacaggagactctgcccaggtcctacaccttcttcagctcctagcccccatgggaacagacactgtatggaaactggaggccgctgggtggtcaccaggctgggaggaaggtggcaggtgctccaagacctgggtcgttttcctgagctgacttttctcccttccctgtgcctccacccattctctgaaggtgctgctgatgacccagattcctccatggtcctcctgtgtctcctgttggtgcccctcctgctcagtctctttgtactggggctatttctttggtttctgaagagagagagacaagaagagtacattgaagagaagaagagagtggacatttgtcgggaaactcctaacatatgcccccattctggagagaacacagagtacgacacaatccctcacactaataaccctccttttcctctcacatctcctcccatctctgctttcccctctctggattctgaatgtctctctggccttgtctatgtgattcaggagagaacaatcctaaaggaagatccagcaaatacggtttactccactgtggaaataccgaaaaaggatagcagttcctcaccagcaatggaacaaagctggatggagaatgactttgatgagttgagagaagaagtcatcagacgatcaaactacgagctacaggaggaaattcaaaccaaaggcaaagaagttaaaaactttgaaaaaaatttagacgaatgtataactagaatagtcaatacagaaaagtgcttaaaggagctgatggagctgaaagccaaggcacgagaactacaaagggtatcagcaatggaagatgaaatgaatgaaatgaagcaagaagggaacaaacaaagcctccaagaaatatgggactatgtgaaaagaccaaatctacgtctgattggtgcacctgaaagtgacggggagaatggaactaagttggaaaacactctgcaggatattatccaggagaacttacccaatctagcaaggcaggccaacattcagattcaggaaatacagagaacaccacaaagatactcctcgagaagagcaactccaagacacataattgtcagattcaccaaagttgaaatgaaggaaaaaatgttaagagcagccagagagaaaggtcgggttacccacaaagggaagcccatcagactaacagctgatctctcggcagaaactctacaagccagaagagagtgggggccaatattcaacattcttaaagaaaagaatcttcaacccagaatttcatatctggccaaactaagcttcataagtgaaggagaaataaaatcctttacagacaagcgaatgctgagagattttgtcaccaccaggcctaccataaaagagctgctgaaggaagcactaaacattgaaaggaacaaccagtaccagccgctgcaaaatcatgccaaaatgtaa

SEQ ID NO: 125814 - DNA, 1395 bp, Homo sapiens
atggctctgaagagagcagcagatctcccagcacagcgttcaagctctgctaaaggtcagactgcctcctcaaatgggtcactgacccccatgtctcctgactgggagacaccttccagtaggggccaacagacacctcatacaggagagctccagctggcctctggcaggtcaccaacatcaaacaccaaaggtaaggaaatccatgaagatggggagaaaccagtgcaaaaggcagaaaattccaaaaaccagaatgcctattctcctccaaaggatcacaactccttgccagcaagggaagaaaactggatggagaatgagtttgacaaattgacagaagtaggcttcagaagaaaactgaaactggaccctctccttacaccgtatacaaaaattaattcaagatggattaaagacttaaatgtaagacctaaaaccataaaaaccctagaagaaaaccgagacaataccattgaggacataggcgtgggcaaagacttcatgactaaaacaccaaaagcaatggcaacaagagccaaaattgacaaatgggatctaattaaactaaagagcttctgcacagcaaaagaaactatcatcagagtgaacagaataaccaatacagagaagtgcttaaaggagctgatggagctggaaaccaagcctggagaactacgtgaagaatgcagaagcctcaggagccgatgcgatcaactggaagaaagcgtatcagcaatggaagatgaaatgaatgaaatgaagcgagaagggaagtttagagaaaaaagaataaaaagaaatgagcaaagcctccaagaaatatgggactatgtgaaaagaccaaatctacgtctgactggtgtacctgaaagtgatggggagaatggaaccaagttggaaaacactctgcaggatattatccaggagaacttccccaatctagcaaggcaggccaacattcagattcaggaaatacagagaacgccacaaagatactcctcgagaagagcaactccaagacacataattgtcagattcaccaaagttgaaatgaaggaaaaaatgttaagggcagccagagagaaaggtcaggttaccctcaaagggaagcccatcagactaacagccgatctctcggcagaaaccctacaagctagaagagagtgggggccaatattcaacattcttaaagaaaataattttcaacccagaatttcatatccagccaaactaaacttcataagtgaaggagaaataaaatactttacagacaagcaaatgctcagagattttgtcaccaccaggcctgccctaaaagagctcctgaaggaagtgctaaacatggaaaggaacaaccggtaccagccactgcaaaatcatgccaaaatgtaa

SEQ ID NO: 125815 - DNA, 996 bp, Homo sapiens; identical to SEQ ID NO: 122079

SEQ ID NO: 125816 - DNA, 1589 bp, Homo sapiens
ccaacggaccccgcagctgagggtccctgtctgttagacgcaaaaactaacaaacggaaaggtccatccacacccatactcccattctgtccttcaccattcatcagaggacctaaggttgattcaacccacggtgcatggggacaaaaacagcaccgataaactgggatattctaaagaagcagagcaccctctcctccctccagaaggaacacggctcctcaccagcaacagaacaaagctggatggagaatgactttgatgagttgagagaagaaggcttcagacgaattaaattactccgagctaaaggaggaagctcgaacccatggcaaagaagttataaaccttgaaaaaaaaactagacgaatggataactagaataaccaatgcagagaagtgcttaaaaggagctgatggagcttgaaagccaaggcctcgagaacttcgtgaagaatgcagaagccctcaggagccgacgcaatcaactggaagaaagggtatcagcaatggaagatgaaatgaatgaaatgaagccaagaagagaagtttagagaaaaaaagaataaaaagaaatgaacaaaagccttgaaggaattatgggactatgtgaaaagaccaaaatctacgtctgattggtatacctgaaagtgacgaggagaatggaaccaagttggaaaacactctgcaggatattatccaggagaacttccccaacatagcaaggcaggccaaccgttcagattcggggaaattacagagaacgcccacaaaggttgcctcctcgaggaagagcaactccaaggacacattaattgtcagattcaccaaagttggaaatggaagggaaaaaatgtttaaggggcagccaggggggaaaggtcggggtcaccctcaaagggaagcccatcacactaacaacagctgatctctcagcagaaacttctacaagccagaagacagagtgggggccaatattcaacattctggaaggaaaagaattttccaacccagaaatttcatatcttagccaaacttaagctttcataagtggaagggaggaattaaattccttttaccggacaagccaaatgctgagagatttttgtcaccaccaggcctcccgcctgccctaaaagagcaccaggcctgccctaaaagagctcctgaaggaagaagcacttaaacatgggaaagggaacaacccggtacccagccacttgcaaaaattcattgcttaaatttgttaaaggccatttgagggcttggggaggaaacttgcatcaactaatggacaaaataaccagctaacattcataatgacaggatcaaattcacacataacaatattaactttaaatgtaaatgggctaaatgctcccatttaaaagacacagactgggcaaattggataaagagtcaagacccatcaatgtgctgtattcaggaaacccatctcacgtgcagagacacacataggctcaaaataaaaggatggaggaagatctaccaagcaaatggaaaacaaaaaaaggcagggtttgcaatcctagtctctgataaagcagactttaaaccaacaaagatca

SEQ ID NO: 125817 - DNA, 1920 bp, Homo sapiens
atggtgattggccgtgcagatggagagaacaaaaggaaaaaaacatttattgagcatttattatgtcccaacccctgtgatttccagcacaagataaccgtgcaggcctctcccaacttggacaaacggcggagcctgaacagcagcagttccagtcccccgagcagccccacaatgatgccccgactccgagccatacagttgacttcagatgaaagcaataaaacttggggaaggaacacagtctttcgacaagaagaatttgaggatgtaaaaaggaattttaagaaaaaaggttgtacctggggaccaaattccattcaaatgaaagatagaacagattgcaaagaaaggataagacctctctccgatggcaacagtccttggtcaactatcttaataaaaaatcagaaaaccatgcccttggcttcattgtttgtggaccagccagggtcctgtgaagagccaaaactttcccctgatggattagaacacagaaaaccaaaacaaataaaattgcctagtcaggcctacattgatctacctcttgggaaagatgctcagagagagaatcctgcagaagctgaaagctgggaggaggcagcctctgcgaatgctgccacagtctccattgagatgactcctacgaatagtctgagtagatccccccagagaaagaaaacggagtcagctctgtatgggtgcaccgtccttctggcatcggtggctctgggactggacctcagagagcttcataaagcacaggctgctgaagaaccgttgcccaaggaagagaagaagaaacgagagggaatcttccagcgggcttccaagtcccgcagaagcgccagtcctcccacaagcctgccatccacctgtggggaggccagcagcccaccctccctgccactgtcaagtgccctgggcatcctctccacaccttctttctccacaaagtgcctgctgcagatggacagtgaagatccactggtggacagtgcacctgtcacttgtgactctgagatgctcactccggatttttgtcccactgccccaggaagtggtcgtgagccagccctcatgccaagacttgacactgattgtagtgtatcaagaaacttgccgtcttccttcctacagcagacatgtgggaatgtaccttactgtgcttcttcaaaacatagaccgtcacatcacagacggaccatgtctgatggaaatccgaccccaactggtgcaactattatctcagccactggagcctctgcactgccactctgcccctcacctgctcctcacagtcatctgccaagggaggtctcacccaagaagcacagcactgtccacatcgtgcctcagcgtcgccctgcctccctgagaagccgctcagatctgcctcaggcttacccacagacagcagtgtctcagctggcacagactgcctgtgtagtgggtcgcccaggaccacatcccacccaattcctcgctgccaaggagagaactaaatcccatgtgccttcattactggatgctgacgtggaaggaatgaagccgcagaccttcgcagtgagtgttgcagctcttaaaggtgccgcctctggagttgtttcttcctcccagagggttcgtgatctcgctgacttgagaagtgaagctgtagaccttcacactccccgggaccggaccctccccactcaccaggtgcagggccaggggcagcagcaggaggaacagccacaggtagaggtggcagctgttggtgaacttgctctgctccgggtcgtggtaccagcccccggtctccttcagtacatccccctgtcaattacaactccaagtaaacacagatctccttatgatcgtactagcagaggattgagatatggctatgccaaagagcagaccctcatgagcatgtga

SEQ ID NO: 125818 - DNA, 384 bp, Homo sapiens
  misc_feature (1)...(384): n = a,t,c or g
gcagcttatttnctttttattgtatttaattccaaaagaatggncacacttctttgctaggtaggcaagangtnccggaggacacactagagaaagcaccactccccaccctaacccacatccccaacacactcacctgcccacactcacacaatcacatacacatgcccacacttatatacacatgctgacacccgtgcactcatgtgcacacactcattcacactcatacacattcacactcaggcatactcatactcctcatgagcacaccacactcacctgtgtcttctgaccgagagccctcctgaagggaggtctgtacctcctccctcatctcaattttacacaaggcgacagggtcagagggccagggtggggacg

SEQ ID NO: 125819 - DNA, 501 bp, Homo sapiens
gcggccgcgctgctgctccgcgcgcacccgggtgtcctctccgagcgctgcaccgacgagaagagccggcgcatcctggccgcgctgtgccaggactaccagggcggcacgctggccggggacctctgcgaggacctgtgtgtggcgggaaagctgctgttccaacgctgcctgcactacaacagaggcaagaaggtgctgcaggccgactggcgcggccggcccgtggtcctcaagtccaaggaggaggccttctccagcttcccgcccctcatgcctgttggaagaggaggcaggggagggtggccagggacatgcccgaggccgaactcctcctgatggtggctaggggaggtcaagagcgctctgggcctgggagttgtccaacagcagcctgggggccgtggtggccgggcaggcggggcccacgctggcggggacagctgggccagcctgtgggccctgctgcagcaggaggagtacgtctacttcagcctgctg

SEQ ID NO: 125820 - DNA, 1756 bp, Homo sapiens
atgacagactgggggaagaaaaagtgggacatctacaccagggtgaatactatgccagccataaaaaagaaagagaacatgtcctttgcaagaagatggatggagcctggggccatcatccttagtcaactaatgcaggaacagaaaaccagacactgcatgttctcatttttggtaactggaaccaagaagctgatcaaagatgtgaggatttgtatgggtttgtgccaggactaccagggcggcacgctggccggggacctctgcgaggacctgtgtgtggcgggagagctgctgttccaacgctgcctgcactacaacagaggcaagaaggtgctgcaggccgactggcgcggccggcccgtggtcctcaagtccaaggaggaggccttctccagcttcccgcccctcagcctgttggaagaggaggcaggggagggtggccaggacatgcccgaggccgaactcctcctgatggtggctggggagcaggaggagtacgtctacttcagcctgctgcaggacctgagcccacacgtgctgcccgtgctgggttcctgcggccacttctacgcggtggtggctattgatgtggacatggccttttttgaacctaaaatgagggaaatccttgagcaaaactgcacaggagatgaagactgcaatttctttgactgtttttcaagatgtgatttacgagtcaacaaatgcggagcgcagcgcgtaaacaacaacctgcaggtcatctgtgacaaaatatttcgccattggttttccgcgcctctcaagagctctgcggtctctttccagcttcagctgcagttacaggaggcggtgcaggaatgtgcagaccctggggtccccagtgggaacacccggagagcagcctccagcgtgttctggaagcttcgccgactcctccaaagcccacactgagggagcttgcaaggaggccagagaaagtagccactcttcttggcctttaaacatgctcacacagggaaaagtgaccttggctggatttcttctgccattgttttaaagatgagccatttcccccgtgctctctggggtgccgttctggtctccacattgtggagtggcaagtgctgctgccagagacagtgctccctcgctctcgtcccaccctggcctctgacctgtcgccttgtgtaaaatgagatgagggaggaggtacatgacctcccttcaggagggctctcggtcagaagacaccaacctgtgtgcacttattctctgcagagagcacttgtacctggttatcccagcacgagttccagctgttctttcctgtaaatcgttaccacgttaaaaagtgtgcgtgtgtgcatacaaatgatgtgtatgcctgtgtctgggtgcaaatgagcatgtgagcatgtgtgaatgtgccccatgagtgtcctgccatgtgtgtgagtgtgcacaggtgagtgtgccacaggtgagtgtggtgtgctcatgaaggagtatgagtatgccctgagtgtgaatatgtatgagtgtgaatgagtgtgtgcacatgagtgcacgggtgtcagcatgtgtatataagtgtgggcatgtgtatgtgattgtgtgagtgtgggcaggtgagtgtgttggggatgtgggttagggtggggagtggtgctttctctagtgtgtcctccggaacatcttgcctacctagcaaagaagtgtgaccattctttcggaattaaatacaataaaaagaaaataagctgcaaaaaaa

SEQ ID NO: 125821 - DNA, 606 bp, Homo sapiens
atgaagctgcagaaccaacgaggtggccgaatcttccttcaggatatcaagaaaccagactgtgatgactgggagagcgggctgaatgcgatggagtgtgcattacatttggaaaaaagtgtgaatcagtcactactggaactgcacaaactggccactgacaaaaatgacccccatttgtgtgacttcattgagacacattacctgaataagcaggtgaaagccatcaaagaattggcccaggctcatgaattagttctgctgagcctggccatggccagttgtaaagtgctgtgtgtgctgataccaaaagttatgtacaaaacaccaagaagtcccaggattggtactgcctttcagtatttgtccaaaatggtgcttttctctgcttccctggtcaagcagaatgaacaggtcaccagcgcaggtggtgatatagacactgaggacatgtccccatatgttaccaaggtcacctgtctggaccccagaatccagaggctcggaaaacaaaaacataagctcacagtcaaatcaagcaaatatcaaaaacataacagaagcagaagttttatgaccttaaagcttgaagcagagatagcataa

SEQ ID NO: 125822 - DNA, 423 bp, Homo sapiens
atgatcaagggtgtgacactgggcttctgttacaagatgaggtctgtgtatgttcacttccccatcaacatcattatccaggagaatggttctcttgttgaaatccgaaatttcttgggtgaaaaatacatccgcagggttcagatgagaccagctgtatcctccagccaggtcctggaagacttattttccaggtttcttctagaaaaggaatgtaaaactgagctttctagacacttcaagagctggaatgacagaagagaaaccacccgatatcaaggagtcaggctgcccctggagtttaagtccagccagataaccacattgagaggaagactggatgatatcccggaaagctccgtgacactagcatctagattcagcctctgggtgttttccccaataaatctcttgcacatctaa

SEQ ID NO: 125823 - DNA, 927 bp, Homo sapiens
cagacgttctttctttgctgcgtctactgcgaggctgggacacactggggcccgctgtcggtctcccgtcctccgacatcttgtctggaacttccgcctggcagtctccagtaggagtggagctctgtgcggcgtagtttggtggaaaaacgggccttgcgtcggcctcacccccagtgtttgtgtttcagaatgaagactattctcagcaatcagacctgtcgacattccagaaaatgtcgacatgtactctgaagggacgcacagttatcgtgaagggcccccagaaggaaccctgcggagggactttcaatcaccttcaatggagaacttcacctttttggaaagaaaaaaaaagaggctccgggttgacaaatggtggggtaacagaaaggaaactggctaccgttcggactatttgtagtcatgtacagaacatgatcaagggtgttacactgggcttccgttacaagatgaggtctgtggtatgctcactttccccatcaaccgttgttatccagggggaatgggtctcttgtttgaaatcccgaaatttctttgggtgaaaaaatatatccgcacgggttcggatgagacccaggtgttgctttgttcagtaatctcaagcccagaaaggtgaatttaatcccttgaaggaaatgacatttgagcttgtttcaaattcagcgggctttgattcagcaagccacaacaagttaaaaacaaggatatcaggaaatttttggatggtatctatgtttttgaaaaaggaactgttcagcaggctgatgaataagatttaagagttacctggctacagaaagaagatgccagatgacacttaagacctacttgtgatatttaaatgatgcaataaaagacctattgatttggaccttttttttaaaaaaaaaaaaaaaaaaaaaa

SEQ ID NO: 125824 - DNA, 417 bp, Homo sapiens; identical to SEQ ID NO: 125208

SEQ ID NO: 125825 - DNA, 342 bp, Homo sapiens; identical to SEQ ID NO: 121094

SEQ ID NO: 125826 - DNA, 182 bp, Homo sapiens
atggaatactatgaagccataaaaaaggatgagttcatgtcctttgcagggacatggatgaagctggaaaccatcattctcagcaaactatcacaggaacagaaaaccaaacactgcaggttctcactcacctgcgagcggcctggtgatgtcttcacagatgagggcgtgggagcccacgg

SEQ ID NO: 125827 - DNA, 439 bp, Homo sapiens; identical to SEQ ID NO: 121095

SEQ ID NO: 125828 - DNA, 325 bp, Homo sapiens
atggaatactatgcagccataataaaggatgagttcatgtcctttgcagggacatggatgaagctggaaaccatcaatctcagcaaactatcacaaggacagaaaaccaaacacctcatgtcctcacttataagtgggagtggaacaataaaaacacatggacacagggaggagaacatcacacaccagggtctgttggggctaaatgtcacatcctcagggaaactgtcccttaccaccaagcatgttgctcctttttctctgaatcttatcacttatcccaatggtggaattggtgattaccgtgtccctctgcctactacag

SEQ ID NO: 125829 - DNA, 525 bp, Homo sapiens
atggatgaagctggaaaccatcattctgagcaaaccatcacaaggacagaaaaccaaacactgcatgttgtcactcataggtgggaactgaacaataagacttggacacaggggtttctgggaaagcaaaacagtgagactgatatttgtgtgcaagaaatgtattgggggtgcttttgggatgaacacatcttgggtaatgaaggaacaaggaggactgggcagaggaggaagtggaaagctttcacgctctcacaagacctcagcagtcacaccgacccaccccagcaggctctgtctaactggaaaggcactagagcattgcctaatgaaaacaaaagggatggcctttatccccgctgttgtttggcatcctatgtgtgctgccccaaaaaggaggcatggtcttggggcaaagtggctgtctttagcaaagggaagttgcagagagggtctcagctgagagctgcctgtgatcaaccttctgggcaattgggctatgagcactttgtcctccagggggcg

SEQ ID NO: 125830 - DNA, 864 bp, Homo sapiens
atggcgctgaacacaggactgctcacagagttacgcaggtgccagtgcccaggtaaagctccacgactgaccgtcccaagagaactgcatgaaatggagagggcaatgaatgagagttcctgttccttcacattcttgccaatctttggtgttgtcagtgttctagatatgggctattctggcagacccaaggatggctcaggggaagctgcgtatggaaataggaacaaagctcagatgccttatctggacagtccacaagggtgtgcactgggtaaccttctggtgggtggagaggagccagactgggaatctggaggtcagaaggctttggcttggcctcctcacacatctacactcgggtgtgaactctctatttacaagagcaaggatttggaacccatcaatgatagactggataagaaaatgtggcacatatacaccatggaatactatgcagccataaaaaagaatcagttcatgtcctttgcagggacatggatgaagctgtctgccccagcagcaccaactgtgcttttcttggcatcctttacaaaccactataatctccgtgcaagtttgctagtggaatcctgtctagcacccagttacacttcagtggagccaaggttctcaattcctcaatcacttacaccagccaggggctcctctgatgggcacacgtgcttttcccaccagagccatgattctctgctgatttgtgctgattctacacacttctggttgtcagctcatatttggatccaagcaaatgcacctcctgtccctcgggcaccaagtgagttgtctttgaagactcgacttaaatgttcacctcagttaaatctccgtagacctccatga

SEQ ID NO: 125831 - DNA, 663 bp, Homo sapiens
atgcgggacatatacaccatggaatactatgcagccataaaaaaggatgagttcatgtcctttgcagggacacggatgaagctgaaaaccatcattctcagcaaaccatcagaaggacagaaaaccaaacactacatgttctcactcatagacacagagctgtgtacccaacaggtactcaacacatgctgctccttgctttgtggtctatggaccagcagcaccagcgtcaccagggagcttgctagaaattcacctcagatctgctgtatcaggatctgcattgaacaaggtcccaggttcttcgtgtgcacgctaaccccagcttcccggttccttagtgccatctgtgtgagcagagcatatcgcatgagcagcggcttcacacctgagctggatgatgaagggatcttgccatgccgagctggcaaattcctagtcagcagagccatctgccccaacttgtttaacgccagcaaacagttgacttacaaggcaaggctgtgtcaccagaagggatctgagacctggatactctcaggagaggccaaggcagattcacctcctacagagaaagtctgtatttcctacagtatttacagaggctacagcagcttgtgtcccgctaatgagctggtcctgaacactcccatgaccaagtag

SEQ ID NO: 125832 - DNA, 2636 bp, Homo sapiens
atgaacatcgatgcaaaaatcctcaataaaatactggcaaaccgaatccagcagcacatcaaaaagcttatccaccatgatcaagtgggcttcatccctgggatgcaaggctggttcaacatacgaaaatcaataaacatagtccagcatataaacagaaccaatgacaaaaaccacatgattatctcaatagatgcagaaaaggcctttgacaaaattcaacaacgcttcatgctaaaaactctcaataaattaggtattgatgggacgtatctcaaaataataagagctatctatgacaaatccacagccaatattgtactgaatgggcaaaaactggaagcattccctttgaaaactggcacaagacagggatgccctctctcaccacttctattcaacatagtgttggaagttctggccagggcaatcaggcaggagaaggaaataaagggtattcaattacgaaaagaggaaatcaaattgtccctgtttgcagatgacatgattgtacatctagaaaaccccattgtctcagcccaaaatctccttaagctgatagacaatttcagcaaagtctcaggatacaaaatcaatgtgcaaaaatcacaagcattcttatacaccaataacagacaaacagagagccaaatcatgagtgaactcccattcacaattgcttcagagagaataaaatacctaggaatacaacttacaagggacgtgaaggacctcttcaaggagaactacaaaccactgctcaatgacataaaagaggatacaaacaaatggaagaacactccacgctcatgggtaggaagaatcaatatcatgaaaatggccatactgcccaaggtaatttatagattcaatgccatccccatcaagctaccaatgactttcttcacagaattggaaaaaactactttaaagttcatatggaaccaaaaaggagcccgcattgccaagtcaatcctaatttatagattcaatgcccaagaattggaaaaaactactttaaagttcatatggaaccaaaaaggagcccgcattgccaagtcaatcctaagccaaaagaacaaagctggaggcatcacgctacctgacttcaaactatactacaaggctacagtaatcaaaacagcatggtactggtaccaaaacagagatatagaccaatggaacagaacagagccctcagaaataatgccacatatctacaaccatctgatctttgacaaacctgacaaaaacaagaaatggggaaatgattccctatttaataaatggtgctgggaaaactggctagccatatgtagaaagctgaaactggatcccttccttataccttatacaaaaattaattcaagatggattaaagacttaaatgttagacctaaaaccataaaaaccctagaagaaaacctaggcaataccattcaggacatagccatgggcaaggactttatgtctaaaacaccaaaagcaatggcaacaaaagccaaaattgacaaatgggatctaattaatctaaagagcttctgcacagcaaaagaaaccaccatcagagtgaacaggcaacctatagaatgggagaaaatttttgcaatctactcatctgacaaagggcgaatatccagaatctacaatgaactcaaacaaatttacaagaaaaaaacaaacaaccccatcaaaaagtgggcaaaggatatgaacagacacttctcaaaagaagacatttatgcagccaaaagacacatgaaaaaatgctcatcatcactggccattagagaaatgcatatcaaaaccacaatgagacaccatctcacatcagttagaatggcgatcattaaaaagttaggaaacgactggtgctggaggggatgtggagaaataggaagacttttacactgttggtgggactgtaaactagttcaaccattgtggaagtcagtgtggcgattcctcagggatctagaactagaaacaccatttgacccagccagcccattactgggtatatactgggtgtatacccaaaggattataaatcatgctgctataaagatacatgcacacatatgtttattgcagcactattcaccaatagcaaagacttggaaccaacccaaatgtcccatccaatggatagactggattaagaaaaaaatgtagaacatatacaccatggaatactatgcagccataaaaaaatgatgagttcatgtcctttgtagggacatggatgaagctggaaaccatcattctcagcaaactatcgtcagcaaactatcgcaagggcaaaaaaccaaacaccgcatgcttctcactcataggtggggaattgaacaatgagaacacatggacacagggcaggggaccatcacacaatcacacactggggcctgttgaggggtggggggtggggggcaaggggagggatagcattaggagaaatacctaatgcatgcagggcttaaaacctagatgatgggttgacaggttgataggtgcagcaaaccaacatggcacatgtatacctatgtaacaaacctgcacgttgtgcacatgtaccctaaaacttaaagtataataacaaaaataaaataaaataaaaaaggaaaataaataaaaaa

SEQ ID NO: 125833 - DNA, 2988 bp, Homo sapiens
atggatgaaatgagtactcagacacaggtatgcagtgtaagagcagctaggggactggccggctctggtggccaaagtgcagccccgaggagctggagctgcttgctttttattcagtgcaggcacaatgccaaaaacctggagccaacacaaccagcagaagatgagaagggctgttttgaggacaagattcccaacagaagggaatcctttggtggcaagtgtaaacagctttggcagaaagccgccctccaaagaaaaaggacttcagcttgttttaaactacaggacaattcctcctcgcttcaagaagatgaagaagtagagatggaggccatcagctggcaggccagcagtccagccatgaatgggcaccctgcccctccagtgacctctgctcgttttcccagctgggtcacctttgatgacaatgaagtcagctgccctttaccaccagtcacctctcctctgaagccaaatacaccaccaagtgcatctgtgatcccagatgtaccttataattcaatgggatcatttaagaagagggaccgtcccaagagcactttgatgaacttctccaaagttcagaagctggatatttcctctttaaaccgcacgccttctgtaactgaggcttcaccttggagggcaaccaaccctttcctgaatgagactctgcaggatgtacagccctcccctatcaaccctttcagtgctttctttgaggagcaggagaggcgctcccaaaacagttccatttccagtaccacgggcaaaagccaaagagattccctcattgtcatctaccaggatgccatcagttttgatgattcaagcaaaacccagtcacactctgatgctgttgaaaaactcaaacaactccaaattgatgaccctgatcactttggcagtgcaactctacctgatgatgacccagtagcctggattgaactagatgctcacccgcctggatcagcacggtcccagcctcgtgacgggtggccaatgatgttgaggatccctgagaagaaaaacatcatgtcctccaggcactggggaccgatcttcgtcaaactgacagacactggttacctgcagctgtattatgagcagggcctagaaaaaccattccgtgagttcaagctggagatctgtcatgagatttcagaaccccggcttcaaaactatgatgagaatggcagaatccacagcttgcggatagaccgtgtcacctataaagagaagaagaaataccagcccaaacctgctgtggcccacacagcagagagggaacaggtgattaagctgggcaccaccaattacgatgacttcctgagtttcatccatgcagttcaggaccgtctcatggatctgccagtgttgtcaatggacttgagcacagttggcctcaactaccttgaagaggagattacagtggatgtcagagatgaattctctggcattgtgagcaaaggagacaaccagattctccagcaccatgtcttgacacggatccacatcctgagtttcctgtctgggctcgcagagtgccgcctgggcctcaatgacatcctcgtcaaagggaatgaaatagttttgaggcaggacatcatgcccaccaccaccacaaagtggatcaagctccatgagtgccgtttccatgggtgtgtggatgaggatgttttccacaactcacgggtcattctgttcaaccctttggatgcgtgccggtttgagctaatgcggttcaggacagtgtttgctgagaagaccttgcctttcacactcaggacggccacaagtgtcaatggggcagaggtggaggtgcagagctggctgaggatgtcaactggcttctccgccaatcgtgaccccctcactcaggttccctgtgagaatgtgatgatccgttaccctgtgcccagtgagtgggtgaaaaacttccgcagggaaagtgtcctgggggaaaagtctttgaaagccaaagtgaaccggggggcaagttttggctccactagtgtttctggctctgagcctgtcatgagagtaactctgggaactgccaagtacgagcatgccttcaactccattgtgtggaggataaaccgactgccggacaaaaactcagcttccggtcacccacactgtttcttttgccaccttgaactcggctctgaccgggaagtgccttccagatttgccaatcacgtgaatgtcgagttcagcatgcccacaacttctgcctccaaagccagcgtgagatctatctctgtagaagacaagactgacgtcaggaacgtacctgtggtgtttggtgagagttggaagaaacacctcaatggagagttcggaaaactgtattctataaaacgaacgggatttgttgcagaagaaagaaaacattacactgtttatcctccccaacaccaagtcttcacctggacccagatgtgtgacataggaggtgtggaggttgtcatcctgggacaggatccatatcacagaccctatcaagctcacgaagctgctttagtgtccaaaggcctgtgcgatctctgcctagtttggaaaacatgtatgaagagctgcctacagacagatggttttgatcatcctggccatggagatttatctggacccactgagtggaatggcagacaaaataacttgatgggaggggaccgttggagttggccagcccctttctccatggtaaccatgtgcgaccgaaaggccgtgatcaaaaatgcggacatgtcggaggagatgcaacagaactcagtggagtgcgctcctcaggcgctggagaaatacaacatagagaagaacactgcggctcatatcaagaaggaatgtgacaagaagtacaatgccacctggcactgcatcctggggaggaacttcagtagttacgtgacacatgaaaccaaacacttcatctacttctacctgggccaagtggccattcttctgttcaaatctggttaa

SEQ ID NO: 125834 - DNA, 1036 bp, Homo sapiens
  misc_feature (1)...(1036): n = a,t,c or g
gagtatcncaggnngnnnnnaactgagacccnctcgagaccctaggaagngcggtggaattcactaggcggcggcggctggcgtggggctgcttagatgcgccacggtttcggtagcgacggtagctctatccgggcctgagctgtgctagcacctcccccaggagaccgttgcagtcggccagcccccttctccacggtgagaaactcggggggccagggggtgtcctcgctgccttatttcgccccactccggacttagccctccgcgtagcccgcgcttcctgagaagtggggtggggggcgtcgtcccgtggtggcgccggccggggtgggggcagttagtgcctggggggcgcggcccaactcaaccccttaccccaggccttgcccactaggtaaccatgtgcgaccgaaaggccgtgatcaaaaatgcggacatgtcggaagagatgcaacaggactcggtggagtgcgctactcaggcgctggagaaatacaacatagagaaggacattgcggctcatatcaagaaggtgaggatgggcgcgggggccgatacgcagccgggagcagggggttccttccccccgatcctgctttcctaagggcgcctgacaggtcccgggaatactgctggcggcttggggcgtagaagcttccagaaaggacgcagatgcattttgcgctcccagctccgcggggggaaagcgccacctagcaacggtatctaagatcagggagcagcggttcccccttctgtgtggttcctgcgccgaggatccatctgggtgttccggaggggggagctgcgtgggtgtttccagccgggccgggaggagatcttgccagccttccagtggggagttgagggaaggtggtgggtggtggcggggctgggggctggggtaggggcttggtaaatggcagtctagaaagccggcaggactgccaacttctcgagcagtgtttgccgcgtggctaatgttccccaggtccccatcatgcacccgctcagtgcttgttctctctgccat

SEQ ID NO: 125835 - DNA, 803 bp, Homo sapiens
atccttaattaaattaagctcccccccccggggagcagggcggggcctgagcactaggcggcggcggctggcgtggggctgcttagatgcgccacggtttcggtagcgacggtagctctagccgggcctgagctgtgctagcgacctcccccaggagaccgttgcagtcggccagcccccttctccacgggcttgcccactaggtaaccatgtgcgaccgaaaggccgtgatcaaaaatgcggacatgtcggaagagatgcaccaggactcggtggagtgcgctactcaggcgctggagaaatacaacatagagaaggacattgcggctcatatcaagaaggaatttgacaagaagtacaatcccacctgggcattgcattcgtgggggagggaactttcggtagtttatgttgacacattgaaaccaaacactttcatcttacttcttacctgggggccaagtgggccatttctttctgtttcaaattctggtttaaaaggcatgggactgttgccacacacccagtgattcccttccaaaaacaagggattgcagccttaaatttccaattaccagaggattgaaatttttcagccttggttaaggggaacatctcgatgtttggaacctttgttgtgttttgtacagggcattctctgtactagtttgtcgtggttataaaacaattagcagaatagcctacatttgtatttattttctattccatacttctgcccacgttgttttctctcaaaatccattcctttaaaaaataaatctgatgcagatgttaaaaaaaaa

SEQ ID NO: 125836 - DNA, 813 bp, Homo sapiens
atggatggagaggagaaaacctgtggtggctgtgaaggccctgatgcgatgtatgtgaaattgatatcatctgatggccatgaatttattgtaaaaagagaacatgcattaacatcaggcacaataaaaaccacattgggtggcccaggtcagtctgctgtgaatgaaaccaatgaggtcaattttagagagataccttcgcgtgtgctatcaaaagtatgcacgtattttatgtataaggttcgctaccctaacagctccaccgaggttccagagctcccaattgcacctgaaattgcactagaactgttaatggattcagaggactgcctgaagaggaaagctataggagatatacagtgtcgaggaagcacgaacaagccagctaatttagttcaagtgggaataaggacagtttctggcagaagtgactttgaagttataaactactcaatgtcgttaagcccatggggagactggggctgtggaattagccctgaagtcttacaggatacagataggcttcctcgggtatgtctaacctctgcaaaagttcaggtttctggttatggagaaaaatctccattggaaggaatcagctatgttctgccttttgctggagactctcaggaaagttgtccagggtttagggatatgagcaaatggattcatagaaagtatgtaaggttcaaagtggatgtgagagacaaatttgggggcagcttcagatcatggtctctgaagccaaacctgagtttggtttctagctacatgattaaccaacaatttcctcttctgccaattaaccactga

SEQ ID NO: 125837 - DNA, 563 bp, Homo sapiens
ccttcggctcttacccaccggaagtcattctttcgactgccccggaacccaccggagcattttgctggttgtgggggggcggccctgggataggggctgtgggagtacgcggggacccggctgcggtggctgcgggactgacgagaaactactaaagttcctggggaagcaaagtagaatttcataagaacaaaatggatggagagaggagaaaacctatggtagctgtgaaggccctgatgccatgtatgtcaaattgatatcatccgatggccatgaatttattgtaaaaagagaacatgcattaacatcaggcacgataaaagccatgttgagtggcccaggtcagtttgctgagaacgaaaccaatgaggtcaattttagagagataccttcacatgtgctatcgaaagtatgcatgtattttacgtacaaggttcgctacactaacagctccaccgagattcctgaattcccaattgcacctgaaattgcactggaactgctgatggctgcgaacttcttagattgttaaataaaataaattataataaactgttaac

SEQ ID NO: 125838 - DNA, 1191 bp, Homo sapiens
atgagctttgtatcacatatagcttcagggaaggaggcaaatattatcccaactggaagagaagcagtaccaatggatgaccctagacgggatcctaatgatgaggtggaagcctggaagaggagacactttcaggagtgcataatggaaggcttatgtagaactaggaccaagcctctcaattacactaagttgtccatgattgaccagagatttgatggaaaccccactgccttcctggagaagataagagaggccctgcctcaagaccctagcgggcagggacacaagctgctggatatcgagaggaatacatccgcggaagaagatgcaagcagctggacgtcaagaggacgtcgaggggagcaaaccagtggaagagcacacgacgctggcacaccggcaggccatcagagttcggccgggaaataccaaagcacaatcaacccatcaaacgaaaaaaacaacaacagcctaaaagacaaggttgatgtggaggagaaaaaaaagaccagccaacacttagggaaaatagaaagaacctacgttgaaatattggggaatggttcccctgataactttgtgtactcccatggtgttaatcagggcttatggtattgcactaagcaggatgaaaaatttgtgagaactttgagatcattttttactgcaatacacaatttattggagagacaacttgctcctgtggagatgattaatgtcacaaggtggattttaagtggatactcactacacaaatgggtaacaggtaggggctgcaacagtttggagggctcagaagaagacaggaagatttgtgaggctttgaatcatcttagagacttgttgaatggttttggccaaaatgctgatagtgatatagacaatgaaattcaggctgaagtggtctcagatggagatgtgcaacttcttgggaactggagcaaaggtcgctcttgccatgctttagcaaagagactggcggcattttgcccctgccctagagatctgtggaattttgaacttcagagacataagttagggtgtcgggatgaaagagagagtggagaaggatgtattcttcgcctgctacatcttgaacacagcaaccacgagcagtcttcatcccatgaccgctgcccccgccttgtttccacagacccaagctcctgcagtgctcgagtcacatga

SEQ ID NO: 125839 - DNA, 1140 bp, Homo sapiens
atgacatcactctgcattttaattatcagcagaatgtcaatcagggacttttctaattctttacagaatggcatagaatcaggaaatgaaactacatcctacttatcaacttgcatgtttagtgatggggttagagatcccatgctcaagggccagaagaagaaagaaggaagaaggaagaagaagaagaatgaggaggaggaggagaaggagaagaagaagaggaagaaggagaaggagaaggagaagaagcagaaggagaaggagaaggagaagaaaaaggagaaggagaagaaaaaagagaagaagaagaagactagagaaattagagaaacacacacacatttacctaatcctcaacatgctttggccagggagaacttactctggagagggaaatgctatagacagcaggctgcagagccagactctcgaattcaaatggcctccaggggacaaaggactcgcaggcttttgagtccagaggttggagtggagtatgatgtatccaggtccattgctggggcaggccagttggtgttggccatagatgccagctccctgttattagaaagcgcacggttcttcttctatgcatttgttctcctggctggtagtttgggctgtgacttacaatacgatgttggccattcattcaataaatattttttgagtgtggagctacctgactttctgtccctgactgagattattcagcagcgtacacacctctgtctaacttgcctaagaaaaagcgacgataaggacgctttcatccatttgctcgacttctctgagtggactctggacagcgctgtttgggagcctacttctcatatcactgtcgaaggtgtcagctgtccagaaaactgccgagagaaaataacactgagattagctaaatgcagatggccacctgatatactcaatgctcactatgatatactcaatgctcacaatgatatactcaacgctcacaatgatatactcaacgctcacaatgatatactcaacgctcacaatgatatactcagtgctcacaatgatatactcaatgctcacaatgatatactcaatgctcacaatgatatactgtacaacaggatgtgccacagtctctttgctatgagcatagagtga

SEQ ID NO: 125840 - DNA, 475 bp, Homo sapiens
  misc_feature (1)...(475): n = a,t,c or g
catcgagttcactancncgagcggaggaattctgggaacatggcgctgcgagtggagcggagcgtgcgggccgtgctctgcagcctgcacgtggtcctggcacctgccgcgccctgcctatcgaggccctggcagcttgggatgggcgccgtctggttactgtaatctgcctgaagttgggacaaaattgaacaaacaagatgagtttggtgctttggagagagtgaaagctgctagtgaactctattctcctttatcaggagaagtaaccgaaattaatgaagctcttgcagaaaatccaggacttgtaaacaaatctcgttatgaagatggttggctgatcaagatgacactgagtaacccttcataactagatgaacttatgagtgaagaagcatatgagaaatacataaaatctattgaggagtgaaaatggaaccactaaataagctagtatgaaataacgcaacccagc

SEQ ID NO: 125841 - DNA, 1192 bp, Homo sapiens
ggctccctccggccgcgaactgcccctccccgccccgcctcccggcgcgggtggccgaggcgtagcgccgcgacccccgcacccctgcgaacatggcgctgcgagtggtgcggagcgtgcgggccctgctctgcaccctgcgcgcggtcccgttacccgcccgcgccctgcccgccgaggccctggcagctgggggtgggcgccgtccgtacgctgcgcactggaccccgctctgctctcggtgcgtaaattcacagagaaacacgaatgggtaacaacagaaaatggcattggaacagtgggaatcaggcaattttgcacagrgaagcgttgggagatgttgtttattgtagtctccctgaagttgggaccaaaatttgaaccaaaccaagctggagtttggtgcttttggaaaggtgtgaaagctgctagtgaactctattctcctttatcagggagaagtaactgaaattaattgaagctctttgcagaaaatccagggacttgtaaaacaaatttttgttatggaagatggttggctgatcaagatgacactgagtaacccttcagaacctagatgaacttatgagtgaagaagcatatgagaaatacataaaatctattgaggagtgaaaatggaactcctaaataaactagtatgaaataacgcaagccagcagagttgtcttaaattagtggtgggataggaagacttaggaataggaaacttttagtattacccgatggggggaaaaaaaaactactgttaacactgctaatgaaagaaaaatgccctttaactttctaatgattataggataaatataatatgcgtctttttcacaatatcccatgatttttagactagggctctagtattcatgaaattatccatgaaattatccatgggtaaaaacctaagttataaaaattacataattccaaagataacattgttattcttaagccttatataatattgtaacttgcatgtatccatacctggatttgggatgaaatacttaatgatctttccattggaaataactggaagtgaagaggttttgttgcttgtacagtgtcagatgaggaacaccactatcttaattttgcgatacactgcatttgctggtgctatttttatacagtgaagcaacagctttgcagcaaaataataaaatacttcttcgtt

SEQ ID NO: 125842 - DNA, 758 bp, Homo sapiens
cacttggtaagattggtgtcttcttggttcatccttgccctgcagaagtggatcatagacctggccatgtcatcctggatgcacctttatcatcacgtttgccagactgcattattattaaggatttattccctcagcaaggatttgttgagtgccggccaggtgccagcactgtcacaggtcctggggacccagcaggaaacagaccgagtgttccccatgagctttccttctccaggggagacagaaggtgtcaccttgtctcccttcggtctacactcaacccagagactggagtttcagctgctgaagaggctgatgctggcagggctggtggtggtcagcgtcgaggatgctgtgagagcagcaggcttatttcctgggtgacagagactgcgtctcagaagagtgtcgaagaaaggagaagagggaggaaggaggaagacaagggaggagggaagatgagggaggaggagggaggaggaggaggagaagaagaagaaataatattttctaagtttcctttgctactcaagaaaaaagaaaaagttcatatcactcagtcacacactatggaatccatgtcattcacctaccagcgttcctctacttctctcaatattgccactaagccttccagttctcacacgctccttgactctgattctgactcagaagaagaatctttgccttacttacccatttcatcggaacctaatggtacagactcagttaaaaataaactgctgcatgaataa

SEQ ID NO: 125843 - DNA, 407 bp, Homo sapiens
  misc_feature (1)...(407): n = a,t,c or g
ggttgacttccgatcacaaagtggggaaaatggaagccctaattcagcttctttatctccattcctttcaggcgctgccacattttttcagtctgttctcctgtaagatacttaaaagtggtgttttccaattcttcaatctctgtggcactagaccccatgatgatgctcctgggaggagttgagagacttctcacaggaggtttcatttaaactggaactgaaagtatgagtaggcattttcttgtttgactgtaggtcatcatgagaggtgacacccggnnnnnnnnnnnnnnnnnnnnnnnnnnnnnnnnnnnnnnnnnnttcagcccgcagctgcaccgtgggagcccttttctgggnnnnnnnnnnnnnnnnnnnnnnnnnnnnnnnnncgaggagaagtg

SEQ ID NO: 125844 - DNA, 1763 bp, Homo sapiens
cccacgcgtccgcccacgcgtccgaagtcattcacgtttctcttgtgcataatagagctcgtaaactgtaggaattctgatgtgcttcagtgcacagaacagtaacagatgagctgcttttggggagagcttgagtactcagtcggagcatcatcatggggtctagtgccacagagattgaagaattggaaaacaccacttttaagtatcttacaggagaacagactgaaaaaatgtggcagcgcctgaaaggaatactaagatgcttggtgaagcagctggaaagaggtgatgttaacctcgtcgacttatagaagaatattgaatatgcggcatctgtgctggaagcagtttatatcgatgaaacaagaagacttctggatactgaagatgagctcagtgacattcagactgactcagtcccatctgaagtccgggactggttggcttctacctttacacggaaaatggggatgacaaaaaagaaacctgaggaaaaaccaaaatttcggagcattgtgcatgctgttcaagctggaatttttgtggaaagaatgtaccgaaaaacatatcatatggttggtttggcatatccagcagctgtcatcgtaacattaaaggatgttgataaatggtctttcgatgtatttgccctaaatgaagcaagtggagagcatagtctgaagtttatgatttatgaactgtttaccagatatgatcttatcaaccgtttcaagattcctgtttcttgcctaatcacctttgcagaagctttagaagttggttacagcaagtacaaaaatccatatcacaatttgattcatgcagctgatgtcactcaaactgtgcattacataatgcttcatacaggtatcatgcactggctcactgaactggaaattttagcaatggtctttgctgctgccattcatgattatgagcatacagggacaacaaacaactttcacattcagacaaggtcagatgttgccattttgtataatgatcgctctgtccttgagaatcaccacgtgagtgcagcttatcgacttatgcaagaagaagaaatgaatatcttgataaatttatccaaagatgactggagggatcttcggaacctagtgattgaaatggttttatctacagacatgtcaggtcacttccagcaaattaaaaatataagaaacagtttgcagcagcctgaagggattgacagagccaaaaccatgtccctgattctccacgcagcagacatcagccacccagccaaatcctggaagctgcattatcggtggaccatggccctaatggaggagtttttcctgcagggagataaagaagctgaattagggcttccattttccccactttgtgatcggaagtcaaccatggtggcccagtcacaaataggtttcatcgatttcatagtagagccaacattttctcttctgacagactcaacagagaaaattgttattcctcttatagaggaagcctcaaaagccgaaacttcttcctatgtggcaagcagctcaaccaccattgtggggttacacattgctgatgcactaagacgatcaaatacaaaaggctccatgagtgatgggtcctattccccagactactcccttgcagcagtggacctgaagagtttcaagaacaacctggtggacatcattcagcagaacaaagagaggtggaaagagttagctgcacaagaagcaagaaccagttcacagaagtgtgagtttattcatcagtaa

SEQ ID NO: 125845 - DNA, 627 bp, Homo sapiens
atggggtctagtgccacagagattgaagaattggaaaacaccacttttaagtatcttacaggagaacagactgaaaaaatgtggcagcgcctgaaaggaatatatgtggttcagatatgcagaaaggtaactaagaaagccatttgccgggatactgccacaaataaaatttccctcagccagtgggcccttaccaaatgtgacacaatcaaaggcttagaaagggcttatgcactggagtttaagctctctggaaccctcaaactggcgtgtgaagaagcctgccagtgggcccttaccaaatgtgacacaatcaaaggcttagaaagggcttatgcactggagtttaagctctctggaaccctcaaactggcgtgtgaagaagcctggaaaaggctaaagccaagagactgtgactggagctgcctttgtcagcaaggagaaagaagatccaatgggcttgtactaatgtcaggggcacgtgtccctctgccggccacgtgcaccttagaaagaagtcagcctggaccaattcaagagatcctgcctaagatgactgcctggaagtgccgagcacccccgacagagtggaccactgaagctagggatgagaaagggagtccttaa

SEQ ID NO: 125846 - DNA, 478 bp, Homo sapiens; identical to SEQ ID NO: 115331
  misc_feature (1)...(478): n = a,t,c or g

SEQ ID NO: 125847 - DNA, 171 bp, Homo sapiens
ctagtctccagtgatgatgagcttttttctttttgtgtgtttgttgaccacataaaggtccccttcttcttcttcttcttcttcttcttcttcttcttcttcttcttcttcttcttcttcttcttctccttctccttcctcttctttttctgggtctgttgtataatgcat

SEQ ID NO: 125848 - DNA, 201 bp, Homo sapiens; identical to SEQ ID NO: 118054

SEQ ID NO: 125849 - DNA, 403 bp, Homo sapiens
cctgccccgatcacctccccttcctgattgttagtccttttgtttctccaggaagtctcttctcatccctgttcacgccttcatgtaacaagcatttatcacactagtaccgtgagccacgcgtgtgctgtggttacatccgtggaacagacagacagcagtgcctgatcttgtaattcttccatcctttcattcctttctctcagtctcgtagctgatccacagattgcaacgtacagatgtgatgttccaggcttggccacaaggggacactgttgccaggttcctgagagtgcttggggaaaatgtgggcgagagaggcacagcacagtcctccggcttggtaggtttcaagctcttttgactgggctggcgctgacatttgcaggggcagctgctgtgg

SEQ ID NO: 125850 - DNA, 429 bp, Homo sapiens; identical to SEQ ID NO: 118058

SEQ ID NO: 125851 - DNA, 282 bp, Homo sapiens; identical to SEQ ID NO: 117047

SEQ ID NO: 125852 - DNA, 377 bp, Homo sapiens
aagaagaagaagaagaagaagaagaggaagaggaagaggaagaggaagaagaagaagaagaagaagaagaagaagaagaagaagaagaagaagaagaagaagaagaaaggtcagttgctcatgtggaacccagaacaggctacttgttcaatagtcaacagacactgaacacctatcatgtgagaggcacagatccaggtacttgggataaatcagtacacagaatagcaaaggcaagaatagtcaacatcaaccatgattttcaaatatcccatcggatatcatcaagatcaaccctttctcttcctcctcctcagcctactcaacatgaagacaatgaggatgaagaactctatgataatccacttccacaatga

SEQ ID NO: 125853 - DNA, 939 bp, Homo sapiens
atggtagatgtcaagcattactggaactctgccaatgtccctgttgagcaagcccagagtagcacagagtcagcccaggatgcctacatggacggacagggccagcgaggagatattatcagccagtctggactcagcaactccaccgagagcctggacagtatgaaggctctgacagccgccatcgaagctgcaaacgcccagatccatggccctgccagtcaacacatgggcaataacactgccaccgtcaccaccacgactaccatagccaccgtcaccacgggggacaggatagaaggaccactttaagaaaaatcgatgcctgtctatcgggatacaggtggatgatgctgaagaacctgacaaaacaggggagaataaagcacccagtaagttccagtccgtgggagtgcaagtagaagaagagaagtgcttccgcaggttcactcgatccaacagtgtgacgacagcagtacaggccgacctgggacttccatgataatctggaaaattctctggaatctatagaggacaattcgtgtcctggccccatggccagacagttctcccgcgatgccagcacctccacagtcagcattcagggctcaggaaaccattaccatgcctgtgccgccgatgatgactttgacacggattttgacccctctattctgcctcctccggacccctggattgactctatcactgaagaccctctggaggccgtgcaaaggtcagtgtgccaccgggatggccactggttcctgaagcttctccaggcagagcgagaccgcatggaggggtggtgtcaacagatggagcgggaagaacgggaaaacaacctgcccgaagacagaggcaaggttgttgaagatgagggaataggggttgagttgagaatggataagattcaggaaattagagttagagagggag

SEQ ID NO: 125854 - DNA, 2456 bp, Homo sapiens
ttctttttcctttgtaagaatccacttcaaattcagtttcttcttactatacttttctgatgcttcactgcagctgccatggggcttttataagctgggaatgggttaagcatagtcccagctgttcattcagccacgatgttggcaggagttagcttctttacacataaagttggcatcaaatttggaattcacaatcactagttcacgaacgtcacaggcatttcttaggcgctttcttatataaatggaaataccattaactttcttcttcatgcacgctctctgacagcatcgggtcaaaggaacttttttcctgcctcttttcatagcttccaccgccccatccttcttctaaatctttaattttgcaaagccatagggagtggtggtagcctgtggcgagttgaagattttgaacaataggtgtttctgagctggatttattgaaagggtcttgtctgtgtcctgttgccaggttcctgagagtgcttggggaaaatgtgggcgagagaggcacagcacagtcctccggcttggtaggtttcaagctcttttgactgggctggcgctgacatttgcaggggcagctgctgtggattgcctgcgcattgtttggctgtagttctttccattcttcctccttgctgagaacaatgttgcgtttgattagcagcgcagccagtgctttctgaaagatctgctctccccagaagaggcggctgctatcagttgaatagatctcatggtagatgtcaagcattactggaactctgccaatgtccctgttgagcaaggtatccagagttatccctatcgatagcgaagatgagctgacaacagccaccaggtggcgtccaattgcagttggcctggggagtgtaggagccgcactggaggctcagtccccaagcttccgcaggttcactcgatccaacagtgtgacgacagcagtacaggccgacctggacttccatgataatctggaaaattctctggaatctatagaggacaattcgtgtcctggccccatggccagacagttctcccgcgatgccagcacctccacagtcagcattcagggctcaggaaaccattaccatgcctgtgccgccgatgatgactttgacacggattttgacccctctattctgcctcctccggacccctggattgactctatcactgaagaccctctggaggccgtgcaaaggtcagtgtgccaccgggatggccactggttcctgaagcttctccaggcagagcgagaccgcatggaggggtggtgtcaacagatggagcgggaagaacgggaaaacaacctgcccgaagacaacacagttccattccacaaacacttgaaggctttctctattttttcatactttgagagacacgaaataggagcttcaaactactgggattccaaaattctagtcagtgccgtggcaaaccctgcgcccaggacagagtcaccaatttcaaatgcggccaatccagatcagggagaattggaccataaagcagtagcaaccctctccaggaagaagggaaaatatcagtgcatgaaagaatattcatcttgccctcacaatacccctgacgatggcctagagactttgacaggtagactttgcttctgggagcatctgcgggaaaccgctatttttggttcttatgagaggcaggaagagcgttcagtgagtactacctggttcagagaaaatgacgcggcagaaatgagctgccagcagggccaggctgtcggctttgaaattccagaggcctgcccagcccttttggtttcctggaatgctttcattcagtcgtcatgcggtgaggaaaaaccctgcaacatcagtgttgagctggaagaatatctcatctgccgtcaggggacagcggcccagggcgacaggcacacatccctgcctgtgctcagcggcacagtcaatggaccgcggggcaggggcacgcaggctcgcccagcagcagtgtcagacctatgcgcacaaacagacggttcacgcccaggtcacaggcgcccgttgtctcctggccagaggttgacgcacaggccaaccgttggacaggctcatgctctgtgtcatgagaaaggtggagcagagaaagggcctaaatgtgccttacttccgctgctggagcggtggaatgtggcagcagctgtctggatgatgtggaagcccagcacgaggaggagggaggaaaagtaccagatcccactgaaccgaaatagaattgaagaagaagaagaaagaaaggactgtgaagaagaaagaaagaaggactgcgaagaagaagaagaaagaagaaagaagaagaagaagaagaagaagaagaagaagaagaagaagaagaagaagaagaagaagaagaagaagaagaggaaagaaagacggactgccaagcctaagagttggtgtcctgtggcataa

SEQ ID NO: 125855 - DNA, 315 bp, Homo sapiens
atggcctccatctccgagctcgcctgcatctactcagccctcattctgcacgacaatgaggtgactgtcacagagtataagatcaaggccctcattaaagcagctggtgtaaatgttgaaccttttcggcctggcttgtttgcaaaggccccggccaatgtcaacattaggagcctcatctgcaatgtaggggctggaggacctgctccagcagctggtgctgcaccagcaggagctgaggagaagaaaatggaagcaaagaaagaagaatttgaggactctgatgatgacatgggctttggtctttctgactaa

SEQ ID NO: 125856 - DNA, 440 bp, Homo sapiens
cggacgcgtggggccgccaaggtgctcggtccttccgaggaagctaaggctgcgttggggtgaggccctcacttcatccggcgactagcaccgcgtccggcagcgccagccctacactcgcccgcgccatggcctctgtctccgagctcgcctgcatctactcggccctcattctgcacgacgatgaggtgacagtcacggccctggccaacgtcaacattgggagcctcatctgcaatgtaggggccggtggacctgctccagcagctggtgctgcaccagcaggagggcctgccccctccactgctgctgctccagctgaggagaagaaagtggaagcaaagaaagaagaatccgaggagtctgatgatgacatgggctttggtctttttgactaaacctcttttataacatggttcaataaaagctgaactttagag

SEQ ID NO: 125857 - DNA, 428 bp, Homo sapiens
tccgcgtcgacgatttcgtccaaggtgctcggtccttccgaggaagctaatgctgcgttgtggtgaggccctcacttcatccggcgactagcaccgcgtccggcagcgccagccctacactcgcccgcgccatggcctctgtctccgagctcgcctgcatctactcggccctcattctgcacgacgatgaggtgacagtcacggaggataagatcaatgccctcattaaagcagccggtgtaaatgttgagcctttttggcctggcttgtttgcaaaggtaaggtgatggtggcaaagtgattgtggtaaggcctgctgatttacgagggcagttgtacatgctaaagtacccccagcggtgccataacgccccacatgccgctggatctcctaggtgtttttcgttgcatgtatatctctaggagct

SEQ ID NO: 125858 - DNA, 423 bp, Homo sapiens
atggttgattctggacctgagacaggcaaaatgcaagatgagcctgaaatacctgaagctacggtggcggcacatctacccagggcctgtacaagtacacgtagaaaggaagcccaaacccttttcctttgtcacattcccacttccaacccttgtctccctggaagcccagaactagcccaagtacaaatgccgctgcagccttctcggcaggccctggccaacgtcaacattggaagcctcatctgcaatgtaggggctggtggacctgctctagcagctggtgctgcaccagcaggaggtcctgccccctccattgctgctgcttcagctgaggagaagaaaatggaagcaaagaaagaagaatctgaggagtctgatgatgacatgggctttggtctttttactaaacctgttttataa

SEQ ID NO: 125859 - DNA, 709 bp, Homo sapiens
  misc_feature (1)...(709): n = a,t,c or g
gacgcactntccggatcgacccacgcgtccgtgccgccaatgtgctcggtccttccgaaggaagctaaaggctgccgttggggttgagggcccctcactttcatccggcgaactaggcacccgcgtcccggcagcgcccagccctacaactcgcccgcgcgcaatggccttctgtctcccgagcttcgcctgcatcctactcggccctcattctgcacgacgatgagggtgacaagtcacggaggataagatcatatgccctcattaaaagcagccgggtgtaaatgttgagccctttttggcctggcttgtttgcaaaggccctgggccaacgtcaacaatggggagcctcatctgcaatgtaggggccggtggaccttgctgcccagccagctgggtgctgcaaccagcagggaggtccctgccccctccactgctggctgcttccagcttgagggagaagaaagtgggaagcaaagaaagaaggattccgagggagttttgattgattgacatggggctttgggtctttttgactaaaacctcttttataaacatgtttcaataaaaaagctggaactttactgctgttggtcttgtccatagttttggaatgtgctctgcaaaaatggtctggtttgtaatgttggctttcagcctattctgccatgacacaggctggattttccctgccaccattgccggatgt

SEQ ID NO: 125860 - DNA, 451 bp, Homo sapiens
tcttccacagctttgccaagacttggacactcagcccagtaggtcagcagacttacatgaaatgaggatggtcccaccagccttagatttggggggattaattgagttagtgacgtgtggcctgctggcagtcccatggtggcagcctcctcctgagtggctctggatggccctccccagcccccttagctgctgcagtagctcctcagccctgggtccttggattcaccctgccgtctgtctcccagggcaagaagtacaagcccctggacctgcggcctaagaagacacgtgccatgcgccgccggctcaacaagcacgaggagaacctgaagaccaagaagcagcagcggaaggagcggctgtacccgctgcggaagtacgcggtcaaggcctgaggggcgcattgtcaataaagcacagctggctgagaaaaaaaaaaaaaaaaaaa

SEQ ID NO: 125861 - DNA, 636 bp, Homo sapiens
gggcgattcgacggctgaggatttcggcacgagaagaagagagagagaaccagccccgcctacttcctctttccctcggagcgggcggcggcgttggcggctttgtgcagcaatggccaagattcaaggctcgagatcttcgcgggaagaagaaggaggagctggttgaaacagctggaacgacctgaaggtggagcttgtcccatctgcgcgtcggcaaaagcgacagggcggtgcggcctcccaagctctctaagatccgaggtcgtccggaaatccattgcgccgtgttctccccggttatttacccagactcagaaagaaaacctcaggaaattttacaagggcaagaagtacaagcccctcggacctgcggcctaagaagacacgtgccatgcgccgccggctcaacaagcacgaggagaacctcgaggaccaagaagcagcagcggaaggagcggctgtacccgctgcggaagtacgcggtcaaggccttagggggcgcattgtcaataaagcacaaggagaacctgaagaccaagaagcagcagcggaaggagcggctgtacccgctgcggaagtacgcggtcaaggcctgaggggcgcattgtcaataaagcacagctggctgagaaa

SEQ ID NO: 125862 - DNA, 370 bp, Homo sapiens
aggatttttagtattttaatataatacagttccaatcagtgtgtctggttcatttcagttccttcactgccaaaccggggggcagggactgcttcagtttctctgccttctctttgtcagtgatgaccagggtgtaaaggtatctgctgcatcgaactttaaacttcacgttgtccttatgtttcttgatcttgacagatttggcatcctttcgtcgggctgtgagcaggaagtccttgatttcctcaattttccgaggcatgaagacgaggcgcgttgggctctggcgcggaccaggacctttctcaccctcgtatcaccatagagacactcacctcgtgcagaagtctacagacgtcaagtccccgcc

SEQ ID NO: 125863 - DNA, 9466 bp, Homo sapiens
gccgtggctccggtagcagcaagttcgaaccccgctcccgctccgcttcggttctcgctccttcggcccttgggcctccaaacaccagtccccggcagctcgttgcgcattgcgctctccccgccaccaggatgccggtaaccgagaaggatctagctgaggacgcgccttggaagaagatccagcagaacacgttcacacgctggtgcaacgagcacctcaagtgcgtgaacaaacgcatcggcaacctgcagaccgacctgagcgacgggctgcggctcatcgcgctgctcgaggtgctcagccagaagcgcatgtaccgcaagtaccatcagcggcccacctttcgccagatgcagctcgagaatgtgtccgtggcgctcgagttcctggaccgtgagagcatcaagctcgtgtccatcgatagcaaagccattgtggatgggaacctgaagctcatcttgggtctggtgtggacgctgatcctccactactccatctccatgcccgtgtgggaggatgaaggggatgatgatgccaagaagcagacgccaaagcagaggctgctggggtggattcagaacaagatcccctacttgcccatcaccaactttaaccagaactggcaagacggcaaagccctgggagccctggtagacagctgtgctccaggtctgtgcccagactgggaatcctgggacccgcagaagcctgtggataatgcacgagaagccatgcagcaggcagatgactggctgggtgtcccacaggtcatcactcctgaagaaatcattcacccggatgtggacgagcactcagttatgacttacctgtcccagttccccaaagccaagctcaagccgggggctcctctcaaacccaaactcaacccgaagaaagccagggcctatggcagaggaatcgagcccactggaaacatggtgaagcagccagccaagttcactgtggacaccatcagcgccgggcaaggagacgtgatggtgtttgttgaggacccagaagggaacaaagaggaggcacaagtgacccctgacagtgacaagaacaagacatactctgtggagtatctgcccaaggtcaccgggctacacaaagtcacagtcctctttgcaggacagcacatctccaagagcccatttgaagtgagtgttgacaaggcccagggagatgccagtaaagtcactgcaaaaggtccagggttggaagctgtagggaacatcgccaataagcccacctactttgacatctatacggcaggagctggtgtgggtgacattggtgtggaggtggaagatccccaggggaagaacaccgtggagttgctcgtggaagacaaaggaaaccaggtgtatcgatgtgtgtacaaacccatgcagcctggccctcacgtggtcaagatcttctttgctggggacactattcctaagagtcccttcgttgtgcaggttggggaagcctgcaatccaaatgcctgccgggccagtggccgaggcctacaacccaaaggcgtccgtatccgggagaccacagatttcaaggttgacaccaaagctgcaggaagtggggagctcggtgtaaccatgaagggtcctaagggtctggaggagctggtgaagcagaaagactttctggatggggtctacgcattcgagtattaccccagcaccccggggagatacagcattgccatcacatgggggggacaccacattccaaagagcccctttgaagttcaagttggccctgaagcgggtatgcagaaagtccgtgcttggggccctgggctccatggtgggattgtcgggcggtcagcggacttcgtggtagaatccattggctctgaagtggggtctctggggtttgccattgaaggcccctctcaggcaaagattgagtacaacgaccagaatgatggatcgtgtgatgtcaaatactggcccaaggagcctggcgaatatgctgttcacatcatgtgtgacgacgaagacatcaaggacagcccgtacatggccttcatccacccagccacgggaggctacaaccctgatctggttcgagcatacgggccaggtttggagaaatctggatgcattgtcaacaacctggccgagttcactgtggatcctaaggatgctggaaaagctcccttaaagatatttgctcaggatggggaaggccaacgcattgacatccagatgaagaaccggatggacggcacatatgcatgctcatacaccccggtgaaggccatcaagcacaccattgctgtggtctggggaggcgtgaacatcccgcacagcccctacagggtcaacatcgggcaaggtagccatcctcagaaggtcaaagtgtttgggccaggtgtggagagaagtggtctgaaggcaaatgaacctacacacttcacggtggactgtactgaggctggggaaggtgatgtcagtgttggcattaagtgtgatgcccgggtgttaagtgaagatgaggaagacgtggattttgacattattcacaatgccaatgatacgttcacagtcaaatatgtgcctcctgctgctgggcgatacactatcaaagttctctttgcatctcaggaaatccccgccagccctttcagagtcaaagttgacccttcccacgatgccagcaaagtgaaggcagaaggcccagggctcagcaaagcaggtgtggaaaatgggaaaccgacccacttcactgtctacaccaagggggctgggaaagccccgctcaacgtgcagttcaacagccctcttcctggcgatgcagtgaaggatttggatatcatcgataattatgactactctcacacggttaaatatacacccacccaacagggcaacatgcaggttctggtgacttacggtggcgatcccatccctaaaagccctttcactgtgggtgttgctgcaccgctggatctgagcaagataaaactcaatgggctggaaaacagggtggaagttgggaaggatcaggagttcaccgttgataccaggggggcaggaggccaggggaagctggacgtgacaatcctcagcccctctcggaaggtcgtgccatgcctagtgacacctgtgacaggccgggagaacagcacggccaagttcatccctcgggaggaggggctgtatgctgtagacgtgacctacgatggacaccctgtgcccgggagcccctacacagtggaggcctcgctgccaccagatcccagcaaggtgaaggcccacggtcccggcctcgaaggtggtctcgtgggcaagcctgccgagttcaccatcgataccaaaggagctggtactggaggtctgggcttaacggtggaaggtccgtgcgaggccaaaatcgagtgctccgacaatggtgatgggacctgctccgtctcttaccttcccacaaaacccggggagtacttcgtcaacatcctctttgaagaagtccacatacctgggtctcccttcaaagctgacattgaaatgccctttgacccctctaaagtcgtggcatcggggccaggtctcgagcacgggaaggtgggtgaagctggcctccttagcgtcgactgctcggaagcgggaccgggggccctgggcctggaagctgtctcggactcgggaacaaaagccgaagtcagtattcagaacaacaaagatggcacctacgcggtgacctacgtgcccctgacggccggcatgtacacgttgaccatgaagtatggtggcgaactcgtgccacacttccccgcccgggtcaaggtggagcccgccgtggacaccagcaggatcaaagtctttggaccaggaatagaagggaaagatgtgttccgggaagctaccaccgactttacagttgactctcggccgctgacccaggttgggggtgaccacatcaaggcccacattgccaacccctcaggggcctccaccgagtgctttgtcacagacaatgcggatgggacctaccaggtggaatacacaccctttgagaaaggtctccatgtagtggaggtgacatatgatgacgtgcctatcccaaacagtcccttcaaggtggctgtcactgaaggctgccagccatctagggtgcaagcccaaggacctggattgaaagaggcctttaccaacaagcccaatgtcttcaccgtggttaccagaggcgcaggaattggtgggcttggcataactgttgagggaccatcagagtcgaagataaattgcagagacaacaaggatggcagctgcagtgctgagtacattcctttcgcgccgggggattacgatgttaatatcacatatggaggagcccacatccccggcagccccttcagggttcctgtgaaggatgttgtggaccccagcaaggtcaagattgccggccccgggctgggctcaggcgtccgagcccgtgtcctgcagtccttcacggtggacagcagcaaggctggcctggctccgctggaagtgagggttctgggcccacgaggcttggtggagccagtgaacgtggtggacaatggagatggcacacacacagtaacctacaccccatctcaggagggaccttacatggtctcagttaaatatgctgatgaagagattcctcgcagtcccttcaaggtcaaggtccttcccacatatgatgccagcaaagtgactgccagtggccccggccttagttcctatggtgtgcctgccagtctacctgtggactttgcaattgatgcccgagatgccggggaaggcctgcttgctgttcaaataacggaccaagaaggaaaacccaaaagagccattgtccatgacaataaagatggcacgtatgctgtcacctacatccccgacaagactgggcgctatatgattggagtcacctacgggggtgacgacatcccactttctccttatcgcatccgagccacacagacgggtgatgccagcaagtgcctggccacgggtcctggaatcgcctccactgtgaaaactggcgaagaagtaggctttgtggttgatgccaagactgccgggaagggtaaagtgacctgcacggttctgaccccagatggcactgaggccgaggccgatgtcattgagaatgaagatggaacctatgacatcttctacacagctgccaagccgggcacatatgtgatctatgtgcgcttcggtggtgttgatattcctaacagccccttcactgtcatggccacagatggggaagtcacagccgtggaggaggcaccggtaaatgcatgtccccctggattcaggccctgggtgaccgaagaggcctatgtcccagtgagtgacatgaacggcctgggatttaagccttttgacctggtcattccgtttgctgtcaggaaaggagaaatcactggagaggtccacatgccttctgggaagacagccacacctgagattgtggacaacaaggacggcacggtcactgttagatatgcccccactgaggtcgggctccatgagatgcacatcaaatacatgggcagccacatccctgagagcccactccagttctacgtgaactaccccaacagtggaagtgtttctgcatacggtccaggcctcgtgtatggagtggccaacaaaactgccaccttcaccatcgtcacagaggatgcaggagaaggtggtctggacttggctattgagggcccctcaaaagcagaaatcagctgcattgacaataaagatgggacatgcacagtgacctacctgccgactctgccaggcgactacagcattctggtcaagtacaatgacaagcacatccctggcagccccttcacagccaagatcacagatgacagcaggcggtgctcccaggtgaagttgggctcagccgctgacttcctgctcgacatcagtgagactgacctcagcagcctgacggccagcattaaggccccatctggccgagacgagccctgtctcctgaagaggctgcccaacaaccacattggcatctccttcatcccccgggaagtgggcgaacatctggtcagcatcaagaaaaatggcaaccatgtggccaacagccccgtgtctatcatggtggtccagtcggagattggtgacgcccgccgagccagagtctatggccgcggcctgtcagaaggccggactttcgagatgtctgacttcatcgtggacacaagggatgcaggttatggtggcatatccttggcggtggaaggccccagcaaagtggacatccagacggaggacctggaagatggcacctgcaaagtctcctacttccctaccgtgcctggggtttatatcgtctccaccaaattcgctgacgagcacgtgcctgggagcccatttaccgtgaagatcagtggggagggaagagtcaaagagagcatcacccgcaccagtcgggccccgtccgtggccactgtcgggagcatttgtgacctgaacctgaaaatcccagaaatcaacagcagtgatatgtcggcccacgtcaccagcccctctggccgtgtgactgaggcagagattgtgcccatggggaagaactcacactgcgtccggtttgtgccccaggagatgggcgtgcacacggtcagcgtcaagtaccgtgggcagcacgtcaccggcagccccttccagttcaccgtggggccacttggtgaaggaggcgcccacaaggtgcgggcaggaggccctggcctggagagaggagaagcgggagtcccagctgagttcagcatttggacccgggaagcaggcgctggaggcctctccatcgctgttgagggccccagtaaggccgagattacattcgatgaccataaaaatgggtcgtgcggtgtatcttatattgcccaagagcctggtaactacgaggtgtccatcaagttcaatgatgagcacatcccggaaagcccctacctggtgccggtcatcgcaccctccgacgacgcccgccgcctcactgttatgagccttcaggaatcgggattaaaagttaaccagccagcatcctttgctataaggttgaatggcgcaaaaggcaagattgatgcaaaggtgcacagcccctctggagccgtggaggagtgccacgtgtctgagctggagccagataagtatgctgttcgcttcatccctcatgagaatggtgtccacaccatcgatgtcaagttcaatgggagccacgtggttggaagccccttcaaagtgcgcgttggggagcctggacaagcggggaaccctgccctggtgtccgcctatggcacgggactcgaagggggcaccacaggtatccagtcggaattctttattaacaccacccgagcaggtccagggacattatccgtcaccatcgaaggcccatccaaggttaaaatggattgccaggaaacacctgaagggtacaaagtcatttacaccccccatggctcgtggtaactacctgatcagtgtcaaatacggtgggcccaaaccacatcgtgggcaagtccccttcaaggccaaggtgacaggccagcgtctagttagccctggctcagcccaaacgagacctcatccatcctggtggagtcagtgaccaaggtcgtctacaagaagacttgggtatagcgccaattccccaaaggaatctttgggacgccaaacaaggtgacctcctaagggggccagggctctcaaaaggcctttgtgggccaagaagagttccattcctggtggacttgcagcaaagctggctccaacatgctgctgattcggggtccatgggcccacccactcccctgcgaggaggtctccatgaagcatgtaggcaaccaagcaatacaaccgtcacatacgtcgtcaaggagaggggcgattatgtgctggctgtgaagtggggggaggaacacatccctggcagcccttttcatgtcacagtgccttaaaacagttttctcaaatcctggagagagttcttgtggttgcctttgttgcttgtttgtaattcattttatacaaagccctccagcctgtttgtggggctgaaaccccatccctaaaatattgctgttgtaaaatgccttcagaaataagtcctagactggactcttgagggacatattggagaatcttaagaaatgcaagcttgttcagggggctgagaagatcctgagtacactaggtgcaaaccagaactcttggtggaacagaccagccactgcagcagacagaccaggaacacaatgagactgacatttcaaaaaaacaaaactggctagcctgagctgctggttcactcttcagcatttatgaaacaaggctaggggaagatgggcagagaaaaaggggacacctagtttggttgtcatttggcaaaggagatgacttaaaaatccgcttaatctcttccagtgtccgtgttaatgtatttggctattagatcactagcactgctttaccgctcctcatcgccaacacccccatgctctgtggccttcttacacttctcagagggcagagtggcagccgggcaccctacagaaactcagagggcagagtggcagccaggcccacatgtctctcaagtacctgtcccctcgctctggtgattatttcttgcagaatcaccacacgagaccatcccggcagtcatggttttgctttagttttccaagtccgtttcagtcccttccttggtctgaagaaattctgcagtggcgagcagtttcccacttgccaaagatcccttttaaccaacactagcccttgtttttaacacacgctccagcccttcatcagcctgggcagtcttaccaaaatgtttaaagtgatctcagaggggcccatggattaacgccctcatcccaaggtccgtcccatgacataacactccacacccgccccagccaacttcatgggtcactttttctggaaaataatgatctgtacagacaggacagaatgaaactcctgcggctctttggcctgaaagttgggaatggttgggggagagaagggcagcagcttattggtggtcttttcaccattggcagaaacagtgagagctgtgtggtgcagaaatccagaaatgaggtgtagggaattttgcctgccttcctgcagacctgagctggctttggaatgaggttaaagtgtcagggacgttgcctgagcccaaatgtgtagtgtggtctgggcaggcagacctttaggttttgctgcttagtcctgaggaagtggccactcttgtggcaggtgtagtatctggggcgagtgttgggggtaaaagcccaccctacagaaagtggaacagcccggagcctgatgtgaaaggaccacgggtgttgtaagctgggacacggaagccaaactggaatcaaacgccgactgtaaattgtatcttataacttattaaataaaacatttgctccgtaaaaaaaaaaaaa

SEQ ID NO: 125864 - DNA, 639 bp, Homo sapiens
atggacgaggaagataaggcttttaagcagaaacaaaaagaggagcagaaggaactcgaggagctgaaagtgaaggccagaaagaaggggcccctggacacaggtggaattaagaaatctggcaaaaacgtgtgggatggggtgaggtatgcaggttatttgcataaaacaagcagccaagtgcattcactcatttatttgttcgtggagtacctagcaaatgcaaggtgctctgttaaacactatggcagacacaaagatgaaacggacaaggattttgtcttcaaaggttctctagggctgctgagcgcccagcggacaccggcagcgcgcggtcgacgcgggcctgagctccctccaggtaggcggcgagctcgcgagcggcggctcgtcgctgccacgcgggaactggccccacgaccgccggcgcaggcacttcccgggcggtccagaccgctcgccccggggagcgaggaacggtcggcggtccaagtcctgcagacccccctggtttctcgtcactccccgaggcctccttccaggaactcagagcacgagcccgtgcgtgcccccaaaataacgggtattcgggactgcccagcagggctgttgggtggagagtgcttggaagactcataa

SEQ ID NO: 125865 - DNA, 544 bp, Homo sapiens
accagaagaagccactgaaacagcccaagaagcaggcctaggagatggacgaggtgagggcgggcgcggaggcactggcgggtgcgggggcgctgggagacaggcctgagttgaacacgctctgcctctccccaggaagataaggctttcaagcagaaacaaaaagaggagcagaagaaactcgaggagctaaaagcgaaggccagcggggaaggggcccttggccacacggtggaattaagaaatctggcaaaaagtaagctgttccttgtgcctgaggagatggtgaccctttatttcatctgtatttaaacctctctattccctgccataacatcttttgccacgtatagctggaattaagtgttgtcttggagctgttgtacatttaagaataaacttttgtaaaaaaagaaaaatcttacagtggctcatcatctctttatgttgttttcactaagtcggtcctaccataactgtgaatttaaagtaaaaccagctcagaatcttgccagagtctgttctttggtccttgttctaccct

SEQ ID NO: 125866 - DNA, 624 bp, Homo sapiens
atgctttcttctaaactaggaaacaccggagcccaggcccagggtgagagagtgcatgccttccacttaaagaaattaactgtaaaacagcctcaggtagatccttcagggggtatccagaagaagactaggaaaactggatgcattcttcagctcctgcttttgaagctgccatacattaaaaaagtgtactttccagaaaaagacctcttaggtagtgaaatcaaagctaaactgcagaagtgcccggaccggctctccgaattggccgaccagatggtggcccagggaaaccttggcatgtaccaggaaacgagggaacagttggccatgcggctgaaggacatgttcgctgaggaagtggcagagggggaactggagaccccaacccctacccagagaggagaagcagagttgccaggagatggtctggtggatgtgatgtgggaatataagtgggagaacccgggggatgccgagctgcatgggcccttcaccagcgaccagatgcagacctgggtgagcgaaggctactttcctgatggtgtttactgccggaagctggacccccttcgtggtcagttctacaactccaaacgcattgactttgacctctacacctga

SEQ ID NO: 125867 - DNA, 1195 bp, Homo sapiens
atgccaaagaggaaagtgaccttccaaggcgtgggagatgaggaggatgaggatgaaatcattgtccccaagaagaagctggtggaccctgtggctgggtcagggggtcctgggagccgctttaaaggcaaacactctttggatagcgatgaggaggaggatgatgatgatggggggtccagcaaatatgacatcttggcctcagaggatgtagaaggtcaggaggcagccacactccccagcgaggggggtgttcggatcacaccctttaacctgcaggaggagatggaggaaggccactttgatgccgatggcaactacttcctgaaccgggatgctcagatccgagacagctggctggacaacattgactgggtgaagatccgggagcggccacctggccagcgccaggcctcagactcggaggaggaggacagcttgggccagacctcaatgagtgcccaagccctcttggagggacttttggagctcctattgcctagagagacagtggctggggcactgaggcgtctgggggcccgaggaggaggcaaagggagaaaggggcctgggcaacccagttcccctcagcgcctggaccggctctccgggttggccgaccagatggtggcccggggcaaccttggtgtgtaccaggaaacaagggaacggttggctatgcgtctgaagggtttggggtgtcagaccctaggaccccacaatcccacacccccaccctccctggacatgttcgctgaggagttggcggaggaggaactggagaccccaacccctacccagagaggagaagcagagtcgcggggagatggtctggtggatgtgatgtgggaatataagtgggagaacacgggggatgccgagctgtatgggcccttcaccagcgcccagatgcagacctgggtgagtgaaggctacttcccggacggtgtttattgccggaagctggacccccctggtggtcagttctacaactccaaacgcattgactttgacctctacacctgagcctgctgggggcccagtttggtgggcccttctttcctggactttgtggaggaggcaccaagtgtctcaggcagcgaggaaattggaggccatttttcagtcaatttccctttcccaataaaagcctttagttgtgtactggggccttggctgtgctgatggccaaaag

SEQ ID NO: 125868 - DNA, 363 bp, Homo sapiens
atggcagaagcaatgaaatctccccacattatggagtcctcacacgctgccagaatcctggcaaatctagaccgagaaactgtgcaagaaaaatatcaggatggcgtatatgtgctgcatccccaatatcgaacaagttacagctatgatttgtcccactcacttcaatataatctcactgtcttgcgaatgcccctggagatgttaaagtcagaaatgacccagaatcgccaagagagctttgacatctttgaagatgaaggattaattacacaaggtggaagcggagcatttgagaggagtggtgccaagggcacagctggcgaggttagccttgaagagcagcagggctgccttctgtga

SEQ ID NO: 125869 - DNA, 1326 bp, Homo sapiens
atgcctcagcagtccccaccccagtcaccaccaccagactggtggcttgatgaagatgaggatgaggctgtcttatttatcacctttaccaagacagggtggtttatggtgtttttggaggaaatggacttccttatgctgaaagtttttggagaagttccttcagcaacagtggaaatgttctgtttagaagctatagtaaaacattctgagatatccacacattgtgataaaatcgaagcaaatggaggcctgcagctacttcagaggctgtaccgacttcacaaggactgccctaaagtacagagaaatataatgcgtgtcattggaaatatggctttgaatgaacatcttcattcttctatagttcgctcaggctgggtttccatcatggcagaagcaatgaaatctccccacattatggagtcctcacacgctgccagaatcctggcaaatctagaccgagaaactgtgcaagaaaaatatcaggatggcgtatatgtgctgcatccccaatatagaacaagtcagcccattaaagcagatgtcctttttattcatggccttatgggagcagcattcaaaacatggcgccagcaggacagtgagcaggctgtaattgaaaaacctatggaggatgaagacagatatacgacgtgctggcccaagacatggttagcaaaagactgtcctgctctccgaattatatctgtggagtatgacaccagcctcagcgactggagagcaaggtgccctatggaaagaaagtccattgcattcagaagcaacgaacttcttaggaagctcagagctgctggtgttggggataggccagtggtttggatatcacatagcatgggaggtcttcttgtcaaaaagatgctgttggaagcctctacgaagccagaaatgagtactgttatcaacaataccagaggaataattttttatagtgtccctcatcatggatcacgtttggctgaatactctgttaatattcgctatcttctcttcccctcgttggaagtcaaagaactcagcaaggattctcctgcacttaaaacactacaagatgactttctggagtttgctaaagacaaaaacttccaggtgctgaattttgtggaaacactaccaacctacattggcagcatgattaagctccatgtggtacctgtggaatcagcagatttaggcattggagatctaattcctgtggatgttaaccatttgaacatttgtaagccaaagaaaaaggatgcttttttgtaccagcgtactttacaattcattcgtgaagctttagccaaagaccttgaaaactaa

SEQ ID NO: 125870 - DNA, 2325 bp, Homo sapiens; identical to SEQ ID NO: 119681

SEQ ID NO: 125871 - DNA, 339 bp, Homo sapiens
atggagaaatctgacaaatactacctcatccagggtgcagaagctgccaatgtgactggcccggatggagttcctgtggaagggagtcgttacgctgcagatcggcgccgttacagacgtggctactatggaaggcgccgtggccctccccggaataaaatagcgctaagcaaatccagtattgcctccctactatgggtcaagagtgatgggtgctttccaggtccacaaatgattggactcctcgtaactgtaggacagatggctcaacatcgtaactataagactcgttcctcctttcctgcttgcattcagttctgttgcaaccagagaccttga

SEQ ID NO: 125872 - DNA, 826 bp, Homo sapiens
gagcggccgccgcctctttagccaccgccgccggcagcgaagacgcggagaaaaaaagttctcgccaccaaagtccttggcactgtcaaatggttcaacgtcagaaatggatatggatttataaatcgaaatgacaccaaagaagatgtatttgtacatcagactgccatcaagaagaataacccacggaaaatatctgcgcagtgtagggagatggagaaactgtagagtttgatgtgggttgaaggagagaagggtgcagaagctgccaatgtgactggcccggatggagttcctgtggaaagggaagtcgttacgctgccagatcggcgccggttacagacgttgctactagtgatagggcgccgtggccctcccccggaatactggtgagattgggagagatgaaggatgggagtcccagagggaggccacaactttcaggggaccggttccatcgaaaatccaacttaccgcccaaggtaccgtagcaaggggacctcctccgccccacgaccttgcccccagcagtttgggagaggcttgaagattaagaaaatcagcaagccaccaagtggtccaaaacacccgtctgttcgccttgggataccggcgtccctacaattacccggcgtcgcccgcgtcctcctaacgctccttcacaagatggcaaagaggccaagggcaggtgaagcaccaacttgagaaccctgctccacccacccagcagagcaatgctgagtaacaccaggctcctcatgcaccttcaccatctgcatgtgaccttaagtattaatgaccattcaaaaaaaaaaaaaaaaaacgg

SEQ ID NO: 125873 - DNA, 1594 bp, Homo sapiens
gaattcgggcgggggagcccaaggagcgagcgcgccagacgaagctcgagccgcctccgccagcgcgaccccacctcggccgccgccgcctgcgccgcgagatccgccccggcctccccgagagcgagccccggccgccgcgaccaccagccgcgctaaccgccgaccaaccgccaccgaggcgcctgagcgagagcagaggaggaggaggcatgagtgaggcgggcgaggccaccaccaccaccaccaccaccctcccgcaggctccgacggaggcggccgccgcggctccccaggaccccgcgcccaagagcccggtgggcagcggtgcgccccaggccgcggccccggcgcccgccgcccacgtcgcaggaaaccccggtggggacgcggcccccgcagccacgggcaccgcggccgccgcctctttagccaccgccgccggcagcgatagacgcggagaaaaaagttctcgccaccaaagtccttggcactgtcaaatggttcaacgtcagaaatggatatggatttataaatcgaaatgacaccaaagaagatgtatttgtacatcagactgccatcaagaagaataacccacggaaatatctcgcgcagtgtaggagatggagaaactgtagagtttgatgtggttgaaggagagaagggtgcagaagctggccaatgtgactggcccggatggagttcctgtggaaagggagtcgttacgctgcagatcggcgccgttacagacgttggctactatgggaaggcgcggtggcccttccccgcgaattacgctgggggagggaggaggaggaagggagcggcacaagttgaagggtttttaccccccttgccacttgattagggcagtttttctgggggccccgattcagcttgcgccgcccccagtattcgccctcagtagcggcgagcggcggtgtccgcgtttaccacgtgggacagacctttgaccgtcgctcacgggtcttaccccattcccaacagaatacaggctggtgagattggagagatgaaggatggagtcccagagggagcacaacttcagggaccggttcatcgaaatccaacttaccgcccaaggtaccgtagcaggggacctcctcgcccacgacctgccccagcagttggagaggctgaagataaagaaaatcagcaagccaccagtggtccaaaccagccgtctgttcgccgtggataccggcgtccctacaattaccggcgtcgcccgccgtcctcctaacgctccttcacaagatggcaaagaggccaaggcaggtgaagcaccaactgagaaccctgctccacccacccagcagagcagtgctgagtaacaccaggctcctcaggcaccttcaccatcggcaggtggacctaaagaattagatgaccattcagaaataaagcaaaaagcaggccacataccttaaccaacaccaaagaaacatccaagcaataaagtggaagactaaccaagatttggacattggaatgtttactgttattctttaagaaacaactacaaaaagaaaatgtcaacaaatttttccagcaagctgagaacctggaattc

SEQ ID NO: 125874 - DNA, 484 bp, Homo sapiens
ggcacgagcggcacgagaccggaaccggcggcaccagctcggagagaaaggaggttccataggcagttcttaccaagaagatgtcgattccattctccaacacccactaccgaattccacaaggatttgggaatcttcttgaagggctgacacgcgagattctgagagagcaaccggacaatataccagcttttgcagcagcctattttgagagccttctagagaaaagagagaaaaccaactttgatccaccagaatgggggagtaaggtagaagaccgcttctataacaatcatgcattcgaggagcaagaaccacctgagaaaagtgatcctaaacaagaagagtctcagatatctgggaaggaggaagagacatcagtcaccatcttagactcttctgaggaagataaggaaaaagaagaggttgctgctgtcaaaatccaagctgccttccggggacacatagcccgagaggaggcaaa

SEQ ID NO: 125875 - DNA, 822 bp, Homo sapiens
atgggcccctcgggcttccaacccagtgtcctgacatcaagagcaagtcaagagctgcagccacagctgaaccttcaaccagagaatccagagcatcatgcattcgaggagcaagaaccacctgagaaatgtgatcctaaacaagaaaactctccaatatctgggaaggagaaagagacaccagtcaccatcttagactcttctgaggaagataaggaaaaagaagaggttgctgctgtcaaaatccaggctgccttctggggacacacagccagagaggaggatgagaataatggtcccaacttcccagggttatgtaactggggagaacgggacctggaaggtggtaagcgctctaaacctcttaggtattccggaaatgaagacagtcatttcaggcctgtgttaaatctgcctccgcagtcttccaagggccacttcccacccagaggtgctgagcaggccatgctgtgggtgacagtcgcggaagatggcgaatacgtgcacgaccctgaagaggggcggagcttgtgcgccttaagaagagggaggcactgcatctctctggaaggaagctctcaaggatacagggatgtacaagaaaaggtctttgccttctctgggtctctgccagaggcaaaccaagcagattggtccagggatgaatgcctgatgggcacctacctgatccaagctgggccaatcacaaatggcttcaggaataaggtgctgagacccgagaaagaagtcagtctggctctgggtgtgaaatcaaggatgtatgagagtctgagagcagccatggtaggccgtatagactga

SEQ ID NO: 125876 - DNA, 503 bp, Homo sapiens
catcatctcatcaaagagagttaaaagtagggatgttctctgcatggcctcttctgatatgattaattgattgtaaattaagtaatcaaggcatactttgttgatttgtcatatctgggtaaaaggtttatggtttatttaataaatgaaactgcaaaatcagttttctacatttctgttatatttttgttaaagcacttaaaagaatttctgctctgtccaggggcaagattcttgccaagagaattaatgtgcgtattgagcacattaagcactctaagagccgagatagcttcctgaaacgtgtgaaggaaaatgatcagaaaaagaaagaagccaaagagaaaggtacctgggttcaactaaagcgccagcctgctccacccagagaagcacactttgtgagaaccaatgggaaggagcctgagctgctggaacctattccctatgaattcatggcataataggtgttaaaaaaaaaaataaaggacctctgggctaca

SEQ ID NO: 125877 - DNA, 703 bp, Homo sapiens
atccttaattaaattaatcccccccccccgccctttcggccggaaccgccatcttccagtaattcgccaaattgccgaaccccaaagggaaaggaggagaggcaacccgatatatgttctctaggcccttttaggaaaaccatggagttgttcctttgggccacaataattagcgattctaataagaagggtgatattgtagacatccaaggggaatggggtaccttgttccaaaaagggaattgcccccacaaagttgttacccatggccaaaacctggaaggagtcttaccaatggttaccccagccatgcttgttggccatttgttgtaaaccaaccagttttagggcaaagttttttcccaagagaattaatgtgcgtattgagcccattaagccactctaagagccggagatagcttcctgaaaccgtgtgaaggaaaatgatcagaaaaagaaagaagccaaagagaaaggtacctgggttcaactaaagcgccagcctgcttccacccagagaagcacactttgtgagaaccaatgggaaggagcctgagctgctggaacctattccctatgaattcatggcataataggtgcccaaaaaaaaaaataaaggacctctgggctacaaaaatgtttctcttcattgagtagaagtgtggtgtcctctcccccaaagaaatatttaaagcaaaaaaaa

SEQ ID NO: 125878 - DNA, 1378 bp, Homo sapiens
atatgctcctccacctcttttaccagtcggtagtcctgagagcagggttttccaaactggattttgtaagccacctaccggaggcatggcacagggagggcctcgcctcactgtcacagcagcatggcacagcaagatcaacttcatgctcggtgccaaagctgatggcaagaccattctaaaaggcctccagtccattttccaggagcaggggatggcagagtctgcacacctggcagtagggatgttgattcggcagagtgatttggcatatacctgggccatcacgggcagcagcaaagcagatttcactggcaaagaggatgggaaatattttacacaggcaaactgtgtcaatctgacagaagccctgccactctatgaagaacagcttgggtgcctgtattgccttgtggaattctcaaaggagatcgtctatgtcccttcaaacttcgaattgagcaacgatttcggggacggcacacgcctgtgtgaccgcttcccactccacttgggttccgtgagcgcgcggagccggaggagtcagggacgtgaggatgccctacttcccgcagcatccggatggcagggtctgcgtcggaaggcccgggagggcgacgccctccactgctgccgcgggcaccagggggaggaggcaggcggaggagaggaggaggaccgcagcgtgcaagccgggagccactttcccgcccctcctctcgccgctgacacgctcagaggagtcaccactccgcgcgctgcaggcgagagtggcagacggaggcagcccggggaagcgagccggagcggcgcccgcactgaggcggctgcagtgctgacaccactcagggcaagggtctccgacggctggagcgagagagcaagagagggctggagagcaggggagcccgcggggctgaggctctttgtcagcgcctgcacttcctacgttacaacgccttcattcagcaaaaaccttttgggcgcctgctgtgcgccaggccaggcgaagcagacccgaggctgtgaagctcagaggggagagggaccaatcgcagtaaataagctaccgagcaacacaagcaaccacagcgacagccacgacacgcacgtcgacacatcacgcaacacaccacgagggcagttgtggactgtcccttcttccagagggagattaaagctaatactagacttcaggacaggtgaggagagtgtggaacagaaatctgagaaaggactggaggagaaagattccagatctccagatccagattccattctctttcttcaaggaaaccacagagctcaggccctggacgtgagaggagatgtgagccttccacaagggctcctcccaccaggcgggagtcttccttga

SEQ ID NO: 125879 - DNA, 429 bp, Homo sapiens
tcgggtgagtaattcgtccaaagagaaccgtactctttatttggttgaagagaacataatattaagtttctttacctatgacttctctgatgtttttctggagggctctcttatagactatttcaacaaatatgacattttcccttcctttggctgcggttgtgagagcctggatgaaaccaactggctctggaatgttcctgtatcaatatttgccagtagtcaaatcttcacaagctgtttttcctgttgttattgaaatcagctccatttctggctccatcctccccaaattcccaatgctctctttaatgtctttgcacactggatccatcatataattgtgattagcagctggaactgacagaatatatgaaaatatcctgcttttctcaaactgctgagccacctttcatgacactaggctga

SEQ ID NO: 125880 - DNA, 331 bp, Homo sapiens
tcgcctgattgggcagatcgtgtcctccatcacagcctccctgcgatttgatggggccctgaatgtggacttgacggaattccagaccaacctagtgccgtacccccgcatccacttccccctgggccacctatgccccagtcatctcagctgagaaggcctaccacgagcagctctagagaaggattatgaagaggtgggcgtggattccgtggaagctgaggctgaagaaggcgaagaatactgaggggagggtgtggtgggttctcccctgccacccccgggatggctgcttccaagttgtttgcaattaaaggttctgtataaaacc

SEQ ID NO: 125881 - DNA, 630 bp, Homo sapiens
atgggccgcgcgtggggccggcggcgggcgcagcgcgtgtggagccgcccggtcgccccggggagaggccgagggcgcggccccgccgccggcccccgccccggtcccgcccccgcccctggcctggagcgcggccccggcgtcccggatgcccgaggcctgctggtcccggccagagccgtccccgtcccgcgccgccgctcaagctcagagaaggggcgtggggccaccccgggagcggcgcagccttttccctacgcgttggagccctgggctctgctcggctccgctagtggtgccggatccaggcgacagcgcgacagacaccattgccacgtgggtgcagcctcaggacgtcctgaaagccggagagaatcaggtcacacgaacgtggccgtaaaggaggagaagacccaccaggcagaagagacagggagaggacactggggtgtcttggggctgccagcacaaagttccatgagctggagggctcagaacaacagaaacgtcttctctcacagtttggagagaaataacaaggtctacgggaattatgaggcaggcacggtggaggaaaaccaattgataaatatcatcatctcacaagggtctttgcagatgatcaagtga

SEQ ID NO: 125882 - DNA, 467 bp, Homo sapiens
tttttttttgccactatggacactaaaaccagtgttcggtccctaggagtgaacatttcaatactgcgaaaaaagaaaaatacgacagcgacacaacaaccaaagtgagactaagcagcacctttgaagacactcaatttgaaggcactgcgtaaggatgagctgggggcagggaggccaccatgtggagctgggatgtctgattgcgggcacctcacgttgcctgctcccgctgtaatcagggtccatgcatggaaaactgtctaaacaccgaccaaacacacacacaaacacagaggcaaggttaagaggaaaaatcgtcttcctcaaaacaatatccagccttatggaatattataagaggtctcaatgctcagttaaaagtaaagcacgatcagtgttttaactgaagttaagggcacaagctcaattacttcaggaaactaagaaacctgtgttcaggctgc

SEQ ID NO: 125883 - DNA, 1380 bp, Homo sapiens
  misc_feature (1)...(1380): n = a,t,c or g
atgcagagtcagagacaggaggatgtgaaactcttcagaatatctggaaagcgatctccccctggaggtggcagcaaggttccacagaaaaaagtaaaatttgctgttgctgaagatgatgatgatgatgataaggaaactgaagacaaatctccagtgaagaaatctatacgagatactctacccaatcatgcacaacaatcaaaccagaatggaaaagactccaagtcaccaatgtcaagaaaagcagggtttggtggggggaacctgcagaagcatggccgatcctctgccttactctctacggcttttgtgtctgcgactggaaggtttcgtttcaaaaagaacaccaacaccacagtgaccgtgggcaaccccctttcctcgccccacctcctcaggagtgaacatttcaatactgcgaaaaaagaaaaatacgacagcgacacaacaaccaaagtgagactaagcagcacctttgaagacactcaatttgaaggcactgctgacttcacatcctttgacatcagcacagctttgaaagggggatgggagagcgagcagaaagcagaaaaaccagctttgaactatgcatgcaaggcctctttcaagcctcaaattctacaaggacggcttgagccagggcagttcaggaaacacttgaggagcagaggcagcagggcgctggaccagacagaggacgggaatgtccaagaagtggtctctgtgtgcggtaatgagccgagattacagctggcagctggaaactaaaccccatgggtgccacccagagagagctgagactgaccatggagtaacggccaaggtcatgtgtgtagccccgggccatggagagggggtaccctggaggggctgggctggctggctgggctcaggctgtctgacaggcaacgggctccccagtgttctgaagagggagtggccctggtggtaactctctgtggcttagaggggctgaagctagaacaccgctgtgactccgggcccgctggttccctgagggcaagggccaccttgggtcatcgctctgaacaccttccccttgctctgagaagcacagatggccagtgtgaactgcctcagcaatccagggactgtgtcctctcattaagatatcatggcaaatcacgagaagacacaaaaatcaaaacatgcaagagaagaaaagactaatgaaagcagagattccctgcgcggctctttctaagctgactagaagagcagcaggcactccgataacttccgcacagtccatttttattattcttcaactaacaggcaagaagcccaaagttcctggaaatatatgcataaattcatttgtagcagtaaacctctacttttatggntaagcttcat

SEQ ID NO: 125884 - DNA, 617 bp, Homo sapiens
  misc_feature (1)...(617): n = a,t,c or g
tttcgtaggaatcaggcaggcatccgtacattgtgactcttattttctgtaccatcctaacctgaagggatacagccaggaggcataagattccttgtagaagtttttgtgtttacacaccttactatgctgagcctgcttgttcctgtctcgtagtgcaccaacctgtggggaagtctcaagactatggccggattctcctcaagagcttatagtggaggcctgaattttgatctatgttctacctacatccagctggctgaaagtacttgaggatcacatgaccctggacatggatgctgttctgtcagattttgtccgttccacaggagcagagccagggctagcgcgagatctcctataaggaaagaattgggatgtgaatgccgccctcagtgattttgaacagctacgtcaagtccatgctggaaacctacccccatcctttattgaggggagtggtggctccaggacccctgaaaaagggttttctgacagagagcctactcgccctccccgacccatccttcagcggcaggatgacatcgttcaagataacgcctgtctagggcatcntccacgccagcttcagcattgtttccttgcccggtcccatg

SEQ ID NO: 125885 - DNA, 843 bp, Homo sapiens
atgtcaggacgcggaaagcagggaggcaaggcccgcgctaaggccaagtcgcgctcgtcccgcgctggtctccagttcccggtggggcgagtgcaccgcttgctgcgcaaaggcaactacgcggagcgggtcggggcaggcgccccggtgtacctggcggcggtcctcgagtacctgaccgcggaaattctggagctggcgggcaacgcggctcgggacaacaagaagacgcgcatcatccctcgccatctgcaactagccgtgaggaatgacgaagagctcaacaagttactcgggggtgtcaccattgcccagggcggcgtcttgcccaatatccaggctgtcctgttgcccaagaaaacggagagaaagaattgggatgtgaatgccgccctcagtgattttgaacagctacgtcaagtccatgctggaaacctacccccatcctttagtgaggggagtggtggctccaggacccctgaaaaagggttttctgacagagagcctactcgccctccccgacccatcctccagcggcaggatgacatcgttcaagaaaaacgcctgtctaggggcatctcccacgccagctccagcattgtttccctggcccggtcccatgtctcctccaatggtgggggtggggggagcaatgagcaccccctggaaatgcccatctgtgccttccagcttccagatctcactgtatacaatgaagacttccgcagcttcatagagagagacctcattgagcagtccatgctggttgccttggaacaggcaggcagccttgtggaggggctggacttgatcgctagcttccagtttaagtgtgttatctga

SEQ ID NO: 125886 - DNA, 416 bp, Homo sapiens
gacatcgcgagtacctatgaatggatttcccgaactttatggttccaatggtcctcagctgtttacaatagagcaatggggcagtcctgagaaactgcccagagctcacacatgctttaatcgccttgacttacctccatatgaaacctttgaagatttacgagagaaacttctcatggccgtggaaaatgctcaaggatttgaaggggtggattaagcaccctgtgcctcgggggtggttgttcttcaagcaagttctgcttgcacttttgcatttgcctttcccaccacaaattatcaactggtagatgtgtacactaattacatttcaggaggacttaatgctatttatgttgtgcctctgcaggcaaagcccttaataaatattttacatcctttaaaaaaaaaaaaaaaaa

SEQ ID NO: 125887 - DNA, 729 bp, Homo sapiens
atggccctatgcaccaggcgaggcaaattgccacaacaagtagaaacaaggtttgcagtagccctctggacagcagaaacctgcttacactaccagactggccaagtatcctctgctgcatccccatccacccccaccgtggcagccaaatgggggtcttggccacaaggtggccgtaagcatctacttgggcctgtagaacgacgtctcattgaacttgaagtggtttatgttgaaaagttcaagatcgatgatgtctatagaaatcatatacctcaagcctttcctctgataggtgggaaactgaggcagagagcagctgggtttacccagcaaggttttggcacgttgctcatgtgcggcctcggtgatgtggatgtgaatgactggagacagcattctatttacaagaacggctactgcccaaaccaccccgtcattcagtggttctggaaggctgtgctactcatggacgccgaaaagcgtatccggttactgcagtttgtcacagggacatcgcgagtacctatgaatggatttgccgaactttatggttccaatggtcctcagctgtttacaatagagcaatggggcagtcctgagaaactgcccagagctcacacatgctttaatcgccttgacttacctccatatgaaacctttgaagatttacgagagaaacttctcatggccgtggaaaatgctcaaggatttgaaggggtggattaa

SEQ ID NO: 125888 - DNA, 3447 bp, Homo sapiens
gcccgggtgggtggctgcgcagggccctacctgggcgggagcggctgcagagccctgtccacgcggtgcctccccagcacggcacctcccactccaggctgttggttacctggccgggagctggcagagaccaggatttctcctcgccgccgttgctgttgttaggggaaacagaccatctgcatctagacctgcctctctctccgctccccacttcagacgagctcttcctgcctggaatctgtgatccgtatgtgaaactttcattgtacgtagcggatgagaatagagaacttgctttggtccagacaaaaacaattaaaaagacactgaacccaaaatggaatgaagaattttatttcagggtaaacccatctaatcacagactcctatttgaagtatttgacgaaaatagactgacacgagacgacttcctgggccaggtggacgtgccccttagtcaccttccgacagaagatccaaccatggagcgaccctatacatttaaggactttctcctcagaccaagaagtcataagtctcgagttaagggatttttgcgattgaaaatggcctatatgccaaaaaatggaggtcaagatgaagaaaacagtgaccagagggatgacatggagcatggatgggaagttgttgactcaaatgactcggcttctcagcaccaagaggaacttcctcctcctcctctgcctcccgggtgggaagaaaaagtggacaatttaggccgaacttactatgtcaaccacaacaaccggaccactcagtggcacagaccaagcctgatggacgtgtcctcggagtcggacaataacatcagacagatcaaccaggaggcagcacaccggcgcttccgctcccgcaggcacatcagcgaagacttggagcccgagccctcggagggcggggatgtccccgagccttgggagaccatttcagaggaagtgaatatcgctggagactctctcggtctggctctgcccccaccaccggcctccccaggatctcggaccagccctcaggagctgtcagaggaactaagcagaaggcttcagatcactccagactccaatggggaacagttcagctctttgattcaaagagaaccctcctcaaggttgaggtcatgcagtgtcaccgacgcagttgcagaacagggccatctaccaccgccatcagtggcctatgtacataccacgccgggtctgccttcaggctgggaagaaagaaaagatgctaaggggcgcacatactatgtcaatcataacaatcgaaccacaacttggactcgacctatcatgcagcttgcagaagatggtgcgtccggatcagccacaaacagtaacaaccatctaatcgagcctcagatccgccggcctcgtagcctcagctcgccaacagtaactttatctgccccgctggagggtgccaaggactcacccgtacgtcgggctgtgaaagacaccctttccaacccacagtccccacagccatcaccttacaactcccccaaaccacaacacaaagtcacacagagcttcttgccacccggctgggaaatgaggatagcgccaaacggccggcccttcttcattgatcataacacaaagactacaacctgggaagatccacgtttgaaatttccagtacatatgcggtcaaagacatctttaaaccccaatgaccttggcccccttcctcctggctgggaagaaagaattcacttggatggccgaacgttttatattgatcataatagcaaaattactcagtgggaagacccaagactgcagaacccagctattactggtccggctgtcccttactccagagaatttaagcagaaatatgactacttcaggaagaaattaaagaaacctgctgatatccccaataggtttgaaatgaaacttcacagaaataacatatttgaagagtcctatcggagaattatgtccgtgaaaagaccagatgtcctaaaagctagactgtggattgagtttgaatcagagaaaggtcttgactatgggggtgtggccagagaatggttcttcttactgtccaaagagatgttcaacccctactacggcctctttgagtactctgccacggacaactacacccttcagatcaaccctaattcaggcctctgtaatgaggatcatttgtcctacttcacttttattggaagagttgctggtctggccgtatttcatgggaagctcttagatggtttcttcattagaccattttacaagatgatgttgggaaagcagataaccctgaatgacatggaatctgtggatagtgaatattacaactctttgaaatggatcctggagaatgaccctactgagctggacctcatgttctgcatagacgaagaaaactttggacagacatatcaagtggatttgaagcccaatgggtcagaaataatggtcacaatttgaaaacaaaagtgattatatcgactttagtcatccagtggagatttgtgaacagggtccagaagcagatgaacgccttcttggagggattcacagaactacttcctattgatttgattaaaatttttgatgaaaatgagctggagttgctcatgtgcggcctcggtgatgtggatgtgaatgactgggagacagcattctatttacaagaacggctactgccccaaaccaccccgtcattcagtgggttctgggaagggctgtgctacttcatgggacgcccgaaaagcgtatcccggttacttgcagttttgtcacagggggacatcgcgagtacctatgaatggatttgcccgaactttatggttccaatgggtcctcagctgtttacaatagagccaatgggggcagtcctgaggaaactgcccagagcttcacacatgcttttaatcgccttgacttacctccatatgaaaccctttgaaagatttacgagagaaacttctcatggccgtggaaaatgctcaaggactttgaaggcggtggattaaacgacccttgtgcctcagggggtggttgttcttcaagcaagttctgcttgcacttttgcatttgcctaacagacttttgcagaggcgatggcagagagcagctgcaggcatggtccctggagccgagccttcaccacgcactcgtccaagttcggatgcgggaacctggtcccagcttgagttcctgcctttcccaccacaaattatcaactggttgatgtgtacactaattacatttcaggaggacttaatgctatttatgttgtgcctctgcaggcaaagcccttaataaatatttgtacatcctttctaatgacaatgaatggaattaatcactcaacaggtatagtattacgactcatgtttactttttaaaatgatttagaccgattttcagattttatttcgttatgattaaagatgtctcatgt

SEQ ID NO: 125889 - DNA, 627 bp, Homo sapiens
atgagcagtttgcactggctcgtgggagggcatttactgagcatctactatattccaggcgtgggtgacacagatacagtgacagtaaaggcctggattctggccccgagaagctcccaatctagagatgcatgtaaacagggcattacagcccagtgtactcagggctcaaagccaggagcccagagggtacaggagtgtagaggaggctgctggtctccctctccagaggctggcatgcagggagggcttcctggaggtggtgatgacatagatacagggtgtgtaggggtggtcaggcaaaggggctgtggaggacagtgcttcaggcagggggaacagcccaagcgaaggtgtggcagcatctgcctccttcactgctgtctctctgtgcccagcacagttcctggcacacacaggtgctcagtcaacggttggggaataagtgaaaatgtctggtttacaggggtgagcgtcacgcgtcaagggcggttcgtgcgtgtgcagggcttgctaagtcgcaggaaatgggaggtcgcagcacgccgctacctgcaagcccgaaagctgaatgcagctctagtgtggcgcgtagtcttactgggtactattttacttaatcgctga

SEQ ID NO: 125890 - DNA, 495 bp, Homo sapiens
atgcccagccccacaagtgaggaaactgaggcaggagtggaggatgaaactgaaggtcacagaggagatcattatgatgaaacaccttacgtgtatagcacgcatgttgtctgtgttgagtgccatgaagcgtgctttaggttccttgttaacggaggtacacgaggttgacgacaccatccagaccctgcagcagcgcctgagggatgcagaggacaccctgcagtcgctggtccacatcaaagccacactcgagtatgacctggctgtcaaagccaattccctgtacatcgaccaggaaaaatgcatgagcatgcgcaagagctaccccaacaccctccggctggtcggcttctgctagggaccccaccgggtgtggttttgatacccctaagttaaggctgagccagagcactgtctcagcatttgaaccgaatgctaatatagtcacttattaaaggattatgctgatggaaatgtaccaacaaaaaaaaa

SEQ ID NO: 125891 - DNA, 432 bp, Homo sapiens; identical to SEQ ID NO: 118340

SEQ ID NO: 125892 - DNA, 687 bp, Homo sapiens
atgccaaaaggaaagaaggccaagggaaagaaggtggctctggcccctgctgtcatgaagaagcaggaggctaagaaagtggtgaatcccctgtttgagaaaaggcctaagaattttggcatcggacaggacatccagcccaaaagagacctcacccactttgtgaaatggccccgctatatcaggttgcagcggcagagagccatcctctataagcggctgaaagccctggactgccaaacagctactcagctgcttaagctggcccacaagtacagaccagagacaaagcaagagaagaagcagagactgttggcctgggctgagaagaaagctgctggcaaacgggacgtccccaccaagagaccacctgtccttcgagcaggagttaacatcgtcaccaccttggtggagaacaagaaagctcagctggtggtgattgcagacgacgtggatcccatcgagctggttgtcttcttgcctgccttgtgtcgtaaaatgggggtgaactcggaagacaaaggcactttggctaagctgatggaagctatcaggaccaattacaatgacagatacgatgagatccgccgtcactggggcggcaacatcctgggtcctaagtctgtggctcgtatcgccaagctcgaaaaggcaaaggctaaagaacttgccactaaactgggttaa

SEQ ID NO: 125893 - DNA, 1132 bp, Homo sapiens
  misc_feature (1)...(1132): n = a,t,c or g
attgangtgcagtgacctctgacgagccgaaaggaaagaaggccaaggcaaagaaggtggctccggccccagctgtcgtgaagaaccaggaggctaagaaagtggtggatcccctgtttgagaaaaggcataagaatttgtggcattggacaggacatccagcccaaaagagcctcaccccgcttgtgtgaattgccccggctatatcaggttgcagcggcagagagccatcctctataaaccggctgaaaggtcccttctgcgattaccccggtttcaccagggccctggaccgccaaacagtctaatccagcttgcttaagctgggcccacaagtacagacccagagacaaagcaagagaagaaagcagagactgtttgcccgggcccgagaagaaggcgtgctggcaaagggtgacgtccccaacgaaagagacccacctgtcccttcgagccaggagtttaaccccgtttcaccacccttgggtggagaaacaagaaaagctccagctggtggtgaattggcacacggacgtggtatcccattcgagctggttgtccttcttgccctgcccctgtgtcgtgaaaaatggggggtcccttaactgcaattatcgaagggaaaaggcaagactttgggaccgtctagtcccacaggaaagaccttgcaccacttgtccgcctttcacacaaggtgaacttcggaagacaaaaggcggcttttggctaaagctgggttggaagctaatcaggacccaatttacaattgaccagatactgatgagatcccgccgtcacttggggttggcaatgtcctggggtcctaagtctgtgggctcgtaatcgccaaagctcgaaaaaggcaaaggctaaagaacttgcccactaaactggggttaaatgttacactgttgagttttctgtacataaaaataattgaaataatacaaattttccttcnnnnnnnnnnnnnggggggcccctttaaaaagaaaaaattttaatacccgggggtgggaaaggaaaacttttttttagggggccccaaaataaatttccggggccgggttttaaaaacgggggagggggaaaaacccgggggtacccaaattaaaaccccttggaaaaaaaa

SEQ ID NO: 125894 - DNA, 276 bp, Homo sapiens
atgagtcttcaggctggagcttccaaaccagatgaaaaccccacaattaacctgcagtttaagatccagcagctggccatttctgccttcagtgccatggaactaatcaagggaggaaaaggtcaccagggagaactggacagaactgaaacacagcaacaccagttctcaaggacaaggcatgaaacggtgtcgcagtactctggcgtctttattccaggagaggcttcttacaagataaggcactgcgagtcgattgttacgccacacctgtaa

SEQ ID NO: 125895 - DNA, 218 bp, Homo sapiens
ggggtccaggcagatgcaaagcttctcttcacccctcagcataaaatgctgcgccttcgtctgccgaatttgaagatggtgaggttgcgagtcagcttctcagctgtggtttttaaagctgtcagtgatatctgcaaaatcctgaatattagaagatcagaagagctttccttgttaaagccgtctggtgactattttaagaaaaaaaaaaaaaaaaa

SEQ ID NO: 125896 - DNA, 2965 bp, Homo sapiens
  misc_feature (1)...(2965): n = a,t,c or g
tcctcacgctcccttatggaacaaggcatccaagaggatgagcagctgctctacgacttanaatattattctttcttcgacttgaatcctaaatatgatgctgtccgaataaaccaactctatgagcaagccaggtgggccattctcttagaagaaattgattgcacagaggaagaaatgttgatctttgcagctctacagtaccacattagcaaactgtcgttgtctgctgaaacacaggattttgcaggcgagtccgaggttgatgaaatagaagcggcgctttctaatttggaagtaaccctagaaggtggaaaagcggacagccttttggaggacattactgatatccctaaacttgcagataatctcaaattatttaggcccaagaagttattaccaaaagctttcaaacaatattggtttatctttaaagacacatccatagcatactttaaaaataaggaacttgaacaaggagaaccactagaaaaactaaatcttagaggctgcgaagttgtgcccgatgtaaatgtagcaggaagaaaatttggaatcaagttactaatccctgttgccgatggtatgaatgaaatgtatttgagatgtgaccatgagaatcaatacgcccaatggatggctgcctgcatgttggcatcgaagggcaaaaccatggcagacagctcctaccagccagaggtcctcaacatcctttcatttctgaggatgaaaaacaggaactctgcatctcagctggccgcccggatcctggaggcgcaccagaacgtggcccagatgcccctggtcgaagccaagctgcggttcatccaggcgtggcagtcactgcctgagtttggcctcacctactaccttgtcagatttaaaggaagcaaaaaagatgacattctgggagtttcatataacaggttgattaaaattgatgcagccaccgggattccagtgacaacatggagattcacaaatatcaaacagtggaatgtaaactgggaaacccggcaggtggtcatcgagtttgaccaaaacgtctttactgctttcacctgcctgagtgcagattgcaagattgtgcacgagtacattggcggctacattttcttgtccacccgctccaaggaccagaatgaaacactcgatgaggacttgttccacaaattgaccggcgatattagaagatcagaagagctttccttgttaaagccgtctggtgactattttaagaagaagaagaaaaaagacaaaaataataaggaacccataattgaagatattctaaacctggagagttctccaacagcttcaggttcatcagtaagtcctggtttatacagtaaaaccatgacccctatatatgaccccatcaatggaacaccagcatcatccaccatgacttggttcagtgacaagccctttgacggaacaaaactgcagcatcctcgcattcagccaacccccccagtccccagaagcacttgcggatatgtaccagcctcggtctctggttgataaagccaagctcaatgcaggttggctagactcctcacgctcccttatggaacaaggcatccaagaggatgagcagctgctcttacgatttaaatattattctttcttcgacttgaatcctaaagtcctatcgatcaacctctttggcaaccccctcacttgcagttgtgacttgtcttggctcctcacggatgcaaagagaactgtcctaagcagggcagcagacactatgtgcgcgccagctgcgggatccagcggccccttctcagcctccctgtcactctcccagctgcccggagtgtgccagtccgaccaaagcaccactctcggggcttcacacccaccttgcttcaaccgctccacctacgcacagggtaccaccgtcgcgcccagcgcagcccccgccacccggcctgcgggagaccagcagagtgtctccaaggcccctaacgtgggctctcgcacgatagctgcatggccgcacagcgatgcacgggaggggactgccccctccacgaccaactctgtagcaggtcacagcaactccagcgttttccccagggctgccagcaccaccaggacccagcaccgaggagaacatgcccccgagcttgtccttgagcctgatatctcagctgcctccaccccactggccagcaagctcctgggccccttccctacctcgtgggaccgcagcataagctcgcctcagcccggccagaggacacacgccacaccccaagcccccaacccgagtctttccgagggcgagattccagtcttgctgctggacgactacagtgaggaggaggaagggaggaaggaggaggtgggaacgcctcaccaggacgtcccctgtgattaccatccctgcaagcacctgcagaccccgtgcgcggagctgcagaggcggtggcggtgccggtgccccggcctcagcggggaagacaccatcccagacccgcccaggctgcagggggtgacggagaccacggacacgtcggcgctggtccactggtgtgcccccaactcggtagtgcatgggtaccagatccgctactctgcggagggctgggcggggaaccagtcggtggtgggggtcatctacgccacggcccggcagcaccctctgtacgggctgtcgccgggcaccacctaccgcgtgtgcgtgctggcggccaacagggcgggcttgagccagccacggtcttcgggctggaggagcccgtgcgccgccttcaccaccaagcccagcttcgcgctcctgctctctgggctgtgcgccgccagcggcctgttgctcgccagcaccgtggtgctgtccgcatgtctctgcaggcggggccagacgctgggcctgcagcgctgcgacacgcacctggtggcctacaaaaacccggcctttgatgattacccgctggggctccagaccgtcagttag

SEQ ID NO: 125897 - DNA, 474 bp, Homo sapiens
  misc_feature (1)...(474): n = a,t,c or g
tgccgacgtccaagtctcttgcggtccagaaatgccaggatggttgtttcaaatgcattgggtatgaattgcaccttgaatctgcccttccctttttcgattaaaccttttcacatagctgctgctgctccttagcagtccatcccctggacggaggcggcctctcaggacctggagcagagctgtagggagctgccgtctcttatggtagatgtggcccatcacaatatacctgcaggtttaaactctggacacggcttattgcagctggaggagtccagggctaacatgtggactcggaagaagaagccgtcgggggtgaggtacaggcggttcatcttgtacagcccgtcccgatccaccagcagggtcaacagccggatgcccgcgcccagcacgtccacatcgtgcacgatcccgttgaattccaccgctctggcctaatgtcatacgatnctcaaannnnnggcccca

SEQ ID NO: 125898 - DNA, 925 bp, Homo sapiens
aggtcggacctgcgatgacctgatcacgccaagcttggcacgaggcagcttcggcctcagcccgccgcagagggacgcggagcccggcgctgagccctgcgcgcgcgcctgccggtccgatctggacgaacgcgaggcgttctgcgagagcgaattcggtgagcccggccgccgcgccgccgccccgccgccccgtgagcctttccgagccccggagaatcctgcacgcgagatcccagggcgcccgacccatgcgggccgtttcgctgttgctaaaaaccacctcctgggggactgggagaggaactcggggtaatgctcttctccaaactgtttttcggaagcagcggtgaacgggatcgtgcacgatgtggacgtgctgggcgcgggcatccggcctggtgaccctgctggtggatcgggacgggctgtacaagatgaaccgcctgtacctcactcacccccgacgtcttcttcttccgagtccacatgttagccctgggactcctccagctgcaataagccgtgtccagagtttaaacctgggtattgaaactgacctgaatgacgctgcatatgtactttataccaccgtttgtaaacgtggggtgccacagcccgggcttttagggtcgcccagcctttttttggggagcgatgggggaacaatggacatgaatggggattttaggacgacaggcaggcaggtatattgtgatgggccacatctaccataagagacggcagctccctacagctctgctccaggtcctgagaggccgcctccgtccaggggatggactgctaaggagcagcagcagctatgtgaaaaggtttaatcgaaaaagggaagggcagattcaaggtgcagttcatacccaatgcatttgaaacaaccaatctggcatttctggaccgcaagaga

SEQ ID NO: 125899 - DNA, 661 bp, Homo sapiens
tttcagaggaagacattaccatcagtgtgtggtttattttttcaaattccagtatatttttaaagacccatatttcactaagcagtgtacttgttgaaacccatgtgagtgactttgtttccacatgtgatagagcatcagatactggagtttgccaggggtagaatggttggattcaggaatgtttagctgactcatagcaggaagttatcatttccatttcggatcttgcagattttttattggccatgatcggtgtcagaattggtaccatgggtgctgcattggcatcttgcagagtgaggcagagctcattgatgagtatgtctgttacagaagcagttgcaatgccagcatcactcagtgacagctcatcatgtagggcccagaatactgattttgtgacttctaagcttgtgttccaccccccacacctgctgccaacttgctggcagagcccagaggatgactgctggcaactgctgatgaaggagaggaagttgcttggaggtcctggggcatgtggactcggaagaagaagacgtcgggggtgagtgaggtacaggcggttcatcttgtacagcccgtcccgatccaccagcagggtcaccagccagatgcccgcgcccagcacgtccacgtcatgcactatcccgttcat

SEQ ID NO: 125900 - DNA, 782 bp, Homo sapiens
cttctggtggtgggcacaactgtggtggtatactttccaaatgggaggtttaaggagttcatgagtagacatgttcacttaatgtgttaccggatctgcgtgcgagcgctgacagccatcatcacctaccatgacagggaaaacagaccaagaaatggtggcatctgtgtggccaatcatacctcaccgatcgatgtgatcatcttggccagcgatggctattatgccatggtgggtcaagtgcacgggggactcatgggtgtgattcagagagccatggtgaaggcctgcccacacgtctggtttgagcgctcggaagtgaaggatcgccacctggtcgtaaaagagactgactgaacatgtgcaagataaaagcaagctgcctatcctcatcttcccagaaggaacctgcatcaataatacatcggtgatgatgttcaaaaagggaagttttgaaattggagccacagtttaccctgttgctatcaagtatgaccctcaatttggcgatgctttctggaacagcagcaaatacgggatggtgacgtacctgctgcgaatgatgaccagctgggccattgtctgcagcgtgtggtacctgcctcccattgactaggagaggcagattgaagatgctgtccagtttgcgaatagggtgaaatctgccattgccaggcagggaggacttgtggacctgctgtgggatgggggcctgaagagggagaaggtgaaggacacgttcaaggaggagcagcagaagctgtacagcaagatgatcgtgg

SEQ ID NO: 125901 - DNA, 917 bp, Homo sapiens
gaatggagaccattatggatgatgaggtgacaaagagattctcagcagaagaactggagacctggaacctgctgagcagaaccaattataacttaaggatagcgctggccttgacagggattagccttctagtggtgggcacgactgtggcgggatacttgcttcatacctcgccaatcgatgtgatcatcttggccagcgatggctattatgccacagtgggtcaaatgcatgggggactcataggtttgattcagagagccatggtgaagacttgcccacacatctggtttgagcgcttggaagtgaaggatcgccacctgctggctaagagactgactgaacaagtgcaagatataagcaagctgcctatcctcatcttcccagaaggaatttgcatcaataatacatcggtgatgatgttcaaaaagggaagttttgaaattggagccacagtttaccctgatgctatcaacatgtggtacctgccttccatgaccagaggggcagatgaagatgccgtccagtttatgaatacgataaaatccgccatcgccaggcagggagaacttgtcgacctgctgtgggatgggggcctgaagagggagaagaatccagggctccctgggctgctctggatcccaggactctggatttcaccaagcacagtgggatccctgtgcaccggagctacctgcccttggcggtatgaacggatgctgctgggtgtcgcgacccaggataaaatgccttgtttcttttacaataagttgttggagaacctaaagcatactaatataattgcaaaagcaattgcagcaaaagcaaaaattaacaaatgggatctaaataaactaaagcgtttcggcacagcaaaagaaactatcatcagagtgaagaggcaacctacagaatga

SEQ ID NO: 125902 - DNA, 473 bp, Homo sapiens
ttatggtcgtaggaccctccaacggattccctctcccccgacggcggcagcatcgagctggagttctacctggcgcccgagccgttctccatgcccagcctgttgggagctccaccctactctggcctgggcggtgtaggggatccctatgcgcccctcatggtgctgatgtgccgggtgtgcctggaagacaagcccatcaagcccctgccttgctgcaagaaggccgtgtgcgaggagtgcctcaaagtctacctgagcgcccagatccagtgccctacctgccaattcgtctggtgttttaagtgccactctccttggcatgaaggtgttaactgcaaggagtacaaaaaaggagacaaattgttgcgtcactgggccagcgaaattgagcatgggcagaggaatgcccagaagtgtccaaagtgcaagatccacatccagcgaactgaaggatgtgaccatatgacctg

SEQ ID NO: 125903 - DNA, 1105 bp, Homo sapiens
atgcaggtacaacttggccaagtagaaatcaaatgccccatcacagagtgttttgaattcttggaagaaacaactgttgtctataacttaacgcatgaagactccatcaagtataagtacttcttggaacttggccgtattgattccagcaccaagccatgtcctcagtgcaagccctttacaaccttcaagaaaaaaggacatattcccaccccttccagatcagaaagcaaatacaaagactttgggctatgcaaatcagggaagaattttccagtaccctttgtgttcaccagtgaagaaatgggtcctcggacaagaaatagacccagacaaatgcttctctgggctttgctctctggatttacaggaagagtctgtaaatgctgaaggtgtttccagacactgtttttattttgtgggttgtttccttactcgacttgatgaattatcaggagaaaatgccattttcttagggcagatccagtgccctacctgccaattcgtctggtgttttaagtgccactctccttggcatgaaggtgttaactgcaaggagtacaaaaaaggagacaaattgttgcgtcactgggccagcgaaattgagcatgggcagaggaatgcccagaagtgtccaaagtgcaagatccacatccagcgaactgaaggatgtgaccatatgacctgctcacaatgtaacactaatttttgttaccgatgtggtgagagataccgccagctccgattttttggagaccacacatcaaacctcagtatatttggatgcaaatatcgctacctcccagagagacctcatttaaggagattagtgcgagggtcagtctgtgctggaaaattattcattgcacctctaattatggttttgggattggcactaggggccatagcggttgtaatcggtttatttgtatttcctatctattgcctttgtaaaaaacagagaaaacgatcacggacagtcccgggagggcggatgtcccctgggaagatgcgcgaggagagcgactgggaggcagctagcagcacctgcgtgtgggcaacacgacccgaggctgtctccattgcctgcgtgctgaaagcataa

SEQ ID NO: 125904 - DNA, 516 bp, Homo sapiens
agcaaaaaaaaaaaaaaggaaaaggaatttaagttgaaaaatactccaacaaacgaaccaacatgttttcagaactttttgggacccagctggggccggcccttccttcccttctcctgtcgcacgactaggcctgtgcccggtcccacctgccgccctccccctcctcctaatgggaccgaaaagagcccgaagggcctgggagggcgggtgaggttcccaggcctttccagatgccctgccgtgtttggcaaagcgattgtcttccctcttggagctccgcggacacccgacccctcttcctctccctcgccaccttccgtcattcgccacgctgaccacttcccctctgctccgccggggagaaggagggatggattctttccaaactctctccgctctcccggagccccctacctcaccctttctccccgaattcttgtgggcttgggagcgagagagaaggagctggtcccagcgctagtcaccgccaccctcagcccacagatcgggggg

SEQ ID NO: 125905 - DNA, 645 bp, Homo sapiens
atgaaaattaatcctggacagattagtgactacaaggaaaagaaaactcacaacgccgacatgaaaacacaggtgagtaggtgcttggtggagacgatggcggtgaaactttcaacagcgcgcctgtttgggtttaagcttcagagaacaggcgcagaatccctgcacgtcacttccagcatcccagagcaggtgcggctcctgggtgtccaggcctatgctcagtgctttagggaggctcagctgcaggagcagagcacgtgtgggaccctgcaccatggagaggtggctgccaatgccataggccgttttgccaagtcagtgcgcgagttcctggagaagaactatactgacgaagccattgaaacagatgatctgaccattaagctggtgatcaaggcactcctggaagtggctcagacaggtggcaaaaacattgaacttgctgtcatgaggcgagatcaatcccttaagtcaggctgtgatacaataaccagggaggcggacaagaaagtccccagtgacagcgcctcttatgtgctgtttgttggaagcaaacctcagttcggcttaggagacgtggccactcgcgcttggttcacagatattttcaatgcctcgagaagctacgttgtacctgcctga

SEQ ID NO: 125906 - DNA, 639 bp, Homo sapiens
  misc_feature (1)...(639): n = a,t,c or g
gtcctaggtgagtttttctaggagtgaaaatgcagaaaaggatgttgaaagctattggctaatgtatcatttgaactgctgataacctgagaaggggctcaggcatggtttaaaatgttcgtatcttcactaagtacggttctttcctcacatgcagtttcttaattggatggcactgacctgtttcttttcttgctagcgttatacgcagagcaatgggcgcaggccgtttggcatctctgccctcatcgtgggtttcgactttgatggcactcctaggctctatcagactgacccctcgggcacataccatgcctggaaggccaatgccataggccggggtgccaagtcagtgcgtgagttcctggagaagaactatactgacgaagccattgaaacagatgatctgaccattaagctggtgatcaagggcactccctggaagtggttcagtcaggtggcaaaaacattgaacttgctgtcatgaggcgagatcaatccctcaagattttaaatcctgaagaaattgagaagtatgttgctgaaattgnnnnnnnnnnnnnnnnnnnnnnnnnnnnnnnaccgaagaaagcatcatgatgaataaaaagtctttgcttggaatttttaaattcatat

SEQ ID NO: 125907 - DNA, 1998 bp, Homo sapiens
  misc_feature (1)...(1998): n = a,t,c or g
atggaggaaacaggcatgtgtgaaggccacggggcatctccaggaatggaggccagctctggggagcgggaaaagaggggaacgggggaggccagccctggggaccgggaaaagaggggaacgggggaggccagctctggggagagggaaaagaggagaacgggggaggccagctctggggatcgggaaaagaggggaacggggaaggccagctctggggagcgggaaaagaggggaacgggggaggccagctatggggagcgggaaaagaggggaacgggggctgctgggggacaggagtcctgtgcccattgtgggggctggctgatgcccagggccaagcccagcacccacagggagacaaacccaaggggcacggaagccacggccatggcaatggaccatgtgggtcagcaagccgatactacagactccactgatggaagccagtgggacccctctgaacattcacccaactgtggaatccgtgaagtcggtgctggggatccagacacccagcagacaggcagacaccactgctattatccggccaaggaaaccaatgagaaaaccaatacaaacagaaacagtaacacatttattgagcaattactgcatgccaagcagcaaagaggcaactcaggggtccccttcaagcctggccacatggtccgagccctcaccacaaacgcactctcgtgggctaaactgtacccagacccctggtgcctgcgcatgggaggtactggaaatgaggtatttgaaaatgaaataaagacggggtcatgctggattaaggagcaagaggggcagccccggccacagtccccgcggtcgcaagtgcgcccggaggccgacccgggcccctcaccactaaccaaaatgagcgcagaaaacgagtaccgcccgccgtcgccaccgaagctggctgcggagcgcgacaagccctcgccgcggctccggccccgaggggtcccctggcgccgggagtcgcgggtgcgcgcgggccgtgagtgtgcgcttttgagagtcgcggcggaaggagcccggccgccgcccgccggcatgagctacgaccgcgccatcaccgtcttctcgcccgacggccacctcttccaagtggagtacgcgcaggaggccgtcaaagaggggctcgaccgcggttggtgttcgaggaagagacattgttgttcttggtgtggagaagaagtcagtggccaaactgcaggatcaccgcccagtgcggaagatctgcactttcacatgacaaccgtttgcatggcctttgcaggcctccnccggccgatgcaaggatagtcattcaaacagggcccggggtggagttccaaaagccaccgggcctgaacctgtggaaggaccccgggtcactgtggaggtacatcaccccgcttacattcgccagtctgaaagccagcgtttatacccagagcaaatggggcgcaaggccgtttggcaatctctggccctcatcgtgggttttcgacttttgatggcactcctttagctctatcagactgacccctcgggcacatacccatgcctggaaggccaaattccataggcccggggtgccaagtccagtgcgcggagttcctgggagaagaacttatactgacaaagccattgaaacagatgatcttgaccatttaagctggtgatcaaggcactcctggaagtggttcagtcaggtggcaaaaacattgaaccttgctgtcatgaggcgagatcaatccctcaagatttttaaatcctgaagaaattgagaagtatgttgcctgaaattgaaaaagaaaaagaagaaaactgaaaagaagaaacaaaagaaagcatcatgatgaataaaatgtctttgcttgtaatttttaaattcatatcaatcatggatgagtctcgatgtgtaggcctttccattccatttattcacactgagtgtcctactaataaacttaccgtatttttaaaaaaaaaaaaaaaaaa

SEQ ID NO: 125908 - DNA, 511 bp, Homo sapiens
  misc_feature (1)...(511): n = a,t,c or g
nggggttnnnnggaaatatgatcgcctgtggaatatcgcacgacgatgaacttttcagttactcctgccccaagttcctgtcgcctgtagtgcccaactatgataatgtgcaccccaactaccacaaagagcccttcctgcagcagctgaaggtgttttctgatgaagtacagcagcaggcccagctttcaaccatccgcagcttcctgaagctctacaccaccatgcctgtggccaagctggctggcttcctggacctcacagagcaggagttccggatccagcttcttgtcttcaaacacaagatgaagaacctcgtgtggaccagcggtatctcagccctggatggtgaatttcagtcagcctcagaggttgacttctacattgataagcttaatcgaaccctgaagaagatgggacagagaccttgatgatattcacacacattcaggaacctgttttgatgtattataggcaggaagtgtttttgctaccgtgaaacctttaccta

SEQ ID NO: 125909 - DNA, 1933 bp, Homo sapiens
  misc_feature (1)...(1933): n = a,t,c or g
atgtcttatcccgctgatgattatgagtctgaggcggcttatgacccctacgcttatcccagcgactatgatatgcacacaggagatccaaagcaggaccttgcttatgaacgtcagtatgaacagcaaacctatcaggtgatccctgaggtgatcaaaaacttcatccagtatttccacaaaactgtctcagatttgattgaccagaaagtgtatgagctacaggccagtcgtgtctccagtgatgtcattgaccagaaggtgtatgagatccaggacatctatgagaacagctggaccaagctgactgaaagattcttcaagaatacaccttggcccgaggctgaagccattgctccacaggttggcaatgatgctgtcttcctgattttatacaaagaattatactacaggcacatatatgccaaagtcagtgggggaccttccttggagcagaggtttgaatcctattacaactactgcaatctcttcaactacattcttaatgccgatggtcctgctccccttgaactacccaaccagtggctctgggatattatcgatgagttcatctaccagtttcagtcattcagtcagtaccgctgtaagactgccaagaagtcagaggaggagattgactttcttcgttccaatcccaaaatctggaatgttcatagtgtcctcaatgtccttcattccctggtagacaaatccaacatcaaccgacagttggaggtatacacaagcggaggtgaccctgagagtgtggctggggagtatgggcggcactccctctacaaaatgcttggttacttcagcctggtcgggcttctccgcctgcactccctgttaggagattactaccaggccatcaaggtgctggagaacatcgaactgaacaagaagagtatgtattcccgtgtgcccagagtgcccaggtcacccacatactattatgttgggtttgcatatttgatgatgcgtcgttacccaggatgccatccgggtcttcgccaacatcctcctctacatccagaggaccaagagcatgtttccagaggaccacgtacaagtatgagatgattaacaagcagaatgagcagatgcatgcgctgctggccattgccctcgacgatgtaccccatgcggtattgatgagagcattcacctccagctgcgggagaaatatgggggacaagatgttgcgcatgcatgaaaggtgacccacaagtctatgaagaacttttcagttactcctgccccaagtttcttgtcgcctgtagtgcccaactatgataatgtngcaccccaacttaccacaaagaagcccttcctgcaagcagctgaaaggtgttttctgatgaagtacagccagcaggcccagctttcaaccatccgcagcttcctgaagcttctacacccaccatgcctggtggccaagcctggcttggcttccctggacctcacagagcaggagttcccggatccagcttcttgtcttcaaacacaagatgaagaacctccgtgtggactcagcggtatctcaagccctggatggtgaatttcagtcagcctcagaggttgacttctacatttgataaggacatgattccacatcgcggacaccaaggtcgccaggcgttatggggatttcttcatccgtcagattccacaaatttggaggagcttaatccgaacccctgaagaagaatggggacagagaccttggatgatattcaccacacattccgggaacctggttttgaatgtattataggcaggaagtgtttttgctaaccgtgaaacctttacctagatcagccatcagcctgtcaactcagttaacaagtttaagggaccgaagtgtttcaagtgggatcttcagttaaaggatctttggagccagaaaaaaaaaagtcgaagcggccgccaa

SEQ ID NO: 125910 - DNA, 537 bp, Homo sapiens
  misc_feature (1)...(537): n = a,t,c or g
atgatggagcacggtggatgggcgctggcnnaggcgttcaccactgccgcgctcgccctggccgacgcgggcgtggagatgtacgacctggtggtgggctgcggcctcagcctcgcgccggggcccgcgcccacctggctcctggaccccacgcggctcgaggaagagcgcgccgccgccggcctcaccgtggcgctcatgcctgtgctgaatcaggtggccgggctgctgggcagcggcgagggcggcctgacagagagctgggcggaggccgtacgcctgggcctcgagggctgccagcgcctctaccccgtgctgcagcagagcctggtgcgggccgcccgccgcaggggcgccgccgcccagccctcaaccagaagcctgagcaactacggacgcaagccgaggaccgtgctgccgccgtccacgaaaagacccgcgccatcggcctccggggatcctctagagtggactcccaggcacaagcccctgcctgcggaggtcatccaggcctcaccaggctacaccctctcgtaa

SEQ ID NO: 125911 - DNA, 552 bp, Homo sapiens
ctagttcagctgacggatgagctgattgatgcgttcaccccgatagccaggtgtgcccatctccttgaggaagcccactctatttttggtagcatgatgggccactgagaggtggaaagggcgcaagaaccatgagatctcctggaaatgcttccctgggaaggcaatttcatgaatgaggtcttccaagcaaatgaagccaaacttccccaggtgctcctcaatcactgtgttgtctgtcagagggatggtcttattcttgaccttggcttgtccacgtttcaaaatgagttctcggacagacttcagatttggaaatccccaggtcacataaggttccactatatgcagcatttttagattgccatcaatcctttcgatgcgtacaacaaaggccaaggaatgtttatctggcaattccaaggcatgaggtttcacttctagtcgtctgagacgcaccttgtcacgtttctgccgccaggaatcatgtaggaatgattccagtcgcttaaacctgagcccttttcctttcttctgtcttgctactgccat

SEQ ID NO: 125912 - DNA, 854 bp, Homo sapiens
  misc_feature (1)...(854): n = a,t,c or g
tagatattcacatcttcaagtccttttgaaaatcagttattaatattattcttccctcatttccatctgaatgactgcagcaatagttttttgttttttttttccgagatggagtctcgctctgtcgcccagctggagtgcactggtgcaatctcggctcactgcaatctctgcctcctgggctcaagcgattttcctgccttagcctctcgagtagctgggaccacaggcacgcgccaccacacccagctcatttttgtatttttagtagagacagggtttcaccatgttggccaggatggtctcaatctcctggacctcatggtctgcccgcctgggcctccccaaagtgctgggattacagccgtgagccaccgcgccccggccagcaatacagtttttcagttactcgaacatctttaagccctataactcttaggctatgcatagccccatgtcctaatcaggcattcactgatcccagcaggtctccatctatttgtaccagcctcctctattcctcccaatctcaaggttactcttaaatactagtaaatgcaaaaagaacttgtgaagtggcaaggcatggcctatcaaaagtcagcccaaggggcagttttcagccctgcctcacctgggtctagttcagctgacggatgagctgattgatgcgttcaccccgatagccaggtgtgcccatctccttgaggaagcccactctatttttggtagcatgacgggccactgagaggtggaaagggcacaagaaccatgagatctcctggaaatgcttcccgggaaggcaatttcatctcgtgccgaattcctgcagccgncgaaggcntcgactcttt

SEQ ID NO: 125913 - DNA, 2809 bp, Homo sapiens
atgtttggccgctcgcggagctgggtgggcgggggccatggcaagacttcccgcaacatccactccttggaccacctcaagtatctgtaccacgttttgaccaaaaacaccacagtcacagaacagaaccggaacctgctagtggagaccatccgttccatcactgagatcctgatctggggagatcaaaatgacagctctgtatttgacttcttcctggagaagaatatgtttgttttcttcttgaacatcttgcggcaaaagtcgggccgttacgtgtgcgttcagctgctgcagaccttgaacatcctctttgagaacatcagtcacgagacctcactttattatttgctctcaaataactacgtaaattctatcatcgttcataaatttgacttttctgatgaggagattatggcctattatatatcgttcctgaaaacactttcgttaaaactcaacaaccacactgtccatttcttttataatgagcacaccaatgactttgccctgtacacagaagccatcaagtttttcaaccaccctgaaagcatggttagaattgctgtaagaaccataactttgaatgtctataaagtggataaccaggccatgctgcactacatccgagataaaactgctgttccttacttctccaatttggtctggttcattgggagccatgtgatcgaactcgatgactgcgtgcagactgatgaggagcatcggaatcggggtaaactgagtgatctggtggcagagcacctagaccacctgcactatctcaatgacatcctgatcatcaactgtgagttcctcaacgatgtgctcactgaccacctgctcaacaggctcttcctgcccctctacgtgtactcactggagaaccaggacaaggtcttcttaattatacatcatgcaccgctggtgaactcgttagctgaagtcattctgaatggtgatctgtctgagatgtacgctaagactgaacaggatattcagagaagttctgtcttacccactctaagctccttatggcagggatctcacctgtcactgaatcagctgcagtctgggctgcacaaatgctcatctcacttatgcggagcccaggctgcagctgattcagtgacaggtgagatccctgccataaggagcttagagtggctaatcagtgctggttccaaggcgcgcacattcttcttcctgaaaatgctaataggcttctgggagaaggttgattgtgaatatcaaaggcgtcaagtgctgagcacgcggctgcaagaggccttgccgtcaaatcgcctcactgatgttgcagctgtgcattcttcatgcatgttgggctttggttccacagctccacgcggctcctggattggcgatccagcggctgtgcatctgcccctacctggggagctggccgagcaccttgggtccaagggtaccaccactgtcaccaagcaccagccccaggccaagcccagcattcggtgcttcattaaacccaccgagacactcgagcggtcccttgagatgaacaagcacaagggcaagaggcgggtgcaaaagagacccaactacaaaaacgttggggaagaagaagatgaggagaaagggcccaccgaggatgcccaagaagacgccgagaaggctaaaggtacagagggtggttcaaaaggcatcaagacgagtggggagagtgaagagatcgagatggtgatcatggagcgtagcaagctctcagagctggccgccagcacctccgtgcaggagcagaacaccacggacgaggagaaaagcgccgccgccacctgctctgagagcacgcaatggagcagacccttcctggatatggtgtaccacgcgctggacagcccggatgatgattaccatgccctgttcgtgctctgcctcctctatgccatgtctcataataaagaaaatctcctgaaaaagaggaaggcttatcaggcactcaaagccacccaggcaaagcaggaacttttggcaaagaaggagcagaagaaaggaaaagggctcaggtttaagctactggaatcattcctacatgattactggcagcagaaacctgacaaggtgcatctcagacgactagaagtgaaacctcatgccgtggaattgccagataaacattccttggcctttgttgtacgcatcgaaaggattgatggcgtgagtttactggtgcagagaaccattgcaagactttgcctaaagaaaatttttagtggtgtctttgtaaaagtcaccccccagaatctacaaatgctgcgtatagtggaaacttatgtgacctggggatttccaaatctgaagtctgtccgagaactcattttgaaaccgtggacaagccaaggtcaagaataagaccatccctctgacagacaatacagtgattgaggagcacctggggaagtttggcgtcatttgcttggaagacctcattcatgaaaattgccttcccagggaagcatttccaggagatctcatggttcttgtgccctttccactttctcagtggcctgtcacgctaccaaaaataagagtgggcttcctcaaggagatgggcacacctggctatcggggtgaacgcatcaaatcagctcatccgtcagctgaactagacccaggtgccaaacttgcggtaaattttttatccagtgaagtgggaagcatgtgttttgttgttttgggaatttttatcaagtgtcttcagagaagattatttccctgctttatcttccagaaactggaaaggaagggtcaaagaaaagacagtagctgg

SEQ ID NO: 125914 - DNA, 753 bp, Homo sapiens
atggccatactgctcaagggattttgccgatttcggaaccaccatcaaacaggattttcgcctgctggggcaaaccagcgtggaccgcttgctgcaactctctcagggccaggcggtgaagggcaatcagctgttgcccgtctcactggtgaaaagaaaaaccaccctggcgcccaatacgcaaaccgcctctccccgcgcgttggccgattcattaatgcagctggcacgacaggtttcccgactggaaagcgggcaacaggaccctcagctgcaggtttgttggagtttgctagaggcccactccagaccctgtttgcctgggtaccagcagcggtggcggcagaacagcggatttttgtgaaccgcgaatgctgctgtctgatcgttcctcttgaagttttgtctcagaggagtacccggctgtgtgaggtgacacagaatgatatgataatggctgaaaggctctttggaatcctagcacatgtagcatcttctgagttaccccagtatcgtctgatttccattctgggtgatgccagctcttttgcctattttaaattggattcgagagattcttctagacgtccaaagtgcagagggtttgcaagccaaactaaatattcagaccgccaattaataatggggccgtggtcccagattaataatcagaccgacgatacgagtgggacccatggtccccagactaatattcagaccgacgatacgagtgggaccgtggtcccagtctga

SEQ ID NO: 125915 - DNA, 504 bp, Homo sapiens
atgtttcaaacggctggctgccaggcccatgctggtcactgtgagggccatgggcagagaagcataagggtccgaaaggtgttgcggcttcttcaccttcgtcaaatcttcagtggaacttttgtgaagcttaacaaggcttcaattaacatgctgaggattgtagaaccatatattgtatgggggtacccaaatctgaagtcagtaaatgaactaatctacaagtgtggttatggcaaaatcaataagaaaataattgctttgacagacaacgctttgattgctccatctcttggtaaatatggcatcatctgcatggaggatatgattaatgagatctatactgttggaaaacacttcaaagaagcaaataacttcctgtggccctttgaattatcttctccacgaggcggaatgaagaaaaagaccacccattttgtagaaggtggagatgctggcaacagacaggaccagatcaacaggttttttagaagaatgaactaa

SEQ ID NO: 125916 - DNA, 405 bp, Homo sapiens
atgagctgcatctgtaaacaagtttttgacttcttagaagatgaaagtgttgcttctttcttcttcctggatcacgcagagaaacccagcagtcgtgtttggcccatgaagaagaacacgtgggtaaccgtcatgatggctgcgttcatgagaacctgggctgacatgcgttcttgccacgtggtgcttgcgcagtgccgagtgctgatggccagtgtgggggccgcgtgccactcggaccacggggaccagccgtccccagtgctgctgagctacggtgtccccttcgacgtggccaggaacgcgctccggctcagcgtgggccgcagcaccaccagggccgaggtggacctcgtcgtgcaggacctgaagcaggccgtggcgcagctggaggaccaggcctag

SEQ ID NO: 125917 - DNA, 673 bp, Homo sapiens
gtgatgatcttacgcttcctgacatcgacatgtctggcagtgagtatgatattcctggagtcattactcgccctatctatgcagagatagagaagctaaccacagaacaactaactactcaccaggcttattggaatgctgttactgctcaggtagctgcaattactgctcgtgctaatcttggtattatcaaagctaactttgttacagctaagattcaggctctggctactaaagctgaatatgcccttactaagctgaagctgtctaatgagtcagtaacttactgtactgctcaatacaatctatcctctatgcttcctcaacaattactgatgttgaagaaccagaccactcaggttgctgaacagactaagttaactactgaacaaatcaatatgacgaaagagcagaaggaagcacaacgtgctcagacttctgatactcgtactgatggtactcgtgtagctggttctgtaggtaaacagaaagaactctatgaccaacagattacgtcttataaacgtgatgctgaagttaaagctgccaaactgtttactgatgcatgggtcactcagaaaaccattgatgagggtctgtctcctcctaatggcttcactaacaccagtctggatagcattcttactgcattgaagaataacaacgcattggg

SEQ ID NO: 125918 - DNA, 1263 bp, Homo sapiens
accaggcttattggaatgctgttactgctcaggtagctgcaattactgctcgtgctaatcttggtattatcaaagctaactttgttacagctaagattcaggctctggctactaaagctgaatatgcccttactaagctgaagctgtctaatgagtcagtaacttactgtactgctcaatacaatctatcctctatgcttcctcaacaattactgatgttgaagaaccagaccactcaggttgctgaacagactaagttaactactgaacaaatcaatatgacgaaagagcagaaggaagcacaacgtgctcagacttctgatactcgtactgatggtactcgtgtagctggttctgtaggtaaacagaaagaactctatgaccaacagattacgtcttataaacgtgatgctgaagttaaagctgccaaactgtttactgatgcatgggtcactcagaaaaccattgatgagggtctgtctcctcctaatggcttcactaacaccagtctggatagcattcttactgcattgaagaataacaacgcattgggattccctggttgggctgcaactaactatgacccttcaattggtattgcttatgggaacttgtcaatactgtctcagatagaccctgaagtagttaaatggcaagttcctcaaaaagcaggttatgaggtacaggttcagagcagtaggattggatttggtgattttgaggaatgggctgataaattcctctatgagaattatccagaccgtattactgaagagtttgaaatagacatcatggatgatgacaggattgtactcactgctactgatggtagtgagttatccttttatccagagaattacagtcaggatgcaatgtatctgtatgtgaactattactacatacagcctactagtgttgcagacccagtggttcatcctgctgtatctgtaccatctgctgatgacttaccttctacttctgaatggactcaggtatctcagaaccatactcctaagtcagctaccctgaagacagttactcatattaagagtgtattctctgatggcagacctgatgaggaaagtaccaatactgaagaagaacaggttagttggactaacttctcagatgtttacgagaaagaatttcgtgaaccaagtgaagtaggcttaatcattattcgtaagactacaatgacccaggtacagactggtactgtatctactggttccactacaaacactgaagttattgatttaggtg

SEQ ID NO: 125919 - DNA, 648 bp, Homo sapiens
acagcgtaaccaatgcaaagcaagttgacgtctctactgcaaccgcccagaagaaagctgaacaaggtgtcactactcctcttgtttctcctgatgctgcttatcaaatgcaagctgcccgtactgggaaccaggtattcaatgattcagttactacaagaactcctggggaagaactgggggatattgctactggtgttggtcttggttttgttaatacccttgggggcattggtgctcttggggcaggcttactcaacgatgatgcaggtgctgttgttgctcaacaattgagtaagtttaatgatgctgtccatgctacccaaagccaagcattacaagataaacgtaagctctttgctgctcgtaacttaatgagtgaagtagagagtgaacgtcagtatcaaacagataagaaagaaggcactaatgacatagtagcttccttatctaaatttggacgtgattttgtaggttcaattgagaacgctgcccaaactgactccattatttctgatgggttagcagaaggggtaggttctctattaggtgctggtcctgtattaaggggtgcatctttactgggtaaagcagttgttccagcaaatactcttcgtagtgctgcattggctggtgctattgatgcag

SEQ ID NO: 125920 - DNA, 1584 bp, Homo sapiens
ttaacgagttaagcgattagctgcaatgtaagcatcagccgtagattggtcacgattttctgcaacagcacgactacgagcacggtcttccagagcagtgttataggacttaatctggttattcagattagtgttagtaacatctttagcaaaagagaactgattcttagctaacttgttagcctgtaatgcaccatagatattacccagtgcattaagaccacctaaccccaactggaatgtaggaatgttcagacccagttggtcagtaagcccttgagtctgcccaccggtattccctgtagcaccaccagtaatattctgaagccagtcattactaaggatgccagattgcatagggttatagttcatggttggggtattaaaggaaccatacccatagccaaaattgctattagttaggttcattgcgtcaatgtaacccatgccctcagtgccaaacatttcctcgtacttttcctgaatggtttttatctggtcacggtactctgccataagtttctctgtctttttgacagtttccatagcagaagcattgatgtaatcacttatgccatttcctacagatgaagtgagtttaatgatgttgtctgctttcatcatttcacccagcatcgtagacatggatgaaccagtggataaagctgtgccgacattcatggctaccatagaggcaatagtagcaacaatgattccaatcttatccccaagcagactaacagagactgtttgaataatggacatcagaatcatagctgcaatggcattagccacagccccaacgataatagcagctaaccctgcaaaacctaatgcagcaccaatagaagcagcagtacccattaccccagcaccagcagcaggagtaaagaacacagacactactactgcaacaacaaccactactactttaaaaatgccagactgataccatttcttcttaactttcttatatgagttaagaaccagataacaacatgcagtagataactgagtaccatttaccaaagacatactacgataaatgttgttatgaagagggatgataaatccggactcttcatcatcatttagtgcatctacaccagaaatgcttacagatttattcttgtaaacattattgttatggttcaggccatagacagaaatcttcccctctctcccctgcaaagcctggtgataaagaataaacaataaatattcttcaacatactcaggaggtcgagtgtctggtccaagatctcggtgcaaagaaatcctgtcacttgcgaaagcattaaagcagtgtttagcttccccacgttccttttccttttgctcttcaacacttaaattggttgtcttgaatgctttaccagaagcaccaggtgcatttgaatcctgaggtggacggtcaaggacaggcttcaattctgctgctgtataatatccttgcaaacaaggtctctcaccagcatcaatgttttgcctgacaggtgctcctatttgcatttttggcatggcatccttaatattgtttacagcttctagcattaaatccaacatcttgtttttgtttttcat

SEQ ID NO: 125921 - DNA, 1671 bp, Homo sapiens
atgcagcttcccggacgcggtcacagctttgtgtgtaaagcgaatgccgggagcacacaagcccgtcagggcgcgtcagcgggtgttgccgggtgtcggggctggcttaactatgcggcatcagagcagattgttctgagagtgccccatatgcggtgtgaaatcccgcacaaatgcgtaaggagaaaatcccgcatcaggccccattccccattcaggctgcgcaactgttggaaagggcgatcggtgcgggccttttcgctattacgccagctggcgaaagggggatgtgctgcaaggcgattaagttgggtaacgccagggttttcccagtcacgacgttgtaaaacgacggccagtgccaagcttgcatgcctgcaggtaagagcacagagtgaagacatctctactgtgcctattcactatgcatacaatatgacccgtgttggtcgtatgcagatgttaggtaaatacaatcctcaatcagccaaactggttcgtgaggctatcctacctactaaagctactttggatttatcgaaccagaacaatgaagacttctctgcattccagttaggtctggctcaggcattgcacattaaagtccatactatgactcgtgaggttatgtctgacgagttgactaaattactggaaggtaatctgaaaccagccattgatatgatggttgagtttaataccactggttccttaccagaaaatgcagttgatgttctgaatacagcattaggagataggaagtcattcgtagcattgatggctcttatggagtattcccgttacttagtagcagaggataaatctgcatttgtaaccccactgtatgtagaagcagatggtgttactaatggtccaatcaatgccatgatgctaatgacaggtggcctgtttactcctgactggattcgtaatattgccaaagggggcttgttcattggttctccaaataagaccatgaatgagcatcgttctattgctgacaataatgatttatatcaagcatccactaatgctttgatggaatcgttgggtaagttacgtagtaactatgcttctaatatgcctattcagtcccagatagacagtcttctttctctgatggatttgttcctaccggatattaatcttggtgagaatggtgctttagaacttaaacgtggtattgctaagaacccgctgactattaccatctatggttctggtgctcgtggtattgcaggtaagctggttagttctgttactgatgccatctatgagcgtatgtctgatgtgctgaaagctcgtgctaaagacccaaacatctctgctgctatggcaatgtttggtaagcaagctgcttcagaagcacatgctgaagaacttcttgctcgtttcctgaaagatatggaaacactgacttctactgttcctgttaaacgtaaaggtgtactggaactacaatccacaggtgcaggagccaaagggaaaatcaatcctaagacctataccattaaggatcccgtcaattctccatataaattggcgtatctgggatcgaattcttctcactcatgcagctggttttgtgtggatgttcggtataatgcggctgcactaggagttcacatagcgatcggagggcgagagcgagcatgtgtctcagatctataa

SEQ ID NO: 125922 - DNA, 3831 bp, Homo sapiens
atgtacagcaaagaaaaagaaattgaaggactggaacaccaactgaagggtattaaagctgctcgtgcttatgcagaagatgttcgtaagctgatgggtaattcccttttccgtaaagtaattcttgagcaattctgtactgtagactgtgctcgttatgtacaagaatcctgtgacccattgcttgaagaccgtcaacgtgctgatgctcttgctatggctcaagctgctggttgtttaaaacgttatctggaaattactcttcagaaagcagaaacactggtaggtgtccaatcagatattgagaatgcattggatgttgctcgtgatacccccatgactacggaagctgcaaaaacagcttccgacatttttaaaatgtcggatgaagagattctgaacatgcctggtccatcaagcattcagaacaacccggaaccggtagaaaataatactcctgcacaaccagacccaattgttgaagttgaacaaactgatgaaccagaagtaactactgaaccaactgaagtagaaaatacttctgaatcagaaagcaattcagatgcattcacaactggtaatgatagtgctacagttgacccaaataaggttgacagcaacagtaagcctgctactgataatgcaccttctactactgagcaaggccaagcaaaagtagtagaagacaagcaggtatcagaccagaaaactgacttcgactataaggctggttatgaacggataatggctccgtttaaagctaacggcaaaatgattactcctcagagtcctgaagagcaggaggagtctctccttgtggtcaccacaggtgtctctgccaacagactcatgggtggtgccatgcagcttaccttccgcaagatggcgtttgactattaccctttccattgggcaggtgatagctgcaaacattgggtacgccactgtgaggccatggagacccgaggccagtgggcccagaagctggtgatggaatttcagagcaaaatggagaagtggcatgaagagacgggtctgaaaccaccctggcaccttggagtagactctctctttcggagaaaagcagattctctttccagtcctcgaaagaaccctcttgagagaagcccctctcagggcagacagcctgcctttcagcctccagcatggaaccgcttacgctctagctgcatggtggtacgggtggatgacctggacatccaccaggtttccaccgctggacagccaagtaaaaagccatctacactcctttcctgcagtcggaaacttcacaacctccctacccaggtctctgccattcatattgagttcacagagtattacttcccagataatcaggagcttccagttccttgtcctaatctctacattcagttaaatggtctgacatttactatggatcctgtcagtttgctctggggaaacctcttttgcctggatttataccgcagcttggagcagttcaaagctatctacaagctggaagattcaagtcagaaagatgaacacttggacatccgactagatgcattctggttgaagagacctaaggcttcctgggatctctggtctgtccactttacccagatctccttggactttgagggaacagaaaacttcaaaggccataccttgaattttgtagcccccttccccctgtccatttgggcctgcctacccctccgctggcagcaagcccaggcacggaagcttcttttggcctcagaggggaggctgaaaccatcagccagttttggaagtcctgtccagtctgaggctcttgcccctgactctatgtcccatccgcggtcaaagactgaacatgacttgaaaagcttatcaggacttacagaagtcatggaaattctgaaagaaggcagtagtggtatggacaacaaagggcctctgacagagctggaggatgtagcagatgttcatatgcttgtacattccccggcccatgtccgcgtgaggcttgaccactaccagtacttggctctgcttcgcctgaaggaggtgctgcagaggcttcaggagcagctgactaaggatacagagtcaatgactgggtctcccctgcagaatcagacagcttgcattggagttctctttcccagtgctgaagtggctctgcttatgcatcctgcacccggtgctgtcgatgctgactctgcaggctcagatagcactagcctcgtagattcagagctatctccttcagaggatcgggaactgaagtctgatgcctcatcagaccagggcccagcaagccctgagaaggtcttggaggaaagtagcattgaaaatcaggatgtatcccaggagaggccacatagcaatggagaactgcaggactcaggtccacttgcccagcagctggcagggaagggccatgaggcagtagagtccctacaggccaagaaactgagcagaacccaagcctccagctcaccagctgcattgaagcccccagctggcagggagactgctgtgaatggacagggtgagctcatccccttgaagaacattgagggagaattgtcaagtgctattcacatgaccaaggatgccaccaaggaggctctacatgccaccatggacctcaccaaggaagctgtgtccctgactaaggatgccttcagtttgggcagagatcgaatgacctccaccatgcacaagatgttgtccctgcccccagccaaggagcccatggccaagacagatgagggggtggcagccccagtgagtggaggtgctgcacgactccgatttttctccatgaagaggacggtatctcaacagtcatttgatggtgtctcattggatagcagtggccctgaagaccggatttcagtggacagtgatggcagtgatagctttgtgatgctcttggagtctgagtctggtccagaatctgttccaccaggatctctttcaaatgtctcagataatgctggtgttcaagggagccctcttgtgaataattatggccaggggtcaccagcagccaacagttcagtttcacccagtggagaagacctcatctttcacccggtctcagttctggtcctgaaggtgaatgaggtgtcttttgggattgaggtacgtggtgaggacctgactgtggccctgcaagcagaggaactgaccctccagcagctgggcaccgtgggactctggcagttcctgcatggacagtgcccaggtacatgctttcaggaatcctcaactttgaagactggccacatcaggccagctgtgggccttcgctttgaggtggggcctggagcagctgttcattcccccctggcctcacaaaatggcttcctacatttattgcttcatggctgtgacctcgagctgctcacttcagtgctcagtggcctggggcccttcttggaggatgaggagatcccggtggtagtccccatgcagattgagcttctgaactccagcatcaccctaaaggatgatatcccccccatctatccaacatctccaggccccatccccatcactctggccatggaacatgttgtgctgaagaggagtgatgatggtgtgttccacataggcgctgctgctcaggacaaaccatcagctgaagtacttaaaagtgagaagagacagcccccaaaagaacaggtgtttttggtgcccacaggagaggtttttgaacagcaggtgaaagaactgcctatcctacaaaaagaacttatagaaactaaacaagccttggccaatgccaaccaggataaagaaaaacttcttcaggagattaggaaatataaccccttctttgagctctga

SEQ ID NO: 125923 - DNA, 5373 bp, Homo sapiens
atggctatcactacttttgctaaaacttttggtcaggcttctactaaaactgaatccaacaatggttctcgcccgaaagctcaattctggattaacgttggctatgtagctaatgaaggcactgaagatgaacgtttcatctctctgcctactggtattccactggatactcaggaacatctgccaaccaattcctctaacgaagacttccgtgcaatgcgttgtgcacagaacgatttgttagatcaactgatggaatttgctaagactctggaaccaggtcaggaaggagttatctcactgcaagttcaacttcgtcgagttaaagaagaagctcctgctatctcagcaagcaagtatcttagaagacagccaatcagtgaagaaacagtagatgctctgtgtaagagctttactcatttacttcctgataatgataccaatctaccattcaatgtagatgttctcgactacatgatggaatgttctgatggaagatgtcatctgaaccaaagtcgaattaattggattaagagtcagttggagaaagcattactggataaaaacttctatgactatatctgtgatgatggagaaacacttcatattgcagtacatggtggagttacctatcaaggtgtccctcagtggactgatgggattaaagtcataggttatgactgtgctcatgcaggggataaactgaaatgtcctaaacaattcattggctccattagggagaaactctatgaggattcttatggagtatggcgagatgaagaatactgcatcaatgaatgtgaaagcatggataaggcaatgcgtaaatcactaatcatgggaaccaaagaagacgttgctaagatgaaagctaaacgtcagatgaataaagcagtaacgtttgcagaacgttatagtacgtctgaaccagtacgtcgtattgttactttcaaccatccagctattaaggcaactatcttagaggaaggaataatggaacagttaaactacggttataagattaaacgcaatcaagtaagaggttcttggttatttctcgtttatggcaagccaatctatgaattgcatcgtggagagaaattcaagacctattaccataaagctcgtattgctgacaggaatattcgtattcattatccaatgcctttgagcaatccatttcagaaaaatgagagaaccacggatgaagatatagcagcagcttatgaggcatatcttcgtaaccgtttggtaagtggcgacaagctcattacggctgaaatggaacgaattgctaaattcgttatggatgctactgacaaaccagttggcctcatcggtaatgaactggaagtgaatgtaatccatggaaccagagaagaagtaattgccaaatataaggtatggctacaagaacagattgataaaggtaatccagttgtactggatgaattaaatcgtcttggtaataaagccattgatgaaaaaggattagctttacagtgcttctgttatccaaaaccttgtcatggcgaggttattaaagagaactatgccattcccactaaagataccaatatcaaaacgatggctattgaagacattcgtacatttgtaaatgccttcattgtctatgctgctaatcatccagaacttaactttaaagttactcgtgtagggtgtggattagctggtattgatgattctgttatggcctctatgtttaaaaatgccactgaatatgcgatgtctactatcgaacatcagatgcacctcgaaaagctgtacaacaagaaccaactgttaccaagaatgcgtcaggagtttgaagaaaactctggtattgatttcaaagccttctttgcacatataggcattgattacaaatttggcattgatgcaatggttcaaatggctctgcataagagagctgacctaccaacattagttggcacattgcgtcatcactgcaaatctgcacaggaagtagcagacaacctttttaagatggcaagtgaggattgctttaactttgacccgaccatcgacaagttcattgtcatttatacaatcagcgatgacgtacagcatgaactggattcatttcaatatccactacctatggtagtacgccctaagctgttaactaagaattatggtactgggtacttcacatgtaataagagtgtgattcttaagaagaaccatactgacgatgacatctgcttagaccatctgaaccgtatgaataagattccattgtctatcaattgggatgtagctcatatggttaaaaatgaatgggctaatctggataaaccgaaagaaggtgaaactcgtcaggagtttgaaaaacgtgtgcgtgcattccagaaatacgaccgtactgcacatgaagtaatgggtttattgacccaggaaggcaataagttctatctgactcatcgtccggataaacgtggtcccaataggctaagacgcgaggaatatacaatgcaaacttttactgcccgtgaatatctgaaaattgacattgctaataactatggtctggataaagaagactgggatgaccgtattgcatggttcgataagaatgagaacaacctactgaaccttgtaagagaagctgaagaaccagccctgttctatgctggtgttaaagcatggatggacgttaaggaaggtaagccaattggttatcctgttgcactggatgctacatcatctggtctacagattctggcttgtctgactggtgaccgtagagctgctgaactatgtaacgttgttaactatcgtgatgaaagtggcaaagttaaacgtcgtgatgcttatacagttatctacaacaagatgctgaacactcttggtaaaggtgctcgtatcaaacgtaatgactgtaaacaagcaatcatgactgctctgtatggttcagaagctaaaccaaaggaagtatttggtgaaggcattatgctcaacgtatttgaaagcacaatgaatgtggaagcacctgctgtatgggaactgaataaattctggttacagtgtggtaatccagaggctttcgtatatcactgggtaatgccagatggctttaacgtatatatcaaagtaatggtaaatgaagtggagactgtccacttcttagataagccatatgactgtgttcgtaaagtacaaggtactgaagagaagactcgtatgctatctgccaataccactcactctattgatggcctggtagtacgtgagctggttcgtcgttgtgactatgacaagaaccagattgaatacatcaaggctctttgcaatggtgaagctgaatataagacttctgaaaagaactatggcaaagcaatggaactgtggggctactatgagaagacaggattcctgactgctcgtatctttgattatctggattctgaaactattaaattagtaaatactcaggacattctagacctgattgaatccatgcctaagaagccattccatgtactcactgtacatgactgcttccgttgcctgcctaactatggcaatgacattcgtcgtcagtacaacaacctgttagctactattgctaaagtgatgtttcataaagacaccaacgtagctactgtactggatgccagtggtagccttagtgatggttccgttgaggtgggtactttccatcatcctgatgaaacctatcccgatagtgtaactatctatcatggtgtacgtgacctgctgtataaacgcagtgctaaagacccatctcaaactgcttcttacccaaataacattatcaatatgcaagttatcagtattgatatgaaggcaactcctcgcctgattttgggtactgcattgcctcgtgtaatctctactattgaaggtaaagatgtaacctggcatgtagatgttgctggtggtaaagcaccattgacttacaagtggcagtttaaagctaatactgtaggtgctgctttcgctgatattgattccggagagaatcctacagctaaaactgcaactcttattaaccatgcagtaactgctgaatctgctggtacttataaagtcatcgttactgatgctaacggtactactatcgagagttcttctctgctggttgtaggagttcaggaaccacctgaagtagcttctattgttgcttatccaagtccactggctctatcagtagctgatgatattaccgatggtaaaacagttaagttttcttccctgcctgctggctctttgattggtactctgtccattaagacccagcctgacagtggtaaagctactgctgagattagtggtaatgtactgacagttaaacctgtagccgcagtacccggcaaagccttctatgttgaagtagattcagtagaagaaggtgtacgtatcattgatatactagccaactatgacctattccagtatgagaacaatatcaaaggtgattactgcaatgtctctggtttacagatgtatgatgaacatatcactgatgatgaaatggaagagatgggtctgactgaccgttgggtagactggtactatgaagatgaccagagcttttttgataacccgaaagagtatttgaataatctcaagaatttaacgagctgctatgaccgagttgaaccaggtaatgtaggtattatcgttaatcgtctcggtgaagataaaggtgtggaaaatgaggttaaaggcgtaggccgttactggctcacttggaatgaagaactttatacattcccgacctttaagcagatgaagacctatgacggtctgttctacttccaactgtctgatggtactcagataggccaccagatggctatcagctataaagtgaaccctactaaggtaactaatatcttccagacgtatcgtaagggagttaatgaaattaccgagcaggatttacgacaacgtattgctgatgtacttaacagacagggtaacctgattaacactgatacctttattgatggtggtaaatctaagctactggatagtgtcactgacacaatccgtaaagagatggaaccagtggggattgatattattgctatctcctggattggtgctcctgaataccctgataacgttaaacgtgccattaatgccaaagtagaagctactcagaaaactctgcaacgtgagcaagagattcagcaacgtgtggctgaagctaatatggaacgtgaacaagctaagggtgtagcagatgctattcgtttacgtggtgaagcactcaccgagaacccaaatgtaatgcaactggaagccattaataagtggaatggtacattacctaccacaatgattcctggggctactacacctttcgttaatgtgaaataa

SEQ ID NO: 125924 - DNA, 4002 bp, Homo sapiens
atgttgaactataacgctcctattgacggtcagaaatctagtattgatggtgctaactctgcccagatgcaaaccttcttctggctgaagaaagcaatcatcactgcccgtaaagagcagtacttcatgccactggcctctgtaactaacatgccgaagcattacggtaagaccatcaaggtatatgaatatgttcctctgctggatgaccgtaacatcaatgaccagggtattgatgcaagtggtgctactattgttaacggtaacctgtatggttccagcaaagacatcggtaacattacttccaaactgcctctactgactgaaaacggtggtcgagttaaccgtgttggttttactcgtattgctcgtgaaggttctattcacaagtttggcttcttctatgagttcactcaggaatctattgacttcgattctgatgatggcctgatggaacacctgtcccgtgaactgatgaatggtgctactcagattactgaagctgtactgcaaaaagacctgctggctgctgctggtactgttctgtatgctggtgctgctacttctgatgccaccatcactggtgaaggttctactccgtctatcgtttcttataagaacctgatgcgtcttgaccagattctgacagagaaccgtactcctactcagactaccattatcactggttcccgtatgattgatactaaagtcatcggtgctactcgtgttatgtatgtaccttctgacctggttccagaagtcaaagcaatgaaagacctgttcggtaataaagcctttatcgaaactcagcactatgctgatgcagacattgtgagtaaacagattaaaacggatgagagcagaactcaggaaggacaatactctgcgttgcaacatgcgaataggattcggtctgcgtataactctggtaatttcgagttggcctccgcttacctgaacgactttatgcagttcgcccagcacatgcagaataaggttggagcgttgaatgagcatcttgttacggggaatgcggataagaataagtctgtccactaccaagctcttactgctgacagagaatgggttcgtagccgtaccggattgggggtcaatccctatgacactaagtcggttaaatttgcccagcaagttgctcttgaagcgaaaacggtagcggatattgctaatgccctcgcttcggcttacccggaactgaaggtcagtcatataaaagttactccattggattcacgtcttaacgcccctgctgctgaggtggtcaaggcattccgtcaaggcaatcgagacgttgctttttctcaacagaaagctgactccgtgaatcaggttaaagaaactcctgttacaaaacaggaaccagttacatctactgtacagactaagactcctgttagtgaacctgttaaaacagaacctactactaaagagtctagaccacaggctataaaagaacctgtgagccagtctgaaaaacgggatgttaaccttactaatgaggacaccatcaagcaacctactgaatctgttaaagaaactgaaacttctgcaaaagaaagcacagttacagaagaattaagagaaggtatcgatgctgtttacccctcattggtaggtactgctgattctaaagcagagggtattaagaactatttcaaattgtcctttaccttaccggaagaacagaaatcccgtactgttggttcagaagcacctctaaaagaggtagctcaagctctgtcttctcgtgctcgttatgaactctttactgagaaagaagttgctaatcctgcttttaatggggaagttattaagcgatataaagaactcatggaacatggggaaggtattgctgatattcttcgttcccgtctggctaagttccttaacactaaggatgttggtaaacgttttgctcagggtacagaagccaaccgttgggtaggcggtaagttacttaacatcgttgaacaggatggggatacctttaagtacaatgagcaattgctacagactgctgtattagtgggtcttcagtggagacttactgctaccagcaatactgctatcaaagatgcaaaagatgttgctgctattactggtattgaccaagccctgctgccagaaggtttagtagagcaatttgatactggtatgacactcactgaagcagttagttccctggctcagaaaattgagtcttactggggattatctcgtaatccaaatgctccattgggttataccaaaggtatccctacagcaatggctgctgaaattctggctgcatttgtagagtctactgatgttgtagagaacatcgtggatatgtcagaaattgacccagataataagaagacgattggtctgtacaccattactgaactggattccttcgacccaattaatagcttccctactgctattgaagaagctgttttagtaaatcctacagagaagatgttctttggtgatgacattcctcctgtagctaatactcagcttcgtaaccctgctgttcgtaatactccagaacagaaggctgcattgaaagcagaacaggctacagagttctatgtacacactccaatggttcaattctatgagacgttaggtaaagaccgtattctcgaactgatgggtgctggtactctgaataaagagttacttaatgataatcatgctaaatctctggaaggtaagaaccgttcagtagaggactcttacaaccaactgttctccgtcattgagcaggtaagagcacagagtgaagacatctctactgtgcctattcactatgcatacaatatgacccgtgttggtcgtatgcagatgttaggtaaatacaatcctcaatcagccaaactggttcgtgaggctatcctacctactaaagctactttggatttatcgaaccagaacaatgaagacttctctgcattccagttaggtctggctcaggcattggacattaaagtccatactatgactcgtgaggttatgtctgacgagttgactaaattactggaagacagtcttctttctctgatggatttgttcctaccggatattaatcttggtgagaatggtgctttagaacttaaacgtggtattgctaagaacccgctgactattaccatctatggttctggtgctcgtggtattgcaggtaagctggttagttctgttactgatgccatctatgagcgtatgtctgatgtgctgaaagctcgtgctaaagacccaaacatctctgctgctatggcaatgtttggtaagcaagctgcttcagaagcacatgctgaagaacttcttgctcgtttcctgaaagatatggaaacactgacttctactgttcctgttaaacgtaaaggtgtactggaactacaatccacaggtgcaggagccaaagggaaaatcaatcctaagacctataccattaagggtgagcaactgaaggcacttcaggaaaatatgctgcacttctttgtagaaccactacgtaatgctattactcagactaggtatcaatggtgtgagcccaaaggtctgaaaggtgttgcagcttcttcccttcgtcaaatcttcaacagaacctttgtgaagctcaacaaggcttcagttaacatgctgaggattgtagagccatacactgcatgggggtacccaattctgaagtcagtaaatgaactaatccataagtgtggttatggcaaaatcagtaagaagcgaattgctttgacagatgaggctttgatggctcaatctctcggtaaatatggcatcatctgcagggaggatctgattcatgagatctataccattggaaaacacttcaaagaagcaaataacttcctgtggcccttcaaattatcttctccacgaggcagaatgaagaaaaagaccacccattttgtagaaggtggagatgctggcaacagggaggaccagatcaacaggcttattagaagaatgaactaa
